United States Patent Application Publication US 2007/0214517 A1 - sequence listing, part 52

SEQ ID NO: 69823 - protein, 786 aa, Arabidopsis thaliana
  peptide (1)..(786): Ceres Seq. ID no. 1828459
  misc_feature (385)..(698): Pfam Name: Formin Homology 2 Domain Pfam Description: Formin Homology 2 Domain
  misc_feature (2)..(729): Homolog of NCBI NO: 15221178 NR Description: putative extensin; protein id: At1g12040.1, by cDNA: gi_13809917 [Arabidopsis thaliana]
  misc_feature (40)..(762): Homolog of NCBI NO: 15235668 NR Description: extensin-like protein; protein id: At4g13340.1
  misc_feature (33)..(607): Homolog of NCBI NO: 15233976 NR Description: extensin-like protein; protein id: At4g18670.1
  misc_feature (554)..(711): Homolog of NCBI NO: 15233976 NR Description: extensin-like protein; protein id: At4g18670.1
  misc_feature (634)..(786): Homolog of NCBI NO: 15233976 NR Description: extensin-like protein; protein id: At4g18670.1
  misc_feature (537)..(700): Homolog of NCBI NO: 15233976 NR Description: extensin-like protein; protein id: At4g18670.1
  misc_feature (605)..(769): Homolog of NCBI NO: 15233976 NR Description: extensin-like protein; protein id: At4g18670.1
  misc_feature (45)..(711): Homolog of NCBI NO: 5917664 NR Description: extensin-like protein [Lycopersicon esculentum]
  misc_feature (1)..(786): Homolog of NCBI NO: 30685162 NR Description: leucine-rich repeat extensin family [Arabidopsis
  misc_feature (31)..(732): Homolog of NCBI NO: 15226640 NR Description: unknown protein; protein id: At2g15880.1
MLLFPSTSLRLFFFLFLLFSSCFLQIRGDDDDDDISDDNIKVDPSLKFENPSLRQAYIALQSWKQAIFSDPFNFTANWNGSDVCSYNGIFCAPSPSSPKTRVVAGIDLNHADMAGYLPRELGLLTDLALFHLNSNRFCGEVPLTFKHMKLLFELDLSNNRFVGKFPNVVLSLPSLKFLDLRYNEFEGSIPSKLFDKELDAIFLNHNRFMFGIPENMGNSPVSALVLADNDLGGCIPGSIGLMGKTLNEIILSNDNLTGCLPPQIGNLKNVTVFDISFNRLSGPLPSSIGNMKSLEQLNVANNRFTGVIPSSICQLSNLENFTYSSNFFTGDAPRCVALLGDNVVVNGSMNCIDGKEDQRSSKECSSPASRSVDCSKFGCNNFFSPPPPSFKMSPTVRVLPPPPPSSKMSPTFRATPPPPSSKMSPSFRATPPPPSSKMSPSFRATPPPPSSKMSPSVKAYPPPPPPPEYEPSPPPPSSEMSPSVRAYPPPPPLSPPPPSPPPPYIYSSPPPPSPSPPPPYIYSSPPPVVNCPPTTQSPPPPKYEQTPSPREYYPSPSPPYYQYTSSPPPPTYYATQSPPPPPPPTYYAVQSPPPPPPVYYPPVTASPPPPPVYYTPVIQSPPPPPVYYSPVTQSPPPPPPVYYPPVTQSPPPSPVYYPPVTQSPPPPPVYYLPVTQSPPPPSPVYYPPVAKSPPPPSPVYYPPVTQSPPPPSTPVEYHPPASPNQSPPPEYQSPPPKGCNDSPSNDHHYQTPTPPSLPPPYYEDTPLPPIRGVSYASPPPPSIPYY

SEQ ID NO: 69824 - protein, 674 aa, Arabidopsis thaliana
  peptide (1)..(674): Ceres Seq. ID no. 1828460
  misc_feature (273)..(586): Pfam Name: Formin Homology 2 Domain Pfam Description: Formin Homology 2 Domain
  misc_feature (1)..(617): Homolog of NCBI NO: 15221178 NR Description: putative extensin; protein id: At1g12040.1, by cDNA: gi_13809917 [Arabidopsis thaliana]
  misc_feature (1)..(650): Homolog of NCBI NO: 15235668 NR Description: extensin-like protein; protein id: At4g13340.1
  misc_feature (1)..(495): Homolog of NCBI NO: 15233976 NR Description: extensin-like protein; protein id: At4g18670.1
  misc_feature (442)..(599): Homolog of NCBI NO: 15233976 NR Description: extensin-like protein; protein id: At4g18670.1
  misc_feature (522)..(674): Homolog of NCBI NO: 15233976 NR Description: extensin-like protein; protein id: At4g18670.1
  misc_feature (425)..(588): Homolog of NCBI NO: 15233976 NR Description: extensin-like protein; protein id: At4g18670.1
  misc_feature (493)..(657): Homolog of NCBI NO: 15233976 NR Description: extensin-like protein; protein id: At4g18670.1
  misc_feature (1)..(599): Homolog of NCBI NO: 5917664 NR Description: extensin-like protein [Lycopersicon esculentum]
  misc_feature (1)..(674): Homolog of NCBI NO: 30685162 NR Description: leucine-rich repeat extensin family [Arabidopsis
  misc_feature (1)..(620): Homolog of NCBI NO: 15226640 NR Description: unknown protein; protein id: At2g15880.1
MAGYLPRELGLLTDLALFHLNSNRFCGEVPLTFKHMKLLFELDLSNNRFVGKFPNVVLSLPSLKFLDLRYNEFEGSIPSKLFDKELDAIFLNHNRFMFGIPENMGNSPVSALVLADNDLGGCIPGSIGLMGKTLNEIILSNDNLTGCLPPQIGNLKNVTVFDISFNRLSGPLPSSIGNMKSLEQLNVANNRFTGVIPSSICQLSNLENFTYSSNFFTGDAPRCVALLGDNVVVNGSMNCIDGKEDQRSSKECSSPASRSVDCSKFGCNNFFSPPPPSFKMSPTVRVLPPPPPSSKMSPTFRATPPPPSSKMSPSFRATPPPPSSKMSPSFRATPPPPSSKMSPSVKAYPPPPPPPEYEPSPPPPSSEMSPSVRAYPPPPPLSPPPPSPPPPYIYSSPPPPSPSPPPPYIYSSPPPVVNCPPTTQSPPPPKYEQTPSPREYYPSPSPPYYQYTSSPPPPTYYATQSPPPPPPPTYYAVQSPPPPPPVYYPPVTASPPPPPVYYTPVIQSPPPPPVYYSPVTQSPPPPPPVYYPPVTQSPPPSPVYYPPVTQSPPPPPVYYLPVTQSPPPPSPVYYPPVAKSPPPPSPVYYPPVTQSPPPPSTPVEYHPPASPNQSPPPEYQSPPPKGCNDSPSNDHHYQTPTPPSLPPPYYEDTPLPPIRGVSYASPPPPSIPYY

SEQ ID NO: 69825 - protein, 639 aa, Arabidopsis thaliana
  peptide (1)..(639): Ceres Seq. ID no. 1828461
  misc_feature (238)..(551): Pfam Name: Formin Homology 2 Domain Pfam Description: Formin Homology 2 Domain
  misc_feature (1)..(582): Homolog of NCBI NO: 15221178 NR Description: putative extensin; protein id: At1g12040.1, by cDNA: gi_13809917 [Arabidopsis thaliana]
  misc_feature (1)..(615): Homolog of NCBI NO: 15235668 NR Description: extensin-like protein; protein id: At4g13340.1
  misc_feature (1)..(460): Homolog of NCBI NO: 15233976 NR Description: extensin-like protein; protein id: At4g18670.1
  misc_feature (407)..(564): Homolog of NCBI NO: 15233976 NR Description: extensin-like protein; protein id: At4g18670.1
  misc_feature (487)..(639): Homolog of NCBI NO: 15233976 NR Description: extensin-like protein; protein id: At4g18670.1
  misc_feature (390)..(553): Homolog of NCBI NO: 15233976 NR Description: extensin-like protein; protein id: At4g18670.1
  misc_feature (458)..(622): Homolog of NCBI NO: 15233976 NR Description: extensin-like protein; protein id: At4g18670.1
  misc_feature (1)..(564): Homolog of NCBI NO: 5917664 NR Description: extensin-like protein [Lycopersicon esculentum]
  misc_feature (1)..(639): Homolog of NCBI NO: 30685162 NR Description: leucine-rich repeat extensin family [Arabidopsis
  misc_feature (1)..(585): Homolog of NCBI NO: 15226640 NR Description: unknown protein; protein id: At2g15880.1
MKLLFELDLSNNRFVGKFPNVVLSLPSLKFLDLRYNEFEGSIPSKLFDKELDAIFLNHNRFMFGIPENMGNSPVSALVLADNDLGGCIPGSIGLMGKTLNEIILSNDNLTGCLPPQIGNLKNVTVFDISFNRLSGPLPSSIGNMKSLEQLNVANNRFTGVIPSSICQLSNLENFTYSSNFFTGDAPRCVALLGDNVVVNGSMNCIDGKEDQRSSKECSSPASRSVDCSKFGCNNFFSPPPPSFKMSPTVRVLPPPPPSSKMSPTFRATPPPPSSKMSPSFRATPPPPSSKMSPSFRATPPPPSSKMSPSVKAYPPPPPPPEYEPSPPPPSSEMSPSVRAYPPPPPLSPPPPSPPPPYIYSSPPPPSPSPPPPYIYSSPPPVVNCPPTTQSPPPPKYEQTPSPREYYPSPSPPYYQYTSSPPPPTYYATQSPPPPPPPTYYAVQSPPPPPPVYYPPVTASPPPPPVYYTPVIQSPPPPPVYYSPVTQSPPPPPPVYYPPVTQSPPPSPVYYPPVTQSPPPPPVYYLPVTQSPPPPSPVYYPPVAKSPPPPSPVYYPPVTQSPPPPSTPVEYHPPASPNQSPPPEYQSPPPKGCNDSPSNDHHYQTPTPPSLPPPYYEDTPLPPIRGVSYASPPPPSIPYY

SEQ ID NO: 69826 - DNA, 2529 bp, Arabidopsis thaliana
  misc_feature (1)..(2529): Ceres Seq. ID no. 1828496
  misc_feature: MA Experiment ID: 20000495 Result: Up-regulated in Transcription
  misc_feature: MA Experiment 20000495 PARAMETER Experiment Name: At_Guard_Cells_P Parameter: Harvest Date Value: 8/2/2002
  misc_feature: MA Experiment 20000495 PARAMETER Experiment Name: At_Guard_Cells_P Parameter: Organism Value: A. thaliana
  misc_feature: MA Experiment 20000495 PARAMETER Experiment Name: At_Guard_Cells_P Parameter: Tissue Value: Guard Cells vs. Leaves
  misc_feature: MA Experiment ID: 20000709 Result: Up-regulated in Transcription
  misc_feature: MA Experiment 20000709 PARAMETER Experiment Name: At_15mM_NH4NO3_L-to-H_P Parameter: Age (hr) Value: 14
  misc_feature: MA Experiment 20000709 PARAMETER Experiment Name: At_15mM_NH4NO3_L-to-H_P Parameter: Organism Value: A. thaliana
  misc_feature: MA Experiment 20000709 PARAMETER Experiment Name: At_15mM_NH4NO3_L-to-H_P Parameter: Plant Line Value: WS
  misc_feature: MA Experiment 20000709 PARAMETER Experiment Name: At_15mM_NH4NO3_L-to-H_P Parameter: Timepoint (hr) Value: 4
  misc_feature: MA Experiment 20000709 PARAMETER Experiment Name: At_15mM_NH4NO3_L-to-H_P Parameter: Tissue Value: Aerial
  misc_feature: MA Experiment 20000709 PARAMETER Experiment Name: At_15mM_NH4NO3_L-to-H_P Parameter: Treatment Value: 15mM NH4NO3 vs. 30mM Mannitol
  misc_feature: MA Experiment ID: 20001905 Result: Up-regulated in Transcription
  misc_feature: MA Experiment 20001905 PARAMETER Experiment Name: At_Drought_Reproduction_P Parameter: Age (day) Value: 40
  misc_feature: MA Experiment 20001905 PARAMETER Experiment Name: At_Drought_Reproduction_P Parameter: Organism Value: A. thaliana
  misc_feature: MA Experiment 20001905 PARAMETER Experiment Name: At_Drought_Reproduction_P Parameter: Plant Line Value: WS
  misc_feature: MA Experiment 20001905 PARAMETER Experiment Name: At_Drought_Reproduction_P Parameter: Timepoint (day) Value: 10
  misc_feature: MA Experiment 20001905 PARAMETER Experiment Name: At_Drought_Reproduction_P Parameter: Tissue Value: Rosettes
  misc_feature: MA Experiment 20001905 PARAMETER Experiment Name: At_Drought_Reproduction_P Parameter: Treatment Value: Drought vs. No Drought
atggcaggatttaacagaaaccttactttggtgacgactcttttgatattccatcaactatgtagcaacgtatcttgctccacaagcaactcattcactagaaaccacacaatacgagagggagactcactgatcagcgaggatgaaagcttcgagcttggattcttcacccccaaaaattcgacgttaaggtatgttggaatatggtacaagaacatagaacctcaaacagttgtttgggttgcgaatagagagaagccgttgttggatcacaagggagctctaaagattgcagatgacggaaatttggtgatcgtgaacggtcaaaacgaaaccatttggtccacaaatgtcgagcccgagtcaaacaacacggttgctgttctgttcaaaacaggggatttggttctgtgttcagactcagacagaagaaaatggtattgggagagttttaacaatccaaccgacactttcttgcccggtatgagggttcgggtgaatccttcgcttggagaaaatcgcgcatttatcccgtggaaatccgagagtgatccttcaccaggaaagtattcaatggggattgatcctgtgggagcactagagattgtgatttgggaaggggaaaagagaaaatggcgtagcggaccgtggaattcggctatctttaccggtatacctgatatgctccgtttcacaaattatatttacgggtttaagctctcttctcctcctgatagagatggtagcgtgtacttcacgtatgttgcctcagatagttccgatttcttgaggttttggattaggcctgatggcgtagaagagcagttcagatggaataaggatatcaggaactggaatttgcttcaatggaaaccaagcacggaatgtgagaagtataaccgttgtggtaattacagtgtatgtgatgatagtaaggagtttgattccggtaaatgcagttgcattgatggatttgagccggttcatcaggatcaatggaacaacagggacttctcaggtggctgccaaagaagagttcctttgaactgtaatcagagtctggttgcaggtcaagaggatgggtttacggtacttaagggaataaaggtgcctgattttggatcagttgttttacataacaactcagagacctgtaaagatgtatgcgcaagggactgttcttgtaaggcttatgcgttagtagtagggatcggatgcatgatttggacccgtgatttgatcgatatggaacattttgaacgcggtggaaactctatcaacatccggctagcgggttctaaactaggtggtgggaaggaaaattcaacactttggataattgttttcagtgttataggagcattcttactaggattatgcatttggatcttatggaagtttaagaaaagccttaaagctttcttgtggaagaagaaagatatcacagtttctgatatcatagagaacagagattactcaagctcgccgatcaaagttctagtaggggatcaagttgacacacccgatttaccaatattcagttttgacagcgtagcctcagctactggagatttcgctgaagagaacaagcttggacagggcggattcggtactgtatataagggaaacttttcagaaggaagagagattgcagtgaagagactatcagggaaatctaaacaaggactagaggagttcaagaacgagatcttactaatcgcgaaactccagcatcggaatcttgttagattactaggatgttgcattgaagacaatgagaagatgcttctctatgaatatatgccaaacaagagtttggaccgctttctttttgatgagagtaaacaaggaagtttggactggagaaaacgatgggaggtcattggaggaatcgcgaggggattactttacttacatagagactcaagactaaagatcattcaccgtgacctaaaagctagcaatatcttgctagacacggaaatgaatccaaagatctcggatttcggtatggctaggatattcaactaccgacaagaccatgccaacacaatccgagtcgtcggcacatatggttatatggctccggagtatgcaatggaagggatattctcagagaaatcagatgtgtatagctttggagtgttgatattggagattgtgagtggaagaaaaaacgttagctttcgagggactgatcatggaagtctcattggttatgcgtggcatttatggagccaaggaaagacaaaagagatgatagatccaattgtgaaggacactagagacgtgacggaagcgatgagatgcatccacgtgggtatgttgtgtacacaagactcggtcattcacagaccaaacatgggttcggttttgttgatgttggagagtcaaaccagtcaacttccacccccgagacagccgaccttccactcgttcttgaactctggtgacattgaactcaactttgacggtcacgatgttgcctccgttaacgatgttactttcacaacaattgttggtagatga

SEQ ID NO: 69827 - protein, 842 aa, Arabidopsis thaliana
  peptide (1)..(842): Ceres Seq. ID no. 1828497
  misc_feature (75)..(186): Pfam Name: D-mannose binding lectin Pfam Description: D-mannose binding lectin
  misc_feature (4)..(842): Homolog of NCBI NO: 15234429 NR Description: serine/threonine kinase - like protein; protein
  misc_feature (9)..(842): Homolog of NCBI NO: 7434416 NR Description: serine/threonine kinase (EC 2.7.1.-) BRLK - wild >gi|2181190|emb|CAA73134.1| serine/threonine kinase [Brassica
  misc_feature (4)..(690): Homolog of NCBI NO: 4455151 NR Description: putative serine/threonine kinase (fragment)
  misc_feature (8)..(842): Homolog of NCBI NO: 15220348 NR Description: receptor-like protein kinase, putative; protein
  misc_feature (14)..(842): Homolog of NCBI NO: 15220353 NR Description: serine/threonine kinase, putative; protein id:
  misc_feature (14)..(842): Homolog of NCBI NO: 4008010 NR Description: receptor-like protein kinase [Arabidopsis
  misc_feature (14)..(437): Homolog of NCBI NO: 15220338 NR Description: serine/threonine kinase, putative; protein id:
  misc_feature (451)..(841): Homolog of NCBI NO: 15220338 NR Description: serine/threonine kinase, putative; protein id:
  misc_feature (10)..(842): Homolog of NCBI NO: 7428022 NR Description: S-receptor kinase (EC 2.7.1.-) KIK1 precursor - >gi|2735017|gb|AAB93834.1| KI domain interacting kinase 1 [Zea
  misc_feature (37)..(842): Homolog of NCBI NO: 15220338 NR Description: serine/threonine kinase, putative; protein id:
MAGFNRNLTLVTTLLIFHQLCSNVSCSTSNSFTRNHTIREGDSLISEDESFELGFFTPKNSTLRYVGIWYKNIEPQTVVWVANREKPLLDHKGALKIADDGNLVIVNGQNETIWSTNVEPESNNTVAVLFKTGDLVLCSDSDRRKWYWESFNNPTDTFLPGMRVRVNPSLGENRAFIPWKSESDPSPGKYSMGIDPVGALEIVIWEGEKRKWRSGPWNSAIFTGIPDMLRFTNYIYGFKLSSPPDRDGSVYFTYVASDSSDFLRFWIRPDGVEEQFRWNKDIRNWNLLQWKPSTECEKYNRCGNYSVCDDSKEFDSGKCSCIDGFEPVHQDQWNNRDFSGGCQRRVPLNCNQSLVAGQEDGFTVLKGIKVPDFGSVVLHNNSETCKDVCARDCSCKAYALVVGIGCMIWTRDLIDMEHFERGGNSINIRLAGSKLGGGKENSTLWIIVFSVIGAFLLGLCIWILWKFKKSLKAFLWKKKDITVSDIIENRDYSSSPIKVLVGDQVDTPDLPIFSFDSVASATGDFAEENKLGQGGFGTVYKGNFSEGREIAVKRLSGKSKQGLEEFKNEILLIAKLQHRNLVRLLGCCIEDNEKMLLYEYMPNKSLDRFLFDESKQGSLDWRKRWEVIGGIARGLLYLHRDSRLKIIHRDLKASNILLDTEMNPKISDFGMARIFNYRQDHANTIRVVGTYGYMAPEYAMEGIFSEKSDVYSFGVLILEIVSGRKNVSFRGTDHGSLIGYAWHLWSQGKTKEMIDPIVKDTRDVTEAMRCIHVGMLCTQDSVIHRPNMGSVLLMLESQTSQLPPPRQPTFHSFLNSGDIELNFDGHDVASVNDVTFTTIVGR

SEQ ID NO: 69828 - protein, 681 aa, Arabidopsis thaliana
  peptide (1)..(681): Ceres Seq. ID no. 1828498
  misc_feature (1)..(681): Homolog of NCBI NO: 15234429 NR Description: serine/threonine kinase - like protein; protein
  misc_feature (1)..(681): Homolog of NCBI NO: 7434416 NR Description: serine/threonine kinase (EC 2.7.1.-) BRLK - wild >gi|2181190|emb|CAA73134.1| serine/threonine kinase [Brassica
  misc_feature (1)..(529): Homolog of NCBI NO: 4455151 NR Description: putative serine/threonine kinase (fragment)
  misc_feature (1)..(681): Homolog of NCBI NO: 15220348 NR Description: receptor-like protein kinase, putative; protein
  misc_feature (1)..(681): Homolog of NCBI NO: 15220353 NR Description: serine/threonine kinase, putative; protein id:
  misc_feature (1)..(681): Homolog of NCBI NO: 4008010 NR Description: receptor-like protein kinase [Arabidopsis
  misc_feature (1)..(276): Homolog of NCBI NO: 15220338 NR Description: serine/threonine kinase, putative; protein id:
  misc_feature (290)..(680): Homolog of NCBI NO: 15220338 NR Description: serine/threonine kinase, putative; protein id:
  misc_feature (1)..(681): Homolog of NCBI NO: 7428022 NR Description: S-receptor kinase (EC 2.7.1.-) KIK1 precursor - >gi|2735017|gb|AAB93834.1| KI domain interacting kinase 1 [Zea
  misc_feature (1)..(681): Homolog of NCBI NO: 15220338 NR Description: serine/threonine kinase, putative; protein id:
MRVRVNPSLGENRAFIPWKSESDPSPGKYSMGIDPVGALEIVIWEGEKRKWRSGPWNSAIFTGIPDMLRFTNYIYGFKLSSPPDRDGSVYFTYVASDSSDFLRFWIRPDGVEEQFRWNKDIRNWNLLQWKPSTECEKYNRCGNYSVCDDSKEFDSGKCSCIDGFEPVHQDQWNNRDFSGGCQRRVPLNCNQSLVAGQEDGFTVLKGIKVPDFGSVVLHNNSETCKDVCARDCSCKAYALVVGIGCMIWTRDLIDMEHFERGGNSINIRLAGSKLGGGKENSTLWIIVFSVIGAFLLGLCIWILWKFKKSLKAFLWKKKDITVSDIIENRDYSSSPIKVLVGDQVDTPDLPIFSFDSVASATGDFAEENKLGQGGFGTVYKGNFSEGREIAVKRLSGKSKQGLEEFKNEILLIAKLQHRNLVRLLGCCIEDNEKMLLYEYMPNKSLDRFLFDESKQGSLDWRKRWEVIGGIARGLLYLHRDSRLKIIHRDLKASNILLDTEMNPKISDFGMARIFNYRQDHANTIRVVGTYGYMAPEYAMEGIFSEKSDVYSFGVLILEIVSGRKNVSFRGTDHGSLIGYAWHLWSQGKTKEMIDPIVKDTRDVTEAMRCIHVGMLCTQDSVIHRPNMGSVLLMLESQTSQLPPPRQPTFHSFLNSGDIELNFDGHDVASVNDVTFTTIVGR

SEQ ID NO: 69829 - protein, 651 aa, Arabidopsis thaliana
  peptide (1)..(651): Ceres Seq. ID no. 1828499
  misc_feature (1)..(651): Homolog of NCBI NO: 15234429 NR Description: serine/threonine kinase - like protein; protein
  misc_feature (1)..(651): Homolog of NCBI NO: 7434416 NR Description: serine/threonine kinase (EC 2.7.1.-) BRLK - wild >gi|2181190|emb|CAA73134.1| serine/threonine kinase [Brassica
  misc_feature (1)..(499): Homolog of NCBI NO: 4455151 NR Description: putative serine/threonine kinase (fragment)
  misc_feature (1)..(651): Homolog of NCBI NO: 15220348 NR Description: receptor-like protein kinase, putative; protein
  misc_feature (1)..(651): Homolog of NCBI NO: 15220353 NR Description: serine/threonine kinase, putative; protein id:
  misc_feature (1)..(651): Homolog of NCBI NO: 4008010 NR Description: receptor-like protein kinase [Arabidopsis
  misc_feature (1)..(246): Homolog of NCBI NO: 15220338 NR Description: serine/threonine kinase, putative; protein id:
  misc_feature (260)..(650): Homolog of NCBI NO: 15220338 NR Description: serine/threonine kinase, putative; protein id:
  misc_feature (1)..(651): Homolog of NCBI NO: 7428022 NR Description: S-receptor kinase (EC 2.7.1.-) KIK1 precursor - >gi|2735017|gb|AAB93834.1| KI domain interacting kinase 1 [Zea
  misc_feature (1)..(651): Homolog of NCBI NO: 15220338 NR Description: serine/threonine kinase, putative; protein id:
MGIDPVGALEIVIWEGEKRKWRSGPWNSAIFTGIPDMLRFTNYIYGFKLSSPPDRDGSVYFTYVASDSSDFLRFWIRPDGVEEQFRWNKDIRNWNLLQWKPSTECEKYNRCGNYSVCDDSKEFDSGKCSCIDGFEPVHQDQWNNRDFSGGCQRRVPLNCNQSLVAGQEDGFTVLKGIKVPDFGSVVLHNNSETCKDVCARDCSCKAYALVVGIGCMIWTRDLIDMEHFERGGNSINIRLAGSKLGGGKENSTLWIIVFSVIGAFLLGLCIWILWKFKKSLKAFLWKKKDITVSDIIENRDYSSSPIKVLVGDQVDTPDLPIFSFDSVASATGDFAEENKLGQGGFGTVYKGNFSEGREIAVKRLSGKSKQGLEEFKNEILLIAKLQHRNLVRLLGCCIEDNEKMLLYEYMPNKSLDRFLFDESKQGSLDWRKRWEVIGGIARGLLYLHRDSRLKIIHRDLKASNILLDTEMNPKISDFGMARIFNYRQDHANTIRVVGTYGYMAPEYAMEGIFSEKSDVYSFGVLILEIVSGRKNVSFRGTDHGSLIGYAWHLWSQGKTKEMIDPIVKDTRDVTEAMRCIHVGMLCTQDSVIHRPNMGSVLLMLESQTSQLPPPRQPTFHSFLNSGDIELNFDGHDVASVNDVTFTTIVGR

SEQ ID NO: 69830 - DNA, 486 bp, Arabidopsis thaliana
  misc_feature (1)..(486): Ceres Seq. ID no. 1828950
  misc_feature: MA Experiment ID: 20000306 Result: Down-regulated in Transcription
  misc_feature: MA Experiment 20000306 PARAMETER Experiment Name: At_Germinating_Seeds_Sub_P Parameter: Age (hr) Value: 6 vs. 0
  misc_feature: MA Experiment 20000306 PARAMETER Experiment Name: At_Germinating_Seeds_Sub_P Parameter: Organism Value: A. thaliana
  misc_feature: MA Experiment 20000306 PARAMETER Experiment Name: At_Germinating_Seeds_Sub_P Parameter: Plant Line Value: WS
  misc_feature: MA Experiment 20000306 PARAMETER Experiment Name: At_Germinating_Seeds_Sub_P Parameter: Tissue Value: Germinating Seeds
  misc_feature: MA Experiment ID: 20000307 Result: Down-regulated in Transcription
  misc_feature: MA Experiment 20000307 PARAMETER Experiment Name: At_Germinating_Seeds_Sub_P Parameter: Age (hr) Value: 24 vs. 0
  misc_feature: MA Experiment 20000307 PARAMETER Experiment Name: At_Germinating_Seeds_Sub_P Parameter: Organism Value: A. thaliana
  misc_feature: MA Experiment 20000307 PARAMETER Experiment Name: At_Germinating_Seeds_Sub_P Parameter: Plant Line Value: WS
  misc_feature: MA Experiment 20000307 PARAMETER Experiment Name: At_Germinating_Seeds_Sub_P Parameter: Tissue Value: Germinating Seeds
  misc_feature: MA Experiment ID: 20000315 Result: Down-regulated in Transcription
  misc_feature: MA Experiment 20000315 PARAMETER Experiment Name: At_14day_Shoots-Roots_Sub_P Parameter: Age (day) Value: 14
  misc_feature: MA Experiment 20000315 PARAMETER Experiment Name: At_14day_Shoots-Roots_Sub_P Parameter: Organism Value: A. thaliana
  misc_feature: MA Experiment 20000315 PARAMETER Experiment Name: At_14day_Shoots-Roots_Sub_P Parameter: Plant Line Value: WS
  misc_feature: MA Experiment 20000315 PARAMETER Experiment Name: At_14day_Shoots-Roots_Sub_P Parameter: Tissue Value: Shoots vs. Whole Plant
atggatcacatagcggcagcggaggagcaaattgtaacggagaggattagaagaaaacttgaagaagttaatgcaactgctcaatcgcaactctctcctattcaagatcacatcaatttcacccttcagttgatgaatcaaacccggaaaattgatcaattgcagcaagcctatttcaaatgtgcatacgagtgctttgacagaaataggaagcaagaggagatagccaactgtgttgagcactgcagtgttccagttgtcaatgctcaacagcatttcgaaggcgaaatgtctcagtttcaggaaaggatgaacagatctctcatggtctgtcaagacaaatttgaggctgcaaagctccataagaacaggggagatgccgccaaagctatggagagttgtgtgaacacatccattgaggatagtctcgatacattgcctcatattgtgcagagaatgaagacgtcattctccattgccgactaa

SEQ ID NO: 69831 - protein, 161 aa, Arabidopsis thaliana
  peptide (1)..(161): Ceres Seq. ID no. 1828951
  misc_feature (15)..(157): Pfam Name: Eukaryotic protein of unknown function (DUF842) Pfam Description: Eukaryotic protein of unknown function (DUF842)
  misc_feature (1)..(161): Homolog of NCBI NO: 15221245 NR Description: hypothetical Protein; protein id: At1g05730.1
  misc_feature (1)..(161): Homolog of NCBI NO: 18402744 NR Description: expressed protein; protein id: At2g31725.1, by cDNA: 25159. [Arabidopsis thaliana] expressed protein [Arabidopsis thaliana]
  misc_feature (7)..(161): Homolog of NCBI NO: 15224344 NR Description: hypothetical protein; protein id: At2g43720.1, by cDNA: gi_18491242 [Arabidopsis thaliana]
  misc_feature (1)..(136): Homolog of NCBI NO: 15221247 NR Description: hypothetical protein; protein id: At1g05740.1
  misc_feature (27)..(158): Homolog of NCBI NO: 37589716 NR Description: Unknown (protein for MGC:73247) [Danio rerio]
  misc_feature (27)..(158): Homolog of NCBI NO: 13385042 NR Description: RIKEN cDNA 2010309E21 [Mus musculus] unnamed protein product [Mus musculus] unnamed protein product [Mus musculus]
  misc_feature (27)..(158): Homolog of NCBI NO: 15489002 NR Description: Unknown (protein for IMAGE:3493774) [Mus musculus]
  misc_feature (27)..(158): Homolog of NCBI NO: 27712200 NR Description: similar to RIKEN cDNA 2010309E21 [Mus musculus]
  misc_feature (27)..(154): Homolog of NCBI NO: 15929034 NR Description: hypothetical protein FLJ14668 [Homo sapiens]
  misc_feature (27)..(154): Homolog of NCBI NO: 14249520 NR Description: hypothetical protein FLJ14668 [Homo sapiens]
MDHIAAAEEQIVTERIRRKLEEVNATAQSQLSPIQDHINFTLQLMNQTRKIDQLQQAYFKCAYECFDRNRKQEEIANCVEHCSVPVVNAQQHFEGEMSQFQERMNRSLMVCQDKFEAAKLHKNRGDAAKAMESCVNTSIEDSLDTLPHIVQRMKTSFSIAD

SEQ ID NO: 69832 - protein, 117 aa, Arabidopsis thaliana
  peptide (1)..(117): Ceres Seq. ID no. 1828952
  misc_feature (1)..(113): Pfam Name: Eukaryotic protein of unknown function (DUF842) Pfam Description: Eukaryotic protein of unknown function (DUF842)
  misc_feature (1)..(117): Homolog of NCBI NO: 15221245 NR Description: hypothetical Protein; protein id: At1g05730.1
  misc_feature (1)..(117): Homolog of NCBI NO: 18402744 NR Description: expressed protein; protein id: At2g31725.1, by cDNA: 25159. [Arabidopsis thaliana] expressed protein [Arabidopsis thaliana]
  misc_feature (1)..(117): Homolog of NCBI NO: 15224344 NR Description: hypothetical protein; protein id: At2g43720.1, by cDNA: gi_18491242 [Arabidopsis thaliana]
  misc_feature (1)..(92): Homolog of NCBI NO: 15221247 NR Description: hypothetical protein; protein id: At1g05740.1
  misc_feature (1)..(114): Homolog of NCBI NO: 37589716 NR Description: Unknown (protein for MGC:73247) [Danio rerio]
  misc_feature (1)..(114): Homolog of NCBI NO: 13385042 NR Description: RIKEN cDNA 2010309E21 [Mus musculus] unnamed protein product [Mus musculus] unnamed protein product [Mus musculus]
  misc_feature (1)..(114): Homolog of NCBI NO: 15489002 NR Description: Unknown (protein for IMAGE:3493774) [Mus musculus]
  misc_feature (1)..(114): Homolog of NCBI NO: 27712200 NR Description: similar to RIKEN cDNA 2010309E21 [Mus musculus]
  misc_feature (1)..(110): Homolog of NCBI NO: 15929034 NR Description: hypothetical protein FLJ14668 [Homo sapiens]
  misc_feature (1)..(110): Homolog of NCBI NO: 14249520 NR Description: hypothetical protein FLJ14668 [Homo sapiens]
MNQTRKIDQLQQAYFKCAYECFDRNRKQEEIANCVEHCSVPVVNAQQHFEGEMSQFQERMNRSLMVCQDKFEAAKLHKNRGDAAKAMESCVNTSIEDSLDTLPHIVQRMKTSFSIAD

SEQ ID NO: 69833 - DNA, 918 bp, Arabidopsis thaliana
  misc_feature (1)..(918): Ceres Seq. ID no. 1829070
  misc_feature: MA Experiment ID: 20000180 Result: Up-regulated in Transcription
  misc_feature: MA Experiment 20000180 PARAMETER Experiment Name: At_Germinating_Seeds_P Parameter: Age (hr) Value: 24 vs. 0
  misc_feature: MA Experiment 20000180 PARAMETER Experiment Name: At_Germinating_Seeds_P Parameter: Tissue Value: Germinating Seeds
  misc_feature: MA Experiment ID: 20000182 Result: Down-regulated in Transcription
  misc_feature: MA Experiment 20000182 PARAMETER Experiment Name: At_2mM_SA_P Parameter: Age (day) Value: 14
  misc_feature: MA Experiment 20000182 PARAMETER Experiment Name: At_2mM_SA_P Parameter: Organism Value: A. thaliana
  misc_feature: MA Experiment 20000182 PARAMETER Experiment Name: At_2mM_SA_P Parameter: Plant Line Value: WS
  misc_feature: MA Experiment 20000182 PARAMETER Experiment Name: At_2mM_SA_P Parameter: Timepoint (hr) Value: 6
  misc_feature: MA Experiment 20000182 PARAMETER Experiment Name: At_2mM_SA_P Parameter: Tissue Value: Aerial
  misc_feature: MA Experiment 20000182 PARAMETER Experiment Name: At_2mM_SA_P Parameter: Treatment Value: 2mM SA vs. No Treatment
  misc_feature: MA Experiment ID: 20000437 Result: Down-regulated in Transcription
  misc_feature: MA Experiment 20000437 PARAMETER Experiment Name: At_Drought_P Parameter: Age (day) Value: 8
  misc_feature: MA Experiment 20000437 PARAMETER Experiment Name: At_Drought_P Parameter: Organism Value: A. thaliana
  misc_feature: MA Experiment 20000437 PARAMETER Experiment Name: At_Drought_P Parameter: Plant Line Value: WS
  misc_feature: MA Experiment 20000437 PARAMETER Experiment Name: At_Drought_P Parameter: Timepoint (hr) Value: 24
  misc_feature: MA Experiment 20000437 PARAMETER Experiment Name: At_Drought_P Parameter: Tissue Value: Whole Plant
  misc_feature: MA Experiment 20000437 PARAMETER Experiment Name: At_Drought_P Parameter: Treatment Value: Drought vs. No Drought
  misc_feature: MA Experiment ID: 20000438 Result: Up-regulated in Transcription
  misc_feature: MA Experiment 20000438 PARAMETER Experiment Name: At_Shoots__P Parameter: Age (day) Value: 14
  misc_feature: MA Experiment 20000438 PARAMETER Experiment Name: At_Shoots__P Parameter: Tissue Value: Shoots vs. Whole Plant
  misc_feature: MA Experiment ID: 20000439 Result: Down-regulated in Transcription
  misc_feature: MA Experiment 20000439 PARAMETER Experiment Name: At_Roots__P Parameter: Age (day) Value: 14 vs. 21
  misc_feature: MA Experiment 20000439 PARAMETER Experiment Name: At_Roots__P Parameter: Organism Value: A. thaliana
  misc_feature: MA Experiment 20000439 PARAMETER Experiment Name: At_Roots__P Parameter: Tissue Value: Roots vs. Whole Plant
  misc_feature: MA Experiment ID: 20001450 Result: Down-regulated in Transcription
  misc_feature: MA Experiment 20001450 PARAMETER Experiment Name: At_Far-red-induction_P Parameter: Age (day) Value: 7
  misc_feature: MA Experiment 20001450 PARAMETER Experiment Name: At_Far-red-induction_P Parameter: Light Value: Far-red vs. White
  misc_feature: MA Experiment 20001450 PARAMETER Experiment Name: At_Far-red-induction_P Parameter: Organism Value: A. thaliana
  misc_feature: MA Experiment 20001450 PARAMETER Experiment Name: At_Far-red-induction_P Parameter: Plant Line Value: Columbia
  misc_feature: MA Experiment 20001450 PARAMETER Experiment Name: At_Far-red-induction_P Parameter: Timepoint (hr) Value: 8
  misc_feature: MA Experiment 20001450 PARAMETER Experiment Name: At_Far-red-induction_P Parameter: Tissue Value: Whole Plant
  misc_feature: MA Experiment ID: 20001757 Result: Up-regulated in Transcription
  misc_feature: MA Experiment 20001757 PARAMETER Experiment Name: At_50mM_NH4NO3_L-to-H_P Parameter: Timepoint (hr) Value: 6
  misc_feature: MA Experiment 20001757 PARAMETER Experiment Name: At_50mM_NH4NO3_L-to-H_P Parameter: Tissue Value: Leaf
  misc_feature: MA Experiment 20001757 PARAMETER Experiment Name: At_50mM_NH4NO3_L-to-H_P Parameter: Treatment Value: 50mM NH4NO3 vs 100mM Mannitol
  misc_feature: MA Experiment ID: 20001905 Result: Down-regulated in Transcription
  misc_feature: MA Experiment 20001905 PARAMETER Experiment Name: At_Drought_Reproduction_P Parameter: Age (day) Value: 40
  misc_feature: MA Experiment 20001905 PARAMETER Experiment Name: At_Drought_Reproduction_P Parameter: Organism Value: A. thaliana
  misc_feature: MA Experiment 20001905 PARAMETER Experiment Name: At_Drought_Reproduction_P Parameter: Plant Line Value: WS
  misc_feature: MA Experiment 20001905 PARAMETER Experiment Name: At_Drought_Reproduction_P Parameter: Timepoint (day) Value: 10
  misc_feature: MA Experiment 20001905 PARAMETER Experiment Name: At_Drought_Reproduction_P Parameter: Tissue Value: Rosettes
  misc_feature: MA Experiment 20001905 PARAMETER Experiment Name: At_Drought_Reproduction_P Parameter: Treatment Value: Drought vs. No Drought
  misc_feature: MA Experiment ID: 20001906 Result: Down-regulated in Transcription
  misc_feature: MA Experiment 20001906 PARAMETER Experiment Name: At_Drought_Reproduction_P Parameter: Age (day) Value: 35
  misc_feature: MA Experiment 20001906 PARAMETER Experiment Name: At_Drought_Reproduction_P Parameter: Organism Value: A. thaliana
  misc_feature: MA Experiment 20001906 PARAMETER Experiment Name: At_Drought_Reproduction_P Parameter: Plant Line Value: WS
  misc_feature: MA Experiment 20001906 PARAMETER Experiment Name: At_Drought_Reproduction_P Parameter: Timepoint (day) Value: 5
  misc_feature: MA Experiment 20001906 PARAMETER Experiment Name: At_Drought_Reproduction_P Parameter: Tissue Value: Siliques
  misc_feature: MA Experiment 20001906 PARAMETER Experiment Name: At_Drought_Reproduction_P Parameter: Treatment Value: Drought vs. No Drought
atggaagcgagaatcatcctcctccgaattcaaatcccttggagcgctaatcgccaattctctcatcctcctttagatttccctcgttttatcagagcttcttcttcctcaacctcacagaagccgaaaacttacgaaggtccgaaaccgaggaagaatttagtagctgatttcatttccaaaaacgatgacttggttcgaagcttaccgatctacgtcgggggcgcttctcttttggccgttctctttaatcggactgtttccggtatcgctcctgttgccgatgctagcagctcacagtctagagcagatctattagcgcttggcttggctgtcaccaatctattgaccggtttagtctggttatcgattcgacctaagtcaataacacctgtaaatccgaaaggtgtggaatgcaaagttgtagaatctgatcttcctgcatcgatggtttccgagttgttatgggcttgggaatctcttaaggtagcaacatgttgtaagtctctagttattgtctacaatggaatttgccttattcaaattgggatggtagctgaatctccagaagataagaaaacagtcatagtaaagaccgataagttgatgcaaggatcggtttacagaggggttatgaaatccaaagcacgaaagaacaatgattgtttgtcagagagttacttggctaatctttctctttatcctgggagatcagagctgccatttctacctgcaaatacacaggcggtgattttgcagccgcttggagataaaggaatcgcagtcattggtggaaatacgattagaggattcacgtcttcagaccaggcttggatttcttcaattggggagaagctagatgcgacactggggagatattttgttgattctgatgagatttccagagtaacagtttga

SEQ ID NO: 69834 - protein, 305 aa, Arabidopsis thaliana
  peptide (1)..(305): Ceres Seq. ID no. 1829071
  misc_feature (1)..(305): Homolog of NCBI NO: 15218930 NR Description: hypothetical protein; protein id: At1g59840.1
  misc_feature (1)..(305): Homolog of NCBI NO: 34146872 NR Description: At1g59840 [Arabidopsis thaliana]
  misc_feature (25)..(292): Homolog of NCBI NO: 38345907 NR Description: OSJNBb0059K02.12 [Oryza sativa (japonica
  misc_feature (65)..(208): Homolog of NCBI NO: 17231313 NR Description: hypothetical protein [Nostoc sp. PCC 7120]
  misc_feature (227)..(290): Homolog of NCBI NO: 17231313 NR Description: hypothetical protein [Nostoc sp. PCC 7120]
  misc_feature (65)..(226): Homolog of NCBI NO: 23127716 NR Description: hypothetical protein [Nostoc punctiforme]
  misc_feature (227)..(290): Homolog of NCBI NO: 23127716 NR Description: hypothetical protein [Nostoc punctiforme]
  misc_feature (60)..(208): Homolog of NCBI NO: 23039835 NR Description: hypothetical protein [Trichodesmium erythraeum
  misc_feature (227)..(292): Homolog of NCBI NO: 23039835 NR Description: hypothetical protein [Trichodesmium erythraeum
  misc_feature (62)..(208): Homolog of NCBI NO: 22298227 NR Description: ORF_ID:tll0685~hypothetical protein
MEARIILLRIQIPWSANRQFSHPPLDFPRFIRASSSSTSQKPKTYEGPKPRKNLVADFISKNDDLVRSLPIYVGGASLLAVLFNRTVSGIAPVADASSSQSRADLLALGLAVTNLLTGLVWLSIRPKSITPVNPKGVECKVVESDLPASMVSELLWAWESLKVATCCKSLVIVYNGICLIQIGMVAESPEDKKTVIVKTDKLMQGSVYRGVMKSKARKNNDCLSESYLANLSLYPGRSELPFLPANTQAVILQPLGDKGIAVIGGNTIRGFTSSDQAWISSIGEKLDATLGRYFVDSDEISRVTV

SEQ ID NO: 69835 - protein, 156 aa, Arabidopsis thaliana
  peptide (1)..(156): Ceres Seq. ID no. 1829072
  misc_feature (1)..(156): Homolog of NCBI NO: 15218930 NR Description: hypothetical protein; protein id: At1g59840.1
  misc_feature (1)..(156): Homolog of NCBI NO: 34146872 NR Description: At1g59840 [Arabidopsis thaliana]
  misc_feature (1)..(143): Homolog of NCBI NO: 38345907 NR Description: OSJNBb0059K02.12 [Oryza sativa (japonica
  misc_feature (1)..(59): Homolog of NCBI NO: 17231313 NR Description: hypothetical protein [Nostoc sp. PCC 7120]
  misc_feature (78)..(141): Homolog of NCBI NO: 17231313 NR Description: hypothetical protein [Nostoc sp. PCC 7120]
  misc_feature (1)..(77): Homolog of NCBI NO: 23127716 NR Description: hypothetical protein [Nostoc punctiforme]
  misc_feature (78)..(141): Homolog of NCBI NO: 23127716 NR Description: hypothetical protein [Nostoc punctiforme]
  misc_feature (1)..(59): Homolog of NCBI NO: 23039835 NR Description: hypothetical protein [Trichodesmium erythraeum
  misc_feature (78)..(143): Homolog of NCBI NO: 23039835 NR Description: hypothetical protein [Trichodesmium erythraeum
  misc_feature (1)..(59): Homolog of NCBI NO: 22298227 NR Description: ORF_ID:tll0685~hypothetical protein
MVSELLWAWESLKVATCCKSLVIVYNGICLIQIGMVAESPEDKKTVIVKTDKLMQGSVYRGVMKSKARKNNDCLSESYLANLSLYPGRSELPFLPANTQAVILQPLGDKGIAVIGGNTIRGFTSSDQAWISSIGEKLDATLGRYFVDSDEISRVTV

SEQ ID NO: 69836 - DNA, 996 bp, Arabidopsis thaliana
  misc_feature (1)..(996): Ceres Seq. ID no. 1829109
  misc_feature: MA Experiment ID: 20000227 Result: Up-regulated in Transcription
  misc_feature: MA Experiment 20000227 PARAMETER Experiment Name: At_Root-Tips-vs-Tops_P Parameter: Tissue Value: Root Tips vs. Root Tops
atgggggttgattactacaatgtactcaacgtgaatccaagcgcaacggaagacgatctaaagaaatcgtatcgaagacttgcaatgaaatggcaccctgacaaaaaccctacttcaatcaagcaagaagctgaagctaagttcaaacaaatctccgaagcttacgatgttttaagcgatcctaacaaacgtcagatctatgatcaatatggtgaagacggacttacggcgacagaagcaacggcgtcgtctcaacaacataattactcttctggtaacaacaataattacaatgcagggtttaggtattatccacgtgatgctgaagatattttcgctgagtttttcggtgcatctgagaaagtctttgatggtggcgtcggcggtggcgggaggtttaaaagtgcggaggcgggaagtcagacgaataggaaaactccggtgaacaggaaagctccggcgattgagagtaaattggcttgtactcttgaggagttgtataaaggtgggaggaggaagatgaagatttcccgcgttgttcctgatggtcttggaaagtcaaagccagtggaagagatcttgaagatagatataacaccaggatggaagaaaggaactaagataacttttccagagaaaggaaaccaagaacccggtgttactcccgcagatctcatctttgttatagatgagaaaccgcattcggtttacaaaagagacggtaacgatcttattgtagacaagaaagtttcgcttttggaggctttaacagggatcactcttagcttaacaacactagacgggaggaatctgactatcccggttttggatatcgttaaaccgggtcaggagatagtgattcctagtgaaggaatgcccatctctaaagaaggttcaaagagaggagatctaagaatcaactttgagatatgtttcccctcgaggctaacatcggaacagaagacagatctcaagagagttcttggtggtagctga

SEQ ID NO: 69837 - protein, 331 aa, Arabidopsis thaliana
  peptide (1)..(331): Ceres Seq. ID no. 1829110
  misc_feature (206)..(328): Pfam Name: DnaJ C terminal region Pfam Description: DnaJ C terminal region
  misc_feature (1)..(329): Homolog of NCBI NO: 11863723 NR Description: DnaJ like protein [Lycopersicon esculentum]
  misc_feature (1)..(331): Homolog of NCBI NO: 15218901 NR Description: chaperone, putative; protein id: At1g59725.1 thaliana] >gi|25296016|pir||A96621 probable heat shock protein
  misc_feature (106)..(329): Homolog of NCBI NO: 15235310 NR Description: heat-shock protein; protein id: At4g28480.1, by cDNA: gi_14596114, supported by cDNA: gi_20148388 [Arabidopsis
  misc_feature (1)..(139): Homolog of NCBI NO: 15235310 NR Description: heat-shock protein; protein id: At4g28480.1, by cDNA: gi_14596114, supported by cDNA: gi_20148388 [Arabidopsis
  misc_feature (1)..(329): Homolog of NCBI NO: 15225377 NR Description: putative heat shock protein; protein id: supported by cDNA: 25528., supported by cDNA: gi_15982894 thaliana] >gi|25296018|pir||G84590 probable heat shock protein
  misc_feature (1)..(331): Homolog of NCBI NO: 15231987 NR Description: putative heat shock protein; protein id: supported by cDNA: 96785. [Arabidopsis thaliana]
  misc_feature (1)..(331): Homolog of NCBI NO: 21618097 NR Description: putative heat shock protein [Arabidopsis thaliana]
  misc_feature (1)..(329): Homolog of NCBI NO: 6179940 NR Description: DnaJ-like protein [Nicotiana tabacum]
  misc_feature (1)..(328): Homolog of NCBI NO: 15240968 NR Description: heat shock protein 40-like; protein id: supported by cDNA: 114622. [Arabidopsis thaliana]
  misc_feature (1)..(330): Homolog of NCBI NO: 34905276 NR Description: putative heat shock protein [Oryza sativa
MGVDYYNVLNVNPSATEDDLKKSYRRLAMKWHPDKNPTSIKQEAEAKFKQISEAYDVLSDPNKRQIYDQYGEDGLTATEATASSQQHNYSSGNNNNYNAGFRYYPRDAEDIFAEFFGASEKVFDGGVGGGGRFKSAEAGSQTNRKTPVNRKAPAIESKLACTLEELYKGGRRKMKISRVVPDGLGKSKPVEEILKIDITPGWKKGTKITFPEKGNQEPGVTPADLIFVIDEKPHSVYKRDGNDLIVDKKVSLLEALTGITLSLTTLDGRNLTIPVLDIVKPGQEIVIPSEGMPISKEGSKRGDLRINFEICFPSRLTSEQKTDLKRVLGGS

SEQ ID NO: 69838 - protein, 303 aa, Arabidopsis thaliana
  peptide (1)..(303): Ceres Seq. ID no. 1829111
  misc_feature (178)..(300): Pfam Name: DnaJ C terminal region Pfam Description: DnaJ C terminal region
  misc_feature (1)..(303): Homolog of NCBI NO: 15218901 NR Description: chaperone, putative; protein id: At1g59725.1 thaliana] >gi|25296016|pir||A96621 probable heat shock protein
  misc_feature (78)..(301): Homolog of NCBI NO: 15235310 NR Description: heat-shock protein; protein id: At4g28480.1, by cDNA: gi_14596114, supported by cDNA: gi_20148388 [Arabidopsis
  misc_feature (1)..(111): Homolog of NCBI NO: 15235310 NR Description: heat-shock protein; protein id: At4g28480.1, by cDNA: gi_14596114, supported by cDNA: gi_20148388 [Arabidopsis
  misc_feature (1)..(301): Homolog of NCBI NO: 15225377 NR Description: putative heat shock protein; protein id: supported by cDNA: 25528., supported by cDNA: gi_15982894 thaliana] >gi|25296018|pir||G84590 probable heat shock protein
  misc_feature (1)..(303): Homolog of NCBI NO: 15231987 NR Description: putative heat shock protein; protein id: supported by cDNA: 96785. [Arabidopsis thaliana]
  misc_feature (1)..(303): Homolog of NCBI NO: 21618097 NR Description: putative heat shock protein [Arabidopsis thaliana]
  misc_feature (1)..(301): Homolog of NCBI NO: 6179940 NR Description: DnaJ-like protein [Nicotiana tabacum]
  misc_feature (1)..(300): Homolog of NCBI NO: 15240968 NR Description: heat shock protein 40-like; protein id: supported by cDNA: 114622. [Arabidopsis thaliana]
  misc_feature (1)..(302): Homolog of NCBI NO: 34905276 NR Description: putative heat shock protein [Oryza sativa
  misc_feature (1)..(301): Homolog of NCBI NO: 11863723 NR Description: DnaJ like protein [Lycopersicon esculentum]
MKWHPDKNPTSIKQEAEAKFKQISEAYDVLSDPNKRQIYDQYGEDGLTATEATASSQQHNYSSGNNNNYNAGFRYYPRDAEDIFAEFFGASEKVFDGGVGGGGRFKSAEAGSQTNRKTPVNRKAPAIESKLACTLEELYKGGRRKMKISRVVPDGLGKSKPVEEILKIDITPGWKKGTKITFPEKGNQEPGVTPADLIFVIDEKPHSVYKRDGNDLIVDKKVSLLEALTGITLSLTTLDGRNLTIPVLDIVKPGQEIVIPSEGMPISKEGSKRGDLRINFEICFPSRLTSEQKTDLKRVLGGS

SEQ ID NO: 69839 - DNA, 1110 bp, Arabidopsis thaliana
  misc_feature (1)..(1110): Ceres Seq. ID no. 1829753
  misc_feature: MA Experiment ID: 20000184 Result: Down-regulated in Transcription
  misc_feature: MA Experiment 20000184 PARAMETER Experiment Name: At_Shoots__P Parameter: Age (day) Value: 7
  misc_feature: MA Experiment 20000184 PARAMETER Experiment Name: At_Shoots__P Parameter: Tissue Value: Shoots vs. Whole Plant
  misc_feature: MA Experiment ID: 20000185 Result: Up-regulated in Transcription
  misc_feature: MA Experiment 20000185 PARAMETER Experiment Name: At_Roots__P Parameter: Age (day) Value: 7 vs. 21
  misc_feature: MA Experiment 20000185 PARAMETER Experiment Name: At_Roots__P Parameter: Organism Value: A. thaliana
  misc_feature: MA Experiment 20000185 PARAMETER Experiment Name: At_Roots__P Parameter: Tissue Value: Roots vs. Whole Plant
  misc_feature: MA Experiment ID: 20000438 Result: Down-regulated in Transcription
  misc_feature: MA Experiment 20000438 PARAMETER Experiment Name: At_Shoots__P Parameter: Age (day) Value: 14
  misc_feature: MA Experiment 20000438 PARAMETER Experiment Name: At_Shoots__P Parameter: Tissue Value: Shoots vs. Whole Plant
  misc_feature: MA Experiment ID: 20000794 Result: Down-regulated in Transcription
  misc_feature: MA Experiment 20000794 PARAMETER Experiment Name: At_Petals_P Parameter: Age (day) Value: 23-25 days
  misc_feature: MA Experiment 20000794 PARAMETER Experiment Name: At_Petals_P Parameter: Plant Line Value: WS
  misc_feature: MA Experiment 20000794 PARAMETER Experiment Name: At_Petals_P Parameter: Tissue Value: Petals vs. Whole plant
atgggaagacattcttgttgttttaagcagaagctaagaaaaggcctttggtctcctgaagaagatgagaaacttctcaattacatcactagacatggtcatggctgttggagttctgtccctaaactcgcagcatcgtttataatgtttttatatgcgttggtggatatatatgatcaaataggtttgcaaagatgtggaaagagttgtagacttaggtggataaattatttgagaccagatttaaagagaggagctttctctcaagacgaagaaagcttgatcattgagctccatgctgcattaggcaacagatggtctcaaatcgcaacgcggttaccgggaagaacagacaacgagatcaaaaacttttggaactcatgtcttaagaagaagctgagaagaaaaggcattgacccaacaacacataaacccttaataacaaacgagcttcaatctcttaacgtcatagatcagaaactgacgtcatcagaagtagtaaagtcaacgggttcgataaacaacctacatgatcagtcaatggtcgtctcatcgcaacaaggtccatggtggttcccggcgaatacaactacgactaatcaaaactctgcgttttgctttagttcaagtaatactacaacggtttcagaccagatcgtatctttaatctcttcaatgtctacgtcatcatctccgacaccaatgacttcaaacttcagtcctgctccaaacaactgggaacaactcaactactgcaacacagtaccaagtcagagcaacagtatctacagtgccttctttggtaatcaatacacagaagctagccaaaccatgaacaataataatccactagtagatcaacatcatcatcatcaagacatgaagtcatgggcatcagagattcttcattacacagaacacaaccaaagctcagaaactgttatagaagcagaagtgaagccagacattgccaactactactggagatcagcatcatcatcgtcgtcaccaaaccaagaagctgcaacattactacacgatgctaacgtggaagtgtacggtaaaaatctacaaaagcttaataacatggtgtttgatcagagcctttag

SEQ ID NO: 69840 - protein, 369 aa, Arabidopsis thaliana
  peptide (1)..(369): Ceres Seq. ID no. 1829754
  misc_feature (14)..(78): Pfam Name: Myb-like DNA-binding domain Pfam Description: Myb-like DNA-binding domain
  misc_feature (1)..(369): Homolog of NCBI NO: 7446174 NR Description: transcription factor MYB4 - Arabidopsis thaliana
  misc_feature (62)..(369): Homolog of NCBI NO: 30690317 NR Description: myb transcription factor (ATMYB4) [Arabidopsis >gi|20466622|gb|AAM20628.1| transcription factor ATMYB4 thaliana] >gi|30984580|gb|AAP42753.1| At5g26655 [Arabidopsis
  misc_feature (1)..(44): Homolog of NCBI NO: 30690317 NR Description: myb transcription factor (ATMYB4) [Arabidopsis >gi|20466622|gb|AAM20628.1| transcription factor ATMYB4 thaliana] >gi|30984580|gb|AAP42753.1| At5g26655 [Arabidopsis
  misc_feature (62)..(369): Homolog of NCBI NO: 2280530 NR Description: ATMYB4 [Arabidopsis thaliana]
  misc_feature (1)..(44): Homolog of NCBI NO: 2280530 NR Description: ATMYB4 [Arabidopsis thaliana]
  misc_feature (94)..(369): Homolog of NCBI NO: 11358564 NR Description: myb-related transcription factor MYB86 [imported] Arabidopsis thaliana (fragment) >gi|3941518|gb|AAC83635.1|
  misc_feature (62)..(285): Homolog of NCBI NO: 34902542 NR Description: putative transcription factor (myb) [Oryza sativa
  misc_feature (1)..(44): Homolog of NCBI NO: 34902542 NR Description: putative transcription factor (myb) [Oryza sativa
  misc_feature (62)..(369): Homolog of NCBI NO: 22329445 NR Description: myb family transcription factor; protein id: supported by cDNA: gi_20465974 [Arabidopsis thaliana] putative transcription factor [Arabidopsis thaliana]
  misc_feature (1)..(44): Homolog of NCBI NO: 22329445 NR Description: myb family transcription factor; protein id: supported by cDNA: gi_20465974 [Arabidopsis thaliana] putative transcription factor [Arabidopsis thaliana]
MGRHSCCFKQKLRKGLWSPEEDEKLLNYITRHGHGCWSSVPKLAASFIMFLYALVDIYDQIGLQRCGKSCRLRWINYLRPDLKRGAFSQDEESLIIELHAALGNRWSQIATRLPGRTDNEIKNFWNSCLKKKLRRKGIDPTTHKPLITNELQSLNVIDQKLTSSEVVKSTGSINNLHDQSMVVSSQQGPWWFPANTTTTNQNSAFCFSSSNTTTVSDQIVSLISSMSTSSSPTPMTSNFSPAPNNWEQLNYCNTVPSQSNSIYSAFFGNQYTEASQTMNNNNPLVDQHHHHQDMKSWASEILHYTEHNQSSETVIEAEVKPDIANYYWRSASSSSSPNQEAATLLHDANVEVYGKNLQKLNNMVFDQSL

SEQ ID NO: 69841 - protein, 321 aa, Arabidopsis thaliana
  peptide (1)..(321): Ceres Seq. ID no. 1829755
  misc_feature (1)..(321): Homolog of NCBI NO: 7446174 NR Description: transcription factor MYB4 - Arabidopsis thaliana
  misc_feature (14)..(321): Homolog of NCBI NO: 30690317 NR Description: myb transcription factor (ATMYB4) [Arabidopsis >gi|20466622|gb|AAM20628.1| transcription factor ATMYB4 thaliana] >gi|30984580|gb|AAP42753.1| At5g26655 [Arabidopsis
  misc_feature (14)..(321): Homolog of NCBI NO: 2280530 NR Description: ATMYB4 [Arabidopsis thaliana]
  misc_feature (46)..(321): Homolog of NCBI NO: 11358564 NR Description: myb-related transcription factor MYB86 [imported] Arabidopsis thaliana (fragment) >gi|3941518|gb|AAC83635.1|
  misc_feature (14)..(237): Homolog of NCBI NO: 34902542 NR Description: putative transcription factor (myb) [Oryza sativa
  misc_feature (14)..(321): Homolog of NCBI NO: 22329445 NR Description: myb family transcription factor; protein id: supported by cDNA: gi_20465974 [Arabidopsis thaliana] putative transcription factor [Arabidopsis thaliana]
  misc_feature (1)..(105): Homolog of NCBI NO: 7438352 NR Description: transcription factor MYB4 homolog T15B16.7 -
  misc_feature (14)..(312): Homolog of NCBI NO: 25294104 NR Description: hypothetical protein [imported] - Arabidopsis >gi|3482929|gb|AAC33214.1| Putative transcription factor
  misc_feature (12)..(105): Homolog of NCBI NO: 15234262 NR Description: myb family transcription factor; protein id: supported by cDNA: gi_15375280, supported by cDNA: gi_15450989
  misc_feature (14)..(98): Homolog of NCBI NO: 15223612 NR Description: myb family transcription factor; protein id: supported by cDNA: 250386. [Arabidopsis thaliana]
MFLYALVDIYDQIGLQRCGKSCRLRWINYLRPDLKRGAFSQDEESLIIELHAALGNRWSQIATRLPGRTDNEIKNFWNSCLKKKLRRKGIDPTTHKPLITNELQSLNVIDQKLTSSEVVKSTGSINNLHDQSMVVSSQQGPWWFPANTTTTNQNSAFCFSSSNTTTVSDQIVSLISSMSTSSSPTPMTSNFSPAPNNWEQLNYCNTVPSQSNSIYSAFFGNQYTEASQTMNNNNPLVDQHHHHQDMKSWASEILHYTEHNQSSETVIEAEVKPDIANYYWRSASSSSSPNQEAATLLHDANVEVYGKNLQKLNNMVFDQSL

SEQ ID NO: 69842 - protein, 189 aa, Arabidopsis thaliana
  peptide (1)..(189): Ceres Seq. ID no. 1829756
  misc_feature (1)..(189): Homolog of NCBI NO: 7446174 NR Description: transcription factor MYB4 - Arabidopsis thaliana
  misc_feature (1)..(189): Homolog of NCBI NO: 30690317 NR Description: myb transcription factor (ATMYB4) [Arabidopsis >gi|20466622|gb|AAM20628.1| transcription factor ATMYB4 thaliana] >gi|30984580|gb|AAP42753.1| At5g26655 [Arabidopsis
  misc_feature (1)..(189): Homolog of NCBI NO: 2280530 NR Description: ATMYB4 [Arabidopsis thaliana]
  misc_feature (1)..(189): Homolog of NCBI NO: 11358564 NR Description: myb-related transcription factor MYB86 [imported] Arabidopsis thaliana (fragment) >gi|3941518|gb|AAC83635.1|
  misc_feature (1)..(105): Homolog of NCBI NO: 34902542 NR Description: putative transcription factor (myb) [Oryza sativa
  misc_feature (1)..(189): Homolog of NCBI NO: 22329445 NR Description: myb family transcription factor; protein id: supported by cDNA: gi_20465974 [Arabidopsis thaliana] putative transcription factor [Arabidopsis thaliana]
  misc_feature (1)..(180): Homolog of NCBI NO: 25294104 NR Description: hypothetical protein [imported] - Arabidopsis >gi|3482929|gb|AAC33214.1| Putative transcription factor
  misc_feature (1)..(60): Homolog of NCBI NO: 18399724 NR Description: myb family transcription factor; protein id: supported by cDNA: gi_14517437, supported by cDNA: gi_20908077
  misc_feature (1)..(38): Homolog of NCBI NO: 23476279 NR Description: myb-like transcription factor 1 [Gossypium
  misc_feature (1)..(38): Homolog of NCBI NO: 7438345 NR Description: myb-related protein A - upland cotton
MVVSSQQGPWWFPANTTTTNQNSAFCFSSSNTTTVSDQIVSLISSMSTSSSPTPMTSNFSPAPNNWEQLNYCNTVPSQSNSIYSAFFGNQYTEASQTMNNNNPLVDQHHHHQDMKSWASEILHYTEHNQSSETVIEAEVKPDIANYYWRSASSSSSPNQEAATLLHDANVEVYGKNLQKLNNMVFDQSL

SEQ ID NO: 69843 - DNA, 2685 bp, Arabidopsis thaliana
  misc_feature (1)..(2685): Ceres Seq. ID no. 1829971
  misc_feature: MA Experiment ID: 20000180 Result: Down-regulated in Transcription
  misc_feature: MA Experiment 20000180 PARAMETER Experiment Name: At_Germinating_Seeds_P Parameter: Age (hr) Value: 24 vs. 0
  misc_feature: MA Experiment 20000180 PARAMETER Experiment Name: At_Germinating_Seeds_P Parameter: Tissue Value: Germinating Seeds
  misc_feature: MA Experiment ID: 20001458 Result: Up-regulated in Transcription
  misc_feature: MA Experiment 20001458 PARAMETER Experiment Name: At_50mM_NH4NO3_L-to-H_P Parameter: Age (day) Value: Undefined
  misc_feature: MA Experiment 20001458 PARAMETER Experiment Name: At_50mM_NH4NO3_L-to-H_P Parameter: Organism Value: Undefined
  misc_feature: MA Experiment 20001458 PARAMETER Experiment Name: At_50mM_NH4NO3_L-to-H_P Parameter: Plant Line Value: Undefined
  misc_feature: MA Experiment 20001458 PARAMETER Experiment Name: At_50mM_NH4NO3_L-to-H_P Parameter: Timepoint (hr) Value: 2
  misc_feature: MA Experiment 20001458 PARAMETER Experiment Name: At_50mM_NH4NO3_L-to-H_P Parameter: Tissue Value: Siliques
  misc_feature: MA Experiment 20001458 PARAMETER Experiment Name: At_50mM_NH4NO3_L-to-H_P Parameter: Treatment Value: 50mM NH4NO3 vs. 100mM Manitol
  misc_feature: MA Experiment ID: 20001557 Result: Up-regulated in Transcription
  misc_feature: MA Experiment 20001557 PARAMETER Experiment Name: At_Drought_Soil_Dry_P Parameter: Age (day) Value: 27
  misc_feature: MA Experiment 20001557 PARAMETER Experiment Name: At_Drought_Soil_Dry_P Parameter: Organism Value: A. thaliana
  misc_feature: MA Experiment 20001557 PARAMETER Experiment Name: At_Drought_Soil_Dry_P Parameter: Plant Line Value: WS
  misc_feature: MA Experiment 20001557 PARAMETER Experiment Name: At_Drought_Soil_Dry_P Parameter: Post Timepoint (hr) Value: 3
  misc_feature: MA Experiment 20001557 PARAMETER Experiment Name: At_Drought_Soil_Dry_P Parameter: Post-Treatment Value: Re-Water vs. No Drought
  misc_feature: MA Experiment 20001557 PARAMETER Experiment Name: At_Drought_Soil_Dry_P Parameter: Timepoint (day) Value: 13
  misc_feature: MA Experiment 20001557 PARAMETER Experiment Name: At_Drought_Soil_Dry_P Parameter: Treatment Value: Drought vs. No Drought
  misc_feature: MA Experiment ID: 20001558 Result: Up-regulated in Transcription
  misc_feature: MA Experiment 20001558 PARAMETER Experiment Name: At_Drought_Soil_Dry_P Parameter: Age (day) Value: 27
  misc_feature: MA Experiment 20001558 PARAMETER Experiment Name: At_Drought_Soil_Dry_P Parameter: Organism Value: A. thaliana
  misc_feature: MA Experiment 20001558 PARAMETER Experiment Name: At_Drought_Soil_Dry_P Parameter: Plant Line Value: WS
  misc_feature: MA Experiment 20001558 PARAMETER Experiment Name: At_Drought_Soil_Dry_P Parameter: Post Timepoint (hr) Value: 6
  misc_feature: MA Experiment 20001558 PARAMETER Experiment Name: At_Drought_Soil_Dry_P Parameter: Post-Treatment Value: Re-Water vs. No Drought
  misc_feature: MA Experiment 20001558 PARAMETER Experiment Name: At_Drought_Soil_Dry_P Parameter: Timepoint (day) Value: 13
  misc_feature: MA Experiment 20001558 PARAMETER Experiment Name: At_Drought_Soil_Dry_P Parameter: Treatment Value: Drought vs. No Drought
atgggctcgaagccttggctacatccagctcctcagtataaaaccctagaaaccttttgggatgatgaagacgatgctcctggtcctagatgcgctcatacacttacggctgttgcagctactaagactcacggtcctcgtcttattctcttcggcggcgccaccgctattgagggagggagttcttccgttcctgggatcaggttagctggtgttaccaatacggtgcattcttatgatattctcactaggaagtggacaaggcttaaaccggctggtgagcctccgtctcctagggctgctcacgccgcagctgcagttggcaccatggtcgtttttcagggtggcattggaccggcggggcattctactgatgatctttacgttcttgacatgactaatgataagttcaagtggcacagggtggtggttcaaggggatggtccaggccctcgctatggccatgttatggatttagtttctcagaggtatcttgttacagtcaccggaaatgatgggaaacgagctctttctgacgcttgggcactggatacagctcagaaaccatatgtatggcagagattgaacccagatggtgaccgaccaagtgctagaatgtatgcttctggcagtgctcgttctgatggcatgtttttgctctgcgggggaagagacaccttgggggcgccgttgggagatgcttatgggctactgatgcatagaaatggtcagtgggagtggactctggctccaggtgtagctccttctccaagatatcaacatgcagcggtttttgtaggtgcaagattacatgtcagtggtggtgtgctgagaggaggccgtgtaatagacgctgaagcatctgttgcaggtaatggtgatgtgcttgatactgctgccggtgtatggttggatagaaatgggcaagttacttctgcacgtggaagtaagggacaaatcgatcaagatccgtcttttgaacttatgcgacgctgtcgccatggcgcggcatcagttggtatccggatctatgtgcatggtggtctaagaggagatgtgttacttgacgattttctagttgctgaaaattcaacattccagtcagacatcagttctcctttgctagcatcagatagaacccaacaaagttctactcccaggttttcttatgccgcacgacctccttcaggctctgaaccaagcttctccatgtctgagggactgagcttggatgaaaattcgttggagaaattgacggaggcttctgcagctgaagcagaggtagctagttctgtttggcgagctgcacaactaggagctggtactctggatgaagaaccctctacctctgatgccagctcgccaattgtagaatctactactgatggtaccgcaaatgaaggagatgtcaggcttcatccgagagctgttgtggtagcaaaagagacggttggtagtctgggcggcatggtaagacagctaagcttggatcagtttcagaatgagagccgacggatggttcccatgaacaatagcgatgtgccacaacctaccaagaagttcacgagacagaagtctccgcaaggcctgcataaaaaggtcattgctgctttgttaagacctcgaaactggaaacctcctggcaataggaaatttttcttggattcttacgaagttggggaactctgttatgctgccgaacaaatatttatgcatgaacaaacggttcttcagctaaaggctcctatcaaagtatttggcgatctccatgggcaatttggcgatttaatgcgtttatttgatgaatatggatttccctcaacagctggagacatcacgtatattgactatttattcttgggagattacgttgaccggggacaacacagcctggagactataacgttgctgcttgcattgaagattgaatatccggagaatgttcacttgattcgtggaaaccacgaggctgctgacattaatgcactatttggtttccgtcttgaatgcatagaaagaatgactaagcctgctctgtacttttgccagggagagaatgatggcatctgggcgtggacaagatttaatcaactttttaattatcttcctcttgctgcactaatcgagaacaaaattatatgtatgcatggtggaattgggaggtcaatcagtacagtggaacagattgaaaagattgaaagacccataacaatggatgctggatcccttgttctaatggatttattatggtctgatcctacagagaacgatagtatcgagggtttaagaccaaacgccagaggacctggccttgtcacgtttgggcctgatagagtcacagaattctgtaagaggaataaactacagctaattatcagggcccatgaatgtgtgatggatggattcgaaagatttgcacagggacagttgattacgcttttctccgccacaaattactgcggaactgcgaacaatgcaggagctatattggtggttggcagaggattggtgattgttcccaagttaattcatcctcttccacctcccatcttatctccagagaactctccagaacattctggagacgacgcttggatgcaggagctgaatatccagagaccgccgactccaacacgaggcaggccacaaccagattttgacagaagctcgcttgcatacatctga

SEQ ID NO: 69844 - protein, 894 aa, Arabidopsis thaliana
  peptide (1)..(894): Ceres Seq. ID no. 1829972
  misc_feature (581)..(799): Pfam Name: Calcineurin-like phosphoesterase Pfam Description: Calcineurin-like phosphoesterase
  misc_feature (400)..(894): Homolog of NCBI NO: 15223207 NR Description: protein serine/threonine phosphatase alpha,
  misc_feature (10)..(431): Homolog of NCBI NO: 15223207 NR Description: protein serine/threonine phosphatase alpha,
  misc_feature (527)..(894): Homolog of NCBI NO: 30683436 NR Description: phospho protein phosphatase -related [Arabidopsis
  misc_feature (10)..(291): Homolog of NCBI NO: 30683436 NR Description: phospho protein phosphatase -related [Arabidopsis
  misc_feature (203)..(642): Homolog of NCBI NO: 25513585 NR Description: probable phosphoprotein phosphatase (EC 3.1.3.16) - Arabidopsis thaliana >gi|6664307|gb|AAF22889.1|AC006932_6
  misc_feature (636)..(894): Homolog of NCBI NO: 25513585 NR Description: probable phosphoprotein phosphatase (EC 3.1.3.16) - Arabidopsis thaliana >gi|6664307|gb|AAF22889.1|AC006932_6
  misc_feature (69)..(172): Homolog of NCBI NO: 25513585 NR Description: probable phosphoprotein phosphatase (EC 3.1.3.16) - Arabidopsis thaliana >gi|6664307|gb|AAF22889.1|AC006932_6
  misc_feature (10)..(61): Homolog of NCBI NO: 25513585 NR Description: probable phosphoprotein phosphatase (EC 3.1.3.16) - Arabidopsis thaliana >gi|6664307|gb|AAF22889.1|AC006932_6
  misc_feature (525)..(880): Homolog of NCBI NO: 9280670 NR Description: F21B7.7 [Arabidopsis thaliana]
  misc_feature (31)..(301): Homolog of NCBI NO: 9280670 NR Description: F21B7.7 [Arabidopsis thaliana]
MGSKPWLHPAPQYKTLETFWDDEDDAPGPRCAHTLTAVAATKTHGPRLILFGGATAIEGGSSSVPGIRLAGVTNTVHSYDILTRKWTRLKPAGEPPSPRAAHAAAAVGTMVVFQGGIGPAGHSTDDLYVLDMTNDKFKWHRVVVQGDGPGPRYGHVMDLVSQRYLVTVTGNDGKRALSDAWALDTAQKPYVWQRLNPDGDRPSARMYASGSARSDGMFLLCGGRDTLGAPLGDAYGLLMHRNGQWEWTLAPGVAPSPRYQHAAVFVGARLHVSGGVLRGGRVIDAEASVAGNGDVLDTAAGVWLDRNGQVTSARGSKGQIDQDPSFELMRRCRHGAASVGIRIYVHGGLRGDVLLDDFLVAENSTFQSDISSPLLASDRTQQSSTPRFSYAARPPSGSEPSFSMSEGLSLDENSLEKLTEASAAEAEVASSVWRAAQLGAGTLDEEPSTSDASSPIVESTTDGTANEGDVRLHPRAVVVAKETVGSLGGMVRQLSLDQFQNESRRMVPMNNSDVPQPTKKFTRQKSPQGLHKKVIAALLRPRNWKPPGNRKFFLDSYEVGELCYAAEQIFMHEQTVLQLKAPIKVFGDLHGQFGDLMRLFDEYGFPSTAGDITYIDYLFLGDYVDRGQHSLETITLLLALKIEYPENVHLIRGNHEAADINALFGFRLECIERMTKPALYFCQGENDGIWAWTRFNQLFNYLPLAALIENKIICMHGGIGRSISTVEQIEKIERPITMDAGSLVLMDLLWSDPTENDSIEGLRPNARGPGLVTFGPDRVTEFCKRNKLQLIIRAHECVMDGFERFAQGQLITLFSATNYCGTANNAGAILVVGRGLVIVPKLIHPLPPPILSPENSPEHSGDDAWMQELNIQRPPTPTRGRPQPDFDRSSLAYI

SEQ ID NO: 69845 - protein, 785 aa, Arabidopsis thaliana
  peptide (1)..(785): Ceres Seq. ID no. 1829973
  misc_feature (472)..(690): Pfam Name: Calcineurin-like phosphoesterase Pfam Description: Calcineurin-like phosphoesterase
  misc_feature (291)..(785): Homolog of NCBI NO: 15223207 NR Description: protein serine/threonine phosphatase alpha,
  misc_feature (1)..(322): Homolog of NCBI NO: 15223207 NR Description: protein serine/threonine phosphatase alpha,
  misc_feature (418)..(785): Homolog of NCBI NO: 30683436 NR Description: phospho protein phosphatase -related [Arabidopsis
  misc_feature (1)..(182): Homolog of NCBI NO: 30683436 NR Description: phospho protein phosphatase -related [Arabidopsis
  misc_feature (94)..(533): Homolog of NCBI NO: 25513585 NR Description: probable phosphoprotein phosphatase (EC 3.1.3.16) - Arabidopsis thaliana >gi|6664307|gb|AAF22889.1|AC006932_6
  misc_feature (527)..(785): Homolog of NCBI NO: 25513585 NR Description: probable phosphoprotein phosphatase (EC 3.1.3.16) - Arabidopsis thaliana >gi|6664307|gb|AAF22889.1|AC006932_6
  misc_feature (1)..(63): Homolog of NCBI NO: 25513585 NR Description: probable phosphoprotein phosphatase (EC 3.1.3.16) - Arabidopsis thaliana >gi|6664307|gb|AAF22889.1|AC006932_6
  misc_feature (416)..(771): Homolog of NCBI NO: 9280670 NR Description: F21B7.7 [Arabidopsis thaliana]
  misc_feature (1)..(192): Homolog of NCBI NO: 9280670 NR Description: F21B7.7 [Arabidopsis thaliana]
  misc_feature (418)..(758): Homolog of NCBI NO: 25513447 NR Description: probable phosphoprotein phosphatase (EC 3.1.3.16)
MVVFQGGIGPAGHSTDDLYVLDMTNDKFKWHRVVVQGDGPGPRYGHVMDLVSQRYLVTVTGNDGKRALSDAWALDTAQKPYVWQRLNPDGDRPSARMYASGSARSDGMFLLCGGRDTLGAPLGDAYGLLMHRNGQWEWTLAPGVAPSPRYQHAAVFVGARLHVSGGVLRGGRVIDAEASVAGNGDVLDTAAGVWLDRNGQVTSARGSKGQIDQDPSFELMRRCRHGAASVGIRIYVHGGLRGDVLLDDFLVAENSTFQSDISSPLLASDRTQQSSTPRFSYAARPPSGSEPSFSMSEGLSLDENSLEKLTEASAAEAEVASSVWRAAQLGAGTLDEEPSTSDASSPIVESTTDGTANEGDVRLHPRAVVVAKETVGSLGGMVRQLSLDQFQNESRRMVPMNNSDVPQPTKKFTRQKSPQGLHKKVIAALLRPRNWKPPGNRKFFLDSYEVGELCYAAEQIFMHEQTVLQLKAPIKVFGDLHGQFGDLMRLFDEYGFPSTAGDITYIDYLFLGDYVDRGQHSLETITLLLALKIEYPENVHLIRGNHEAADINALFGFRLECIERMTKPALYFCQGENDGIWAWTRFNQLFNYLPLAALIENKIICMHGGIGRSISTVEQIEKIERPITMDAGSLVLMDLLWSDPTENDSIEGLRPNARGPGLVTFGPDRVTEFCKRNKLQLIIRAHECVMDGFERFAQGQLITLFSATNYCGTANNAGAILVVGRGLVIVPKLIHPLPPPILSPENSPEHSGDDAWMQELNIQRPPTPTRGRPQPDFDRSSLAYI

SEQ ID NO: 69846 - protein, 763 aa, Arabidopsis thaliana
  peptide (1)..(763): Ceres Seq. ID no. 1829974
  misc_feature (450)..(668): Pfam Name: Calcineurin-like phosphoesterase Pfam Description: Calcineurin-like phosphoesterase
  misc_feature (269)..(763): Homolog of NCBI NO: 15223207 NR Description: protein serine/threonine phosphatase alpha,
  misc_feature (1)..(300): Homolog of NCBI NO: 15223207 NR Description: protein serine/threonine phosphatase alpha,
  misc_feature (396)..(763): Homolog of NCBI NO: 30683436 NR Description: phospho protein phosphatase -related [Arabidopsis
  misc_feature (1)..(160): Homolog of NCBI NO: 30683436 NR Description: phospho protein phosphatase -related [Arabidopsis
  misc_feature (72)..(511): Homolog of NCBI NO: 25513585 NR Description: probable phosphoprotein phosphatase (EC 3.1.3.16) - Arabidopsis thaliana >gi|6664307|gb|AAF22889.1|AC006932_6
  misc_feature (505)..(763): Homolog of NCBI NO: 25513585 NR Description: probable phosphoprotein phosphatase (EC 3.1.3.16) - Arabidopsis thaliana >gi|6664307|gb|AAF22889.1|AC006932_6
  misc_feature (1)..(41): Homolog of NCBI NO: 25513585 NR Description: probable phosphoprotein phosphatase (EC 3.1.3.16) - Arabidopsis thaliana >gi|6664307|gb|AAF22889.1|AC006932_6
  misc_feature (394)..(749): Homolog of NCBI NO: 9280670 NR Description: F21B7.7 [Arabidopsis thaliana]
  misc_feature (1)..(170): Homolog of NCBI NO: 9280670 NR Description: F21B7.7 [Arabidopsis thaliana]
  misc_feature (396)..(736): Homolog of NCBI NO: 25513447 NR Description: probable phosphoprotein phosphatase (EC 3.1.3.16)
MTNDKFKWHRVVVQGDGPGPRYGHVMDLVSQRYLVTVTGNDGKRALSDAWALDTAQKPYVWQRLNPDGDRPSARMYASGSARSDGMFLLCGGRDTLGAPLGDAYGLLMHRNGQWEWTLAPGVAPSPRYQHAAVFVGARLHVSGGVLRGGRVIDAEASVAGNGDVLDTAAGVWLDRNGQVTSARGSKGQIDQDPSFELMRRCRHGAASVGIRIYVHGGLRGDVLLDDFLVAENSTFQSDISSPLLASDRTQQSSTPRFSYAARPPSGSEPSFSMSEGLSLDENSLEKLTEASAAEAEVASSVWRAAQLGAGTLDEEPSTSDASSPIVESTTDGTANEGDVRLHPRAVVVAKETVGSLGGMVRQLSLDQFQNESRRMVPMNNSDVPQPTKKFTRQKSPQGLHKKVIAALLRPRNWKPPGNRKFFLDSYEVGELCYAAEQIFMHEQTVLQLKAPIKVFGDLHGQFGDLMRLFDEYGFPSTAGDITYIDYLFLGDYVDRGQHSLETITLLLALKIEYPENVHLIRGNHEAADINALFGFRLECIERMTKPALYFCQGENDGIWAWTRFNQLFNYLPLAALIENKIICMHGGIGRSISTVEQIEKIERPITMDAGSLVLMDLLWSDPTENDSIEGLRPNARGPGLVTFGPDRVTEFCKRNKLQLIIRAHECVMDGFERFAQGQLITLFSATNYCGTANNAGAILVVGRGLVIVPKLIHPLPPPILSPENSPEHSGDDAWMQELNIQRPPTPTRGRPQPDFDRSSLAYI

SEQ ID NO: 69847 - DNA, 2244 bp, Arabidopsis thaliana
  misc_feature (1)..(2244): Ceres Seq. ID no. 1830949
  misc_feature: MA Experiment ID: 20000184 Result: Up-regulated in Transcription
  misc_feature: MA Experiment 20000184 PARAMETER Experiment Name: At_Shoots__P Parameter: Age (day) Value: 7
  misc_feature: MA Experiment 20000184 PARAMETER Experiment Name: At_Shoots__P Parameter: Tissue Value: Shoots vs. Whole Plant
  misc_feature: MA Experiment ID: 20000265 Result: Up-regulated in Transcription
  misc_feature: MA Experiment 20000265 PARAMETER Experiment Name: At_Open_Flower_P Parameter: Age (day) Value: 21
  misc_feature: MA Experiment 20000265 PARAMETER Experiment Name: At_Open_Flower_P Parameter: Plant Line Value: WS
  misc_feature: MA Experiment 20000265 PARAMETER Experiment Name: At_Open_Flower_P Parameter: Tissue Value: Closed Flower vs. Whole Plant
  misc_feature: MA Experiment ID: 20000286 Result: Up-regulated in Transcription
  misc_feature: MA Experiment 20000286 PARAMETER Experiment Name: At_Open_Flower_P Parameter: Age (day) Value: 21
  misc_feature: MA Experiment 20000286 PARAMETER Experiment Name: At_Open_Flower_P Parameter: Plant Line Value: WS
  misc_feature: MA Experiment 20000286 PARAMETER Experiment Name: At_Open_Flower_P Parameter: Tissue Value: Half Open vs. Whole Plant
  misc_feature: MA Experiment ID: 20000438 Result: Up-regulated in Transcription
  misc_feature: MA Experiment 20000438 PARAMETER Experiment Name: At_Shoots__P Parameter: Age (day) Value: 14
  misc_feature: MA Experiment 20000438 PARAMETER Experiment Name: At_Shoots__P Parameter: Tissue Value: Shoots vs. Whole Plant
  misc_feature: MA Experiment ID: 20000574 Result: Down-regulated in Transcription
  misc_feature: MA Experiment 20000574 PARAMETER Experiment Name: At_100uM_ABA_Mutants__P Parameter: Organism Value: A. thaliana
  misc_feature: MA Experiment 20000574 PARAMETER Experiment Name: At_100uM_ABA_Mutants__P Parameter: Plant Line Value: CS23 vs. Ler wt
  misc_feature: MA Experiment 20000574 PARAMETER Experiment Name: At_100uM_ABA_Mutants__P Parameter: Timepoint (hr) Value: N/A
  misc_feature: MA Experiment 20000574 PARAMETER Experiment Name: At_100uM_ABA_Mutants__P Parameter: Tissue Value: Whole Plant
  misc_feature: MA Experiment 20000574 PARAMETER Experiment Name: At_100uM_ABA_Mutants__P Parameter: Treatment Value: None
  misc_feature: MA Experiment ID: 20000794 Result: Up-regulated in Transcription
  misc_feature: MA Experiment 20000794 PARAMETER Experiment Name: At_Petals_P Parameter: Age (day) Value: 23-25 days
  misc_feature: MA Experiment 20000794 PARAMETER Experiment Name: At_Petals_P Parameter: Plant Line Value: WS
  misc_feature: MA Experiment 20000794 PARAMETER Experiment Name: At_Petals_P Parameter: Tissue Value: Petals vs. Whole plant
  misc_feature: MA Experiment ID: 20001247 Result: Down-regulated in Transcription
  misc_feature: MA Experiment 20001247 PARAMETER Experiment Name: At_Far-red-induction_P Parameter: Age (day) Value: 7
  misc_feature: MA Experiment 20001247 PARAMETER Experiment Name: At_Far-red-induction_P Parameter: Light Value: Far-red vs. White
  misc_feature: MA Experiment 20001247 PARAMETER Experiment Name: At_Far-red-induction_P Parameter: Organism Value: A. thaliana
  misc_feature: MA Experiment 20001247 PARAMETER Experiment Name: At_Far-red-induction_P Parameter: Plant Line Value: Columbia
  misc_feature: MA Experiment 20001247 PARAMETER Experiment Name: At_Far-red-induction_P Parameter: Timepoint (hr) Value: 1
  misc_feature: MA Experiment 20001247 PARAMETER Experiment Name: At_Far-red-induction_P Parameter: Tissue Value: Whole Plant
  misc_feature: MA Experiment ID: 20001248 Result: Down-regulated in Transcription
  misc_feature: MA Experiment 20001248 PARAMETER Experiment Name: At_Far-red-induction_P Parameter: Age (day) Value: 7
  misc_feature: MA Experiment 20001248 PARAMETER Experiment Name: At_Far-red-induction_P Parameter: Light Value: Far-red vs. White
  misc_feature: MA Experiment 20001248 PARAMETER Experiment Name: At_Far-red-induction_P Parameter: Organism Value: A. thaliana
  misc_feature: MA Experiment 20001248 PARAMETER Experiment Name: At_Far-red-induction_P Parameter: Plant Line Value: Columbia
  misc_feature: MA Experiment 20001248 PARAMETER Experiment Name: At_Far-red-induction_P Parameter: Timepoint (hr) Value: 4
  misc_feature: MA Experiment 20001248 PARAMETER Experiment Name: At_Far-red-induction_P Parameter: Tissue Value: Whole Plant
  misc_feature: MA Experiment ID: 20001554 Result: Up-regulated in Transcription
  misc_feature: MA Experiment 20001554 PARAMETER Experiment Name: At_Drought_Soil_Dry_P Parameter: Age (day) Value: 21
  misc_feature: MA Experiment 20001554 PARAMETER Experiment Name: At_Drought_Soil_Dry_P Parameter: Organism Value: A. thaliana
  misc_feature: MA Experiment 20001554 PARAMETER Experiment Name: At_Drought_Soil_Dry_P Parameter: Plant Line Value: WS
  misc_feature: MA Experiment 20001554 PARAMETER Experiment Name: At_Drought_Soil_Dry_P Parameter: Post Timepoint (hr) Value: None
  misc_feature: MA Experiment 20001554 PARAMETER Experiment Name: At_Drought_Soil_Dry_P Parameter: Post-Treatment Value: None
  misc_feature: MA Experiment 20001554 PARAMETER Experiment Name: At_Drought_Soil_Dry_P Parameter: Timepoint (day) Value: 7
  misc_feature: MA Experiment 20001554 PARAMETER Experiment Name: At_Drought_Soil_Dry_P Parameter: Treatment Value: Drought vs. No Drought
  misc_feature: MA Experiment ID: 20001556 Result: Up-regulated in Transcription
  misc_feature: MA Experiment 20001556 PARAMETER Experiment Name: At_Drought_Soil_Dry_P Parameter: Age (day) Value: 26
  misc_feature: MA Experiment 20001556 PARAMETER Experiment Name: At_Drought_Soil_Dry_P Parameter: Organism Value: A. thaliana
  misc_feature: MA Experiment 20001556 PARAMETER Experiment Name: At_Drought_Soil_Dry_P Parameter: Plant Line Value: WS
  misc_feature: MA Experiment 20001556 PARAMETER Experiment Name: At_Drought_Soil_Dry_P Parameter: Post Timepoint (hr) Value: None
  misc_feature: MA Experiment 20001556 PARAMETER Experiment Name: At_Drought_Soil_Dry_P Parameter: Post-Treatment Value: None
  misc_feature: MA Experiment 20001556 PARAMETER Experiment Name: At_Drought_Soil_Dry_P Parameter: Timepoint (day) Value: 12
  misc_feature: MA Experiment 20001556 PARAMETER Experiment Name: At_Drought_Soil_Dry_P Parameter: Treatment Value: Drought vs. No Drought
  misc_feature: MA Experiment ID: 20001560 Result: Down-regulated in Transcription
  misc_feature: MA Experiment 20001560 PARAMETER Experiment Name: At_Drought_Soil_Dry_P Parameter: Age (day) Value: 28
  misc_feature: MA Experiment 20001560 PARAMETER Experiment Name: At_Drought_Soil_Dry_P Parameter: Organism Value: A. thaliana
  misc_feature: MA Experiment 20001560 PARAMETER Experiment Name: At_Drought_Soil_Dry_P Parameter: Plant Line Value: WS
  misc_feature: MA Experiment 20001560 PARAMETER Experiment Name: At_Drought_Soil_Dry_P Parameter: Post Timepoint (hr) Value: None
  misc_feature: MA Experiment 20001560 PARAMETER Experiment Name: At_Drought_Soil_Dry_P Parameter: Post-Treatment Value: None
  misc_feature: MA Experiment 20001560 PARAMETER Experiment Name: At_Drought_Soil_Dry_P Parameter: Timepoint (day) Value: 14
  misc_feature: MA Experiment 20001560 PARAMETER Experiment Name: At_Drought_Soil_Dry_P Parameter: Treatment Value: Drought vs. No Drought
  misc_feature: MA Experiment ID: 20001761 Result: Down-regulated in Transcription
  misc_feature: MA Experiment 20001761 PARAMETER Experiment Name: At_50mM_NH4NO3_L-to-H_P Parameter: Timepoint (hr) Value: 4
  misc_feature: MA Experiment 20001761 PARAMETER Experiment Name: At_50mM_NH4NO3_L-to-H_P Parameter: Tissue Value: Siliques
  misc_feature: MA Experiment 20001761 PARAMETER Experiment Name: At_50mM_NH4NO3_L-to-H_P Parameter: Treatment Value: 50mM NH4NO3 vs 100mM Mannitol
  misc_feature: MA Experiment ID: 20001904 Result: Up-regulated in Transcription
  misc_feature: MA Experiment 20001904 PARAMETER Experiment Name: At_Drought_Reproduction_P Parameter: Age (day) Value: 37
  misc_feature: MA Experiment 20001904 PARAMETER Experiment Name: At_Drought_Reproduction_P Parameter: Organism Value: A. thaliana
  misc_feature: MA Experiment 20001904 PARAMETER Experiment Name: At_Drought_Reproduction_P Parameter: Plant Line Value: WS
  misc_feature: MA Experiment 20001904 PARAMETER Experiment Name: At_Drought_Reproduction_P Parameter: Timepoint (day) Value: 7
  misc_feature: MA Experiment 20001904 PARAMETER Experiment Name: At_Drought_Reproduction_P Parameter: Tissue Value: Rosettes
  misc_feature: MA Experiment 20001904 PARAMETER Experiment Name: At_Drought_Reproduction_P Parameter: Treatment Value: Drought vs. No Drought
  misc_feature: MA Experiment ID: 20001905 Result: Up-regulated in Transcription
  misc_feature: MA Experiment 20001905 PARAMETER Experiment Name: At_Drought_Reproduction_P Parameter: Age (day) Value: 40
  misc_feature: MA Experiment 20001905 PARAMETER Experiment Name: At_Drought_Reproduction_P Parameter: Organism Value: A. thaliana
  misc_feature: MA Experiment 20001905 PARAMETER Experiment Name: At_Drought_Reproduction_P Parameter: Plant Line Value: WS
  misc_feature: MA Experiment 20001905 PARAMETER Experiment Name: At_Drought_Reproduction_P Parameter: Timepoint (day) Value: 10
  misc_feature: MA Experiment 20001905 PARAMETER Experiment Name: At_Drought_Reproduction_P Parameter: Tissue Value: Rosettes
  misc_feature: MA Experiment 20001905 PARAMETER Experiment Name: At_Drought_Reproduction_P Parameter: Treatment Value: Drought vs. No Drought
  misc_feature: MA Experiment ID: 20001906 Result: Up-regulated in Transcription
  misc_feature: MA Experiment 20001906 PARAMETER Experiment Name: At_Drought_Reproduction_P Parameter: Age (day) Value: 35
  misc_feature: MA Experiment 20001906 PARAMETER Experiment Name: At_Drought_Reproduction_P Parameter: Organism Value: A. thaliana
  misc_feature: MA Experiment 20001906 PARAMETER Experiment Name: At_Drought_Reproduction_P Parameter: Plant Line Value: WS
  misc_feature: MA Experiment 20001906 PARAMETER Experiment Name: At_Drought_Reproduction_P Parameter: Timepoint (day) Value: 5
  misc_feature: MA Experiment 20001906 PARAMETER Experiment Name: At_Drought_Reproduction_P Parameter: Tissue Value: Siliques
  misc_feature: MA Experiment 20001906 PARAMETER Experiment Name: At_Drought_Reproduction_P Parameter: Treatment Value: Drought vs. No Drought
  misc_feature: MA Experiment ID: 20001908 Result: Up-regulated in Transcription
  misc_feature: MA Experiment 20001908 PARAMETER Experiment Name: At_Drought_Reproduction_P Parameter: Age (day) Value: 40
  misc_feature: MA Experiment 20001908 PARAMETER Experiment Name: At_Drought_Reproduction_P Parameter: Organism Value: A. thaliana
  misc_feature: MA Experiment 20001908 PARAMETER Experiment Name: At_Drought_Reproduction_P Parameter: Plant Line Value: WS
  misc_feature: MA Experiment 20001908 PARAMETER Experiment Name: At_Drought_Reproduction_P Parameter: Timepoint (day) Value: 10
  misc_feature: MA Experiment 20001908 PARAMETER Experiment Name: At_Drought_Reproduction_P Parameter: Tissue Value: Siliques
  misc_feature: MA Experiment 20001908 PARAMETER Experiment Name: At_Drought_Reproduction_P Parameter: Treatment Value: Drought vs. No Drought
  misc_feature: MA Experiment ID: 20001911 Result: Up-regulated in Transcription
  misc_feature: MA Experiment 20001911 PARAMETER Experiment Name: At_Drought_Reproduction_P Parameter: Age (day) Value: 40
  misc_feature: MA Experiment 20001911 PARAMETER Experiment Name: At_Drought_Reproduction_P Parameter: Organism Value: A. thaliana
  misc_feature: MA Experiment 20001911 PARAMETER Experiment Name: At_Drought_Reproduction_P Parameter: Plant Line Value: WS
  misc_feature: MA Experiment 20001911 PARAMETER Experiment Name: At_Drought_Reproduction_P Parameter: Timepoint (day) Value: 10
  misc_feature: MA Experiment 20001911 PARAMETER Experiment Name: At_Drought_Reproduction_P Parameter: Tissue Value: Flowers
  misc_feature: MA Experiment 20001911 PARAMETER Experiment Name: At_Drought_Reproduction_P Parameter: Treatment Value: Drought vs. No Drought
atggagcctcacagaaaacactcggtcggcgacacaaccctccacacgtgtcatccttgccggcgcaccattccatatagaatctacgccgtatttcacacgtgtggcatcatagccctcatgtatcaccatgtacactcacttctcacagcaaacacaactctaatcacgtctctccttctcctctccgatattgttctcgccttcatgtgggcaaccacaacttccctccggtataaaccggttcgccggaccgagtaccctgagaaatatgcagctgaaccggaggacttcccgaaactggacgtgtttatatgcacggctgatccgtacaaggagcctccgatgatggtggtcaacactgccttatcggtgatggcttacgagtatccgtccgataagatctcagtctacgtatcggacgatggaggttcgtcgttgactttgtttgctcttatggaggcagctaagttctctaagcattggttgcctttttgcaagaagaataatgttcaagatcggtctcctgaagtttatttctcatcaaagttacgttctcggagtgatgaagctgaaaatatcaagatgatgtacgaagacatgaagagtagagtagaacatgtggtggagagtggaaaagttgagactgcatttatcacatgcgatcaatttcgtggggtattcgatttgtggaccgacaaattcactcgtcatgaccatcccacaattattcaggtgctacaaaatagtgagaatgatatggacgataccaaaaaatatataatgccaaacctaatctacgtttcaagagagaagagtaaagtttcatcacatcatttcaaagccggtgctcttaataccttgctacgagtgtctggagtgatgacgaattcaccgatcattctaacactagactgtgatatgtattccaacgatccagcaacaccagttcgtgccctgtgctatttaacagaccctaaaatcaaaactggtttagggtttgtgcagtttcctcaaacatttcaaggaataagcaagaacgatatatatgcatgcgcgtataagcgtctctttgagatcaatatgattgggtttgatggtttaatgggcccgaatcatgtgggaactggttgtttcttcaatcgacgaggtttttatggagctccatctaatttaattttgcctgagatagatgaacttaagcccaatcgtattgtagataagcctatcaatgctcaagatgttttagcattggctcaccgtgtagcaggatgtatctacgagcttaacaccaattggggatcaaagtttgttataccgtataacttcattttatcattcaaaactatgcagattggattcagatatgggtctttagtagaagactactacacagggtataggctccattgtgaaggatggagatcagttttttgcagacccaaaagagcagcattttgcggagattccccaaaaagtctaattgatgtagtgagccaacaaaagagatgggccattgggcttcttgaagttgccatctcaaggtatagccccattacctatggtgtcaaatcaatgggtctagtaacgggagtaggctattgtcaatacgcatgttgggccttttggtcacttcctcttatcgtctatggattcttgccccaacttgctctcctttatcaatctagcgtctttcccaagtcatcagatccatggttttggctttacatcgttttgttcctcggtgcatatgggcaagatctactcgactttgtattagaaggaggaacttatggcggatggtggaacgatcaaagaatgtggtcgataagaggattctcttcacacctatttggcttcatagagttcactcttaaaaccctaaacctctccacgcatggattcaacgtcacaagcaaagccaacgatgacgaagaacaaagcaagaggtatgagaaagagatttttgagttcggcccctcttcgtccatgttcttgcccttgactacggttgccatcgttaacctccttgcttttgtctgggggctttatggtcttttcgcttggggagaaggactcgtccttgagctgatgctggcgagtttcgcggtggtgaactgcttgccgatctatgaggctatggtgttgaggatagacgatggaaaattaccaaaaagggtttgtttcgtagctggaatcctcacatttgtgctgattgtgtcaggttacgtcttcctcaagtaa

SEQ ID NO: 69848 - protein, 747 aa, Arabidopsis thaliana
  peptide (1)..(747): Ceres Seq. ID no. 1830950
  misc_feature (288)..(747): Homolog of NCBI NO: 7487588 NR Description: hypothetical protein T32A16.170 - Arabidopsis >gi|4972104|emb|CAB43900.1| putative protein [Arabidopsis >gi|7269249|emb|CAB81318.1| putative protein [Arabidopsis
  misc_feature (1)..(246): Homolog of NCBI NO: 7487588 NR Description: hypothetical protein T32A16.170 - Arabidopsis >gi|4972104|emb|CAB43900.1| putative protein [Arabidopsis >gi|7269249|emb|CAB81318.1| putative protein [Arabidopsis
  misc_feature (289)..(734): Homolog of NCBI NO: 15233653 NR Description: putative protein; protein id: At4g24010.1
  misc_feature (1)..(246): Homolog of NCBI NO: 15233653 NR Description: putative protein; protein id: At4g24010.1
  misc_feature (261)..(747): Homolog of NCBI NO: 30686386 NR Description: cellulose synthase - related [Arabidopsis >gi|17979143|gb|AAL49829.1| unknown protein [Arabidopsis >gi|20465365|gb|AAM20086.1| unknown protein [Arabidopsis
  misc_feature (1)..(445): Homolog of NCBI NO: 30686386 NR Description: cellulose synthase - related [Arabidopsis >gi|17979143|gb|AAL49829.1| unknown protein [Arabidopsis >gi|20465365|gb|AAM20086.1| unknown protein [Arabidopsis
  misc_feature (1)..(436): Homolog of NCBI NO: 17380774 NR Description: unknown protein [Arabidopsis thaliana]
  misc_feature (1)..(436): Homolog of NCBI NO: 21536834 NR Description: unknown [Arabidopsis thaliana]
  misc_feature (10)..(441): Homolog of NCBI NO: 22330270 NR Description: cellulose synthase catalytic subunit, putative; id: At1g55850.1, supported by cDNA: gi_17381167 [Arabidopsis >gi|17381168|gb|AAL36396.1| putative cellulose synthase catalytic
  misc_feature (422)..(734): Homolog of NCBI NO: 22330270 NR Description: cellulose synthase catalytic subunit, putative; id: At1g55850.1, supported by cDNA: gi_17381167 [Arabidopsis >gi|17381168|gb|AAL36396.1| putative cellulose synthase catalytic
MEPHRKHSVGDTTLHTCHPCRRTIPYRIYAVFHTCGIIALMYHHVHSLLTANTTLITSLLLLSDIVLAFMWATTTSLRYKPVRRTEYPEKYAAEPEDFPKLDVFICTADPYKEPPMMVVNTALSVMAYEYPSDKISVYVSDDGGSSLTLFALMEAAKFSKHWLPFCKKNNVQDRSPEVYFSSKLRSRSDEAENIKMMYEDMKSRVEHVVESGKVETAFITCDQFRGVFDLWTDKFTRHDHPTIIQVLQNSENDMDDTKKYIMPNLIYVSREKSKVSSHHFKAGALNTLLRVSGVMTNSPIILTLDCDMYSNDPATPVRALCYLTDPKIKTGLGFVQFPQTFQGISKNDIYACAYKRLFEINMIGFDGLMGPNHVGTGCFFNRRGFYGAPSNLILPEIDELKPNRIVDKPINAQDVLALAHRVAGCIYELNTNWGSKFVIPYNFILSFKTMQIGFRYGSLVEDYYTGYRLHCEGWRSVFCRPKRAAFCGDSPKSLIDVVSQQKRWAIGLLEVAISRYSPITYGVKSMGLVTGVGYCQYACWAFWSLPLIVYGFLPQLALLYQSSVFPKSSDPWFWLYIVLFLGAYGQDLLDFVLEGGTYGGWWNDQRMWSIRGFSSHLFGFIEFTLKTLNLSTHGFNVTSKANDDEEQSKRYEKEIFEFGPSSSMFLPLTTVAIVNLLAFVWGLYGLFAWGEGLVLELMLASFAVVNCLPIYEAMVLRIDDGKLPKRVCFVAGILTFVLIVSGYVFLK

SEQ ID NO: 69849 - protein, 707 aa, Arabidopsis thaliana
  peptide (1)..(707): Ceres Seq. ID no. 1830951
  misc_feature (1)..(396): Homolog of NCBI NO: 21536834 NR Description: unknown [Arabidopsis thaliana]
  misc_feature (1)..(401): Homolog of NCBI NO: 22330270 NR Description: cellulose synthase catalytic subunit, putative; id: At1g55850.1, supported by cDNA: gi_17381167 [Arabidopsis >gi|17381168|gb|AAL36396.1| putative cellulose synthase catalytic
  misc_feature (382)..(694): Homolog of NCBI NO: 22330270 NR Description: cellulose synthase catalytic subunit, putative; id: At1g55850.1, supported by cDNA: gi_17381167 [Arabidopsis >gi|17381168|gb|AAL36396.1| putative cellulose synthase catalytic
  misc_feature (248)..(707): Homolog of NCBI NO: 7487588 NR Description: hypothetical protein T32A16.170 - Arabidopsis >gi|4972104|emb|CAB43900.1| putative protein [Arabidopsis >gi|7269249|emb|CAB81318.1| putative protein [Arabidopsis
  misc_feature (1)..(206): Homolog of NCBI NO: 7487588 NR Description: hypothetical protein T32A16.170 - Arabidopsis >gi|4972104|emb|CAB43900.1| putative protein [Arabidopsis >gi|7269249|emb|CAB81318.1| putative protein [Arabidopsis
  misc_feature (249)..(694): Homolog of NCBI NO: 15233653 NR Description: putative protein; protein id: At4g24010.1
  misc_feature (1)..(206): Homolog of NCBI NO: 15233653 NR Description: putative protein; protein id: At4g24010.1
  misc_feature (221)..(707): Homolog of NCBI NO: 30686386 NR Description: cellulose synthase - related [Arabidopsis >gi|17979143|gb|AAL49829.1| unknown protein [Arabidopsis >gi|20465365|gb|AAM20086.1| unknown protein [Arabidopsis
  misc_feature (1)..(405): Homolog of NCBI NO: 30686386 NR Description: cellulose synthase - related [Arabidopsis >gi|17979143|gb|AAL49829.1| unknown protein [Arabidopsis >gi|20465365|gb|AAM20086.1| unknown protein [Arabidopsis
  misc_feature (1)..(396): Homolog of NCBI NO: 17380774 NR Description: unknown protein [Arabidopsis thaliana]
MYHHVHSLLTANTTLITSLLLLSDIVLAFMWATTTSLRYKPVRRTEYPEKYAAEPEDFPKLDVFICTADPYKEPPMMVVNTALSVMAYEYPSDKISVYVSDDGGSSLTLFALMEAAKFSKHWLPFCKKNNVQDRSPEVYFSSKLRSRSDEAENIKMMYEDMKSRVEHVVESGKVETAFITCDQFRGVFDLWTDKFTRHDHPTIIQVLQNSENDMDDTKKYIMPNLIYVSREKSKVSSHHFKAGALNTLLRVSGVMTNSPIILTLDCDMYSNDPATPVRALCYLTDPKIKTGLGFVQFPQTFQGISKNDIYACAYKRLFEINMIGFDGLMGPNHVGTGCFFNRRGFYGAPSNLILPEIDELKPNRIVDKPINAQDVLALAHRVAGCIYELNTNWGSKFVIPYNFILSFKTMQIGFRYGSLVEDYYTGYRLHCEGWRSVFCRPKRAAFCGDSPKSLIDVVSQQKRWAIGLLEVAISRYSPITYGVKSMGLVTGVGYCQYACWAFWSLPLIVYGFLPQLALLYQSSVFPKSSDPWFWLYIVLFLGAYGQDLLDFVLEGGTYGGWWNDQRMWSIRGFSSHLFGFIEFTLKTLNLSTHGFNVTSKANDDEEQSKRYEKEIFEFGPSSSMFLPLTTVAIVNLLAFVWGLYGLFAWGEGLVLELMLASFAVVNCLPIYEAMVLRIDDGKLPKRVCFVAGILTFVLIVSGYVFLK

SEQ ID NO: 69850 - protein, 678 aa, Arabidopsis thaliana
  peptide (1)..(678): Ceres Seq. ID no. 1830952
  misc_feature (219)..(678): Homolog of NCBI NO: 7487588 NR Description: hypothetical protein T32A16.170 - Arabidopsis >gi|4972104|emb|CAB43900.1| putative protein [Arabidopsis >gi|7269249|emb|CAB81318.1| putative protein [Arabidopsis
  misc_feature (1)..(177): Homolog of NCBI NO: 7487588 NR Description: hypothetical protein T32A16.170 - Arabidopsis >gi|4972104|emb|CAB43900.1| putative protein [Arabidopsis >gi|7269249|emb|CAB81318.1| putative protein [Arabidopsis
  misc_feature (220)..(665): Homolog of NCBI NO: 15233653 NR Description: putative protein; protein id: At4g24010.1
  misc_feature (1)..(177): Homolog of NCBI NO: 15233653 NR Description: putative protein; protein id: At4g24010.1
  misc_feature (192)..(678): Homolog of NCBI NO: 30686386 NR Description: cellulose synthase - related [Arabidopsis >gi|17979143|gb|AAL49829.1| unknown protein [Arabidopsis >gi|20465365|gb|AAM20086.1| unknown protein [Arabidopsis
  misc_feature (1)..(376): Homolog of NCBI NO: 30686386 NR Description: cellulose synthase - related [Arabidopsis >gi|17979143|gb|AAL49829.1| unknown protein [Arabidopsis >gi|20465365|gb|AAM20086.1| unknown protein [Arabidopsis
  misc_feature (1)..(367): Homolog of NCBI NO: 17380774 NR Description: unknown protein [Arabidopsis thaliana]
  misc_feature (1)..(367): Homolog of NCBI NO: 21536834 NR Description: unknown [Arabidopsis thaliana]
  misc_feature (1)..(372): Homolog of NCBI NO: 22330270 NR Description: cellulose synthase catalytic subunit, putative; id: At1g55850.1, supported by cDNA: gi_17381167 [Arabidopsis >gi|17381168|gb|AAL36396.1| putative cellulose synthase catalytic
  misc_feature (353)..(665): Homolog of NCBI NO: 22330270 NR Description: cellulose synthase catalytic subunit, putative; id: At1g55850.1, supported by cDNA: gi_17381167 [Arabidopsis >gi|17381168|gb|AAL36396.1| putative cellulose synthase catalytic
MWATTTSLRYKPVRRTEYPEKYAAEPEDFPKLDVFICTADPYKEPPMMVVNTALSVMAYEYPSDKISVYVSDDGGSSLTLFALMEAAKFSKHWLPFCKKNNVQDRSPEVYFSSKLRSRSDEAENIKMMYEDMKSRVEHVVESGKVETAFITCDQFRGVFDLWTDKFTRHDHPTIIQVLQNSENDMDDTKKYIMPNLIYVSREKSKVSSHHFKAGALNTLLRVSGVMTNSPIILTLDCDMYSNDPATPVRALCYLTDPKIKTGLGFVQFPQTFQGISKNDIYACAYKRLFEINMIGFDGLMGPNHVGTGCFFNRRGFYGAPSNLILPEIDELKPNRIVDKPINAQDVLALAHRVAGCIYELNTNWGSKFVIPYNFILSFKTMQIGFRYGSLVEDYYTGYRLHCEGWRSVFCRPKRAAFCGDSPKSLIDVVSQQKRWAIGLLEVAISRYSPITYGVKSMGLVTGVGYCQYACWAFWSLPLIVYGFLPQLALLYQSSVFPKSSDPWFWLYIVLFLGAYGQDLLDFVLEGGTYGGWWNDQRMWSIRGFSSHLFGFIEFTLKTLNLSTHGFNVTSKANDDEEQSKRYEKEIFEFGPSSSMFLPLTTVAIVNLLAFVWGLYGLFAWGEGLVLELMLASFAVVNCLPIYEAMVLRIDDGKLPKRVCFVAGILTFVLIVSGYVFLK

SEQ ID NO: 69851 - DNA, 2313 bp, Arabidopsis thaliana
  misc_feature (1)..(2313): Ceres Seq. ID no. 1830953
  misc_feature: MA Experiment ID: 20000234 Result: Up-regulated in Transcription
  misc_feature: MA Experiment 20000234 PARAMETER Experiment Name: At_Siliques_P Parameter: Age (day) Value: 21
  misc_feature: MA Experiment 20000234 PARAMETER Experiment Name: At_Siliques_P Parameter: Organism Value: A. thaliana
  misc_feature: MA Experiment 20000234 PARAMETER Experiment Name: At_Siliques_P Parameter: Plant Line Value: WS
  misc_feature: MA Experiment 20000234 PARAMETER Experiment Name: At_Siliques_P Parameter: Tissue Value: Less Than 5mm Siliques vs. Whole Plant
  misc_feature: MA Experiment ID: 20000235 Result: Up-regulated in Transcription
  misc_feature: MA Experiment 20000235 PARAMETER Experiment Name: At_Siliques_P Parameter: Age (day) Value: 21
  misc_feature: MA Experiment 20000235 PARAMETER Experiment Name: At_Siliques_P Parameter: Organism Value: A. thaliana
  misc_feature: MA Experiment 20000235 PARAMETER Experiment Name: At_Siliques_P Parameter: Plant Line Value: WS
  misc_feature: MA Experiment 20000235 PARAMETER Experiment Name: At_Siliques_P Parameter: Tissue Value: 5-10mm Siliques vs. Whole Plant
  misc_feature: MA Experiment ID: 20000264 Result: Up-regulated in Transcription
  misc_feature: MA Experiment 20000264 PARAMETER Experiment Name: At_Open_Flower_P Parameter: Age (day) Value: 21
  misc_feature: MA Experiment 20000264 PARAMETER Experiment Name: At_Open_Flower_P Parameter: Plant Line Value: WS
  misc_feature: MA Experiment 20000264 PARAMETER Experiment Name: At_Open_Flower_P Parameter: Tissue Value: Open Flower vs. Whole Plant
  misc_feature: MA Experiment ID: 20000286 Result: Up-regulated in Transcription
  misc_feature: MA Experiment 20000286 PARAMETER Experiment Name: At_Open_Flower_P Parameter: Age (day) Value: 21
  misc_feature: MA Experiment 20000286 PARAMETER Experiment Name: At_Open_Flower_P Parameter: Plant Line Value: WS
  misc_feature: MA Experiment 20000286 PARAMETER Experiment Name: At_Open_Flower_P Parameter: Tissue Value: Half Open vs. Whole Plant
  misc_feature: MA Experiment ID: 20000438 Result: Up-regulated in Transcription
  misc_feature: MA Experiment 20000438 PARAMETER Experiment Name: At_Shoots__P Parameter: Age (day) Value: 14
  misc_feature: MA Experiment 20000438 PARAMETER Experiment Name: At_Shoots__P Parameter: Tissue Value: Shoots vs. Whole Plant
  misc_feature: MA Experiment ID: 20000527 Result: Down-regulated in Transcription
  misc_feature: MA Experiment 20000527 PARAMETER Experiment Name: At_10percent_PEG_P Parameter: Age (day) Value: 20
  misc_feature: MA Experiment 20000527 PARAMETER Experiment Name: At_10percent_PEG_P Parameter: Organism Value: A. thaliana
  misc_feature: MA Experiment 20000527 PARAMETER Experiment Name: At_10percent_PEG_P Parameter: Plant Line Value: WS
  misc_feature: MA Experiment 20000527 PARAMETER Experiment Name: At_10percent_PEG_P Parameter: Timepoint (day) Value: 20
  misc_feature: MA Experiment 20000527 PARAMETER Experiment Name: At_10percent_PEG_P Parameter: Tissue Value: Whole Plant
  misc_feature: MA Experiment 20000527 PARAMETER Experiment Name: At_10percent_PEG_P Parameter: Treatment Value: 10percent PEG vs. No Treatment
  misc_feature: MA Experiment ID: 20000794 Result: Up-regulated in Transcription
  misc_feature: MA Experiment 20000794 PARAMETER Experiment Name: At_Petals_P Parameter: Age (day) Value: 23-25 days
  misc_feature: MA Experiment 20000794 PARAMETER Experiment Name: At_Petals_P Parameter: Plant Line Value: WS
  misc_feature: MA Experiment 20000794 PARAMETER Experiment Name: At_Petals_P Parameter: Tissue Value: Petals vs. Whole plant
  misc_feature: MA Experiment ID: 20001248 Result: Down-regulated in Transcription
  misc_feature: MA Experiment 20001248 PARAMETER Experiment Name: At_Far-red-induction_P Parameter: Age (day) Value: 7
  misc_feature: MA Experiment 20001248 PARAMETER Experiment Name: At_Far-red-induction_P Parameter: Light Value: Far-red vs. White
  misc_feature: MA Experiment 20001248 PARAMETER Experiment Name: At_Far-red-induction_P Parameter: Organism Value: A. thaliana
  misc_feature: MA Experiment 20001248 PARAMETER Experiment Name: At_Far-red-induction_P Parameter: Plant Line Value: Columbia
  misc_feature: MA Experiment 20001248 PARAMETER Experiment Name: At_Far-red-induction_P Parameter: Timepoint (hr) Value: 4
  misc_feature: MA Experiment 20001248 PARAMETER Experiment Name: At_Far-red-induction_P Parameter: Tissue Value: Whole Plant
  misc_feature: MA Experiment ID: 20001554 Result: Up-regulated in Transcription
  misc_feature: MA Experiment 20001554 PARAMETER Experiment Name: At_Drought_Soil_Dry_P Parameter: Age (day) Value: 21
  misc_feature: MA Experiment 20001554 PARAMETER Experiment Name: At_Drought_Soil_Dry_P Parameter: Organism Value: A. thaliana
  misc_feature: MA Experiment 20001554 PARAMETER Experiment Name: At_Drought_Soil_Dry_P Parameter: Plant Line Value: WS
  misc_feature: MA Experiment 20001554 PARAMETER Experiment Name: At_Drought_Soil_Dry_P Parameter: Post Timepoint (hr) Value: None
  misc_feature: MA Experiment 20001554 PARAMETER Experiment Name: At_Drought_Soil_Dry_P Parameter: Post-Treatment Value: None
  misc_feature: MA Experiment 20001554 PARAMETER Experiment Name: At_Drought_Soil_Dry_P Parameter: Timepoint (day) Value: 7
  misc_feature: MA Experiment 20001554 PARAMETER Experiment Name: At_Drought_Soil_Dry_P Parameter: Treatment Value: Drought vs. No Drought
  misc_feature: MA Experiment ID: 20001556 Result: Up-regulated in Transcription
  misc_feature: MA Experiment 20001556 PARAMETER Experiment Name: At_Drought_Soil_Dry_P Parameter: Age (day) Value: 26
  misc_feature: MA Experiment 20001556 PARAMETER Experiment Name: At_Drought_Soil_Dry_P Parameter: Organism Value: A. thaliana
  misc_feature: MA Experiment 20001556 PARAMETER Experiment Name: At_Drought_Soil_Dry_P Parameter: Plant Line Value: WS
  misc_feature: MA Experiment 20001556 PARAMETER Experiment Name: At_Drought_Soil_Dry_P Parameter: Post Timepoint (hr) Value: None
  misc_feature: MA Experiment 20001556 PARAMETER Experiment Name: At_Drought_Soil_Dry_P Parameter: Post-Treatment Value: None
  misc_feature: MA Experiment 20001556 PARAMETER Experiment Name: At_Drought_Soil_Dry_P Parameter: Timepoint (day) Value: 12
  misc_feature: MA Experiment 20001556 PARAMETER Experiment Name: At_Drought_Soil_Dry_P Parameter: Treatment Value: Drought vs. No Drought
  misc_feature: MA Experiment ID: 20001558 Result: Down-regulated in Transcription
  misc_feature: MA Experiment 20001558 PARAMETER Experiment Name: At_Drought_Soil_Dry_P Parameter: Age (day) Value: 27
  misc_feature: MA Experiment 20001558 PARAMETER Experiment Name: At_Drought_Soil_Dry_P Parameter: Organism Value: A. thaliana
  misc_feature: MA Experiment 20001558 PARAMETER Experiment Name: At_Drought_Soil_Dry_P Parameter: Plant Line Value: WS
  misc_feature: MA Experiment 20001558 PARAMETER Experiment Name: At_Drought_Soil_Dry_P Parameter: Post Timepoint (hr) Value: 6
  misc_feature: MA Experiment 20001558 PARAMETER Experiment Name: At_Drought_Soil_Dry_P Parameter: Post-Treatment Value: Re-Water vs. No Drought
  misc_feature: MA Experiment 20001558 PARAMETER Experiment Name: At_Drought_Soil_Dry_P Parameter: Timepoint (day) Value: 13
  misc_feature: MA Experiment 20001558 PARAMETER Experiment Name: At_Drought_Soil_Dry_P Parameter: Treatment Value: Drought vs. No Drought
  misc_feature: MA Experiment ID: 20001906 Result: Down-regulated in Transcription
  misc_feature: MA Experiment 20001906 PARAMETER Experiment Name: At_Drought_Reproduction_P Parameter: Age (day) Value: 35
  misc_feature: MA Experiment 20001906 PARAMETER Experiment Name: At_Drought_Reproduction_P Parameter: Organism Value: A. thaliana
  misc_feature: MA Experiment 20001906 PARAMETER Experiment Name: At_Drought_Reproduction_P Parameter: Plant Line Value: WS
  misc_feature: MA Experiment 20001906 PARAMETER Experiment Name: At_Drought_Reproduction_P Parameter: Timepoint (day) Value: 5
  misc_feature: MA Experiment 20001906 PARAMETER Experiment Name: At_Drought_Reproduction_P Parameter: Tissue Value: Siliques
  misc_feature: MA Experiment 20001906 PARAMETER Experiment Name: At_Drought_Reproduction_P Parameter: Treatment Value: Drought vs. No Drought
  misc_feature: MA Experiment ID: 20001911 Result: Down-regulated in Transcription
  misc_feature: MA Experiment 20001911 PARAMETER Experiment Name: At_Drought_Reproduction_P Parameter: Age (day) Value: 40
  misc_feature: MA Experiment 20001911 PARAMETER Experiment Name: At_Drought_Reproduction_P Parameter: Organism Value: A. thaliana
  misc_feature: MA Experiment 20001911 PARAMETER Experiment Name: At_Drought_Reproduction_P Parameter: Plant Line Value: WS
  misc_feature: MA Experiment 20001911 PARAMETER Experiment Name: At_Drought_Reproduction_P Parameter: Timepoint (day) Value: 10
  misc_feature: MA Experiment 20001911 PARAMETER Experiment Name: At_Drought_Reproduction_P Parameter: Tissue Value: Flowers
  misc_feature: MA Experiment 20001911 PARAMETER Experiment Name: At_Drought_Reproduction_P Parameter: Treatment Value: Drought vs. No Drought
atggagactcatagaaagaactcggtcgtcggcaacatcctccacacgtgtcatccttgccggcgcaccattccatatagaatctacgccatatttcacacgtgtggcatcatagctctcatgtatcaccatgtacactcacttgtcacagcaaacaacactcttataacatgtcttcttctcctctccgatattgttctcgccttcatgtgggcaaccacaacttccctccgcttaaacccggttcatcggaccgagtgcccggagaaatatgcagctaaaccggaggactttccaaagctggacgtgtttatatgcacggctgatccgtacaaggagcctccaatgatggttgttaacaccgctttatcggtgatggcttacgagtatccgtcagataagatctcggtgtatgtatcggacgatggaggatcgtcgttgactttctttgctcttattgaagctgctaagttctctaagcagtggttgcccttttgcaagaagaataatgttcaagatcggtctcctgaagtttatttctcttcagagtcacattctcgaagtgatgaagctgaaaaccttaagacaaacatattaaaatgtgaggtggaacagatgatgtacgaagacatgaagagtagagtagaacatgtggtggagagtggaaaagttgaaactgcgtttatcacatgcgaccaatttcgtggggtattcgatttgtggaccgacaaattcagtcgtcatgaccatcccacaattattcaggtgttgcaaaatagcgagacagatatggacaataccagaaaatatataatgccaaacctaatctatgtttcaagagagaagagtaaagtttcaccacatcatttcaaagctggtgctcttaatactttgctacgagtatcaggggtgatgacaaattcaccgatcattctaacactagactgtgatatgtattcgaacgacccggcaacactggttcgtgctttgtgctatttaacagatcctgaaatcaaatccggtttaggatatgtgcagtttcctcagaaatttctaggaataagcaaaaatgatatatatgcttgtgaaaacaaacgcctcttcattattaatatggttgggtttgatggtctaatgggtccaactcatgtgggaactggttgtttctttaatcgacgagctttctatggacctccatatatgttgattttaccggagataaatgaactaaagccttatcggattgcggataagtctatcaaagcccaagatgttttgtcattagcacacaatgtagcaggatgtatctatgagtacaataccaattggggatccaagattggattcagatatgggtcattagtagaagactactacacagggtttatgctccattgtgaaggatggagatcagtattttgcaacccaaaaaaagctgcattttatggagattccccaaagtgcctagttgatcttgtgggtcaacaaatccgttgggcagttgggcttttcgaaatgtccttttcaaagtatagcccaattacctatggaatcaagtcactggaccttttaatgggtttaggttattgcaactctccgtttaagccattttggtcaattcctctgaccgtctatggacttttaccacagcttgcactcatttctggagttagtgtcttccccaaggcatctgatccgtggttttggctttacatcattttattctttggggcttatgcccaagatctatcagactttttattggaaggaggaacttatcggaaatggtggaacgatcaaagaatgttgatgataaaaggactctcttcattcttctttggttttatagagttcattctcaaaaccctaaacctctccacacctaagttcaacgtcaccagtaaagccaatgatgatgacgaacagaggaagcggtacgagcaagaaatctttgatttcggaacctcttcgtccatgttcttgcccttgaccacggttgccatagtgaatctgcttgcttttgtctgggggctttatggtattctcttctgcggaggagaactctaccttgagctgatgctggtgagcttcgcggtggtgaattgcttaccgatctacggggctatggtgttgaggaaagatgatggaaaattatcaaaaagaacttgtttcttagctgggaacctccacgttggttcttattgtgtcaagttacttcgtcctcaagtaacttcaccccttaggttaattcacaacaataatacgtctggctggttcaagcggaagaaacacaatatgaatgaatctgtgtaa

SEQ ID NO: 69852 - protein, 770 aa, Arabidopsis thaliana
  peptide (1)..(770): Ceres Seq. ID no. 1830954
  misc_feature (298)..(729): Homolog of NCBI NO: 7487588 NR Description: hypothetical protein T32A16.170 - Arabidopsis >gi|4972104|emb|CAB43900.1| putative protein [Arabidopsis >gi|7269249|emb|CAB81318.1| putative protein [Arabidopsis
  misc_feature (1)..(256): Homolog of NCBI NO: 7487588 NR Description: hypothetical protein T32A16.170 - Arabidopsis >gi|4972104|emb|CAB43900.1| putative protein [Arabidopsis >gi|7269249|emb|CAB81318.1| putative protein [Arabidopsis
  misc_feature (299)..(729): Homolog of NCBI NO: 15233649 NR Description: cellulose synthase catalytic subunit - like protein id: At4g23990.1 [Arabidopsis thaliana]
  misc_feature (1)..(256): Homolog of NCBI NO: 15233649 NR Description: cellulose synthase catalytic subunit - like protein id: At4g23990.1 [Arabidopsis thaliana]
  misc_feature (60)..(718): Homolog of NCBI NO: 16519227 NR Description: cellulose synthase-like protein OsCslE2 [Oryza
  misc_feature (1)..(264): Homolog of NCBI NO: 17380774 NR Description: unknown protein [Arabidopsis thaliana]
  misc_feature (1)..(264): Homolog of NCBI NO: 21536834 NR Description: unknown [Arabidopsis thaliana]
  misc_feature (19)..(399): Homolog of NCBI NO: 39726027 NR Description: putative cellulose synthase catalytic subunit
  misc_feature (410)..(714): Homolog of NCBI NO: 39726027 NR Description: putative cellulose synthase catalytic subunit
  misc_feature (19)..(399): Homolog of NCBI NO: 9622882 NR Description: cellulose synthase-5 [Zea mays]
METHRKNSVVGNILHTCHPCRRTIPYRIYAIFHTCGIIALMYHHVHSLVTANNTLITCLLLLSDIVLAFMWATTTSLRLNPVHRTECPEKYAAKPEDFPKLDVFICTADPYKEPPMMVVNTALSVMAYEYPSDKISVYVSDDGGSSLTFFALIEAAKFSKQWLPFCKKNNVQDRSPEVYFSSESHSRSDEAENLKTNILKCEVEQMMYEDMKSRVEHVVESGKVETAFITCDQFRGVFDLWTDKFSRHDHPTIIQVLQNSETDMDNTRKYIMPNLIYVSREKSKVSPHHFKAGALNTLLRVSGVMTNSPIILTLDCDMYSNDPATLVRALCYLTDPEIKSGLGYVQFPQKFLGISKNDIYACENKRLFIINMVGFDGLMGPTHVGTGCFFNRRAFYGPPYMLILPEINELKPYRIADKSIKAQDVLSLAHNVAGCIYEYNTNWGSKIGFRYGSLVEDYYTGFMLHCEGWRSVFCNPKKAAFYGDSPKCLVDLVGQQIRWAVGLFEMSFSKYSPITYGIKSLDLLMGLGYCNSPFKPFWSIPLTVYGLLPQLALISGVSVFPKASDPWFWLYIILFFGAYAQDLSDFLLEGGTYRKWWNDQRMLMIKGLSSFFFGFIEFILKTLNLSTPKFNVTSKANDDDEQRKRYEQEIFDFGTSSSMFLPLTTVAIVNLLAFVWGLYGILFCGGELYLELMLVSFAVVNCLPIYGAMVLRKDDGKLSKRTCFLAGNLHVGSYCVKLLRPQVTSPLRLIHNNNTSGWFKRKKHNMNESV

SEQ ID NO: 69853 - protein, 730 aa, Arabidopsis thaliana
  peptide (1)..(730): Ceres Seq. ID no. 1830955
  misc_feature (258)..(689): Homolog of NCBI NO: 7487588 NR Description: hypothetical protein T32A16.170 - Arabidopsis >gi|4972104|emb|CAB43900.1| putative protein [Arabidopsis >gi|7269249|emb|CAB81318.1| putative protein [Arabidopsis
  misc_feature (1)..(216): Homolog of NCBI NO: 7487588 NR Description: hypothetical protein T32A16.170 - Arabidopsis >gi|4972104|emb|CAB43900.1| putative protein [Arabidopsis >gi|7269249|emb|CAB81318.1| putative protein [Arabidopsis
  misc_feature (259)..(689): Homolog of NCBI NO: 15233649 NR Description: cellulose synthase catalytic subunit - like protein id: At4g23990.1 [Arabidopsis thaliana]
  misc_feature (1)..(216): Homolog of NCBI NO: 15233649 NR Description: cellulose synthase catalytic subunit - like protein id: At4g23990.1 [Arabidopsis thaliana]
  misc_feature (20)..(678): Homolog of NCBI NO: 16519227 NR Description: cellulose synthase-like protein OsCslE2 [Oryza
  misc_feature (1)..(224): Homolog of NCBI NO: 17380774 NR Description: unknown protein [Arabidopsis thaliana]
  misc_feature (1)..(224): Homolog of NCBI NO: 21536834 NR Description: unknown [Arabidopsis thaliana]
  misc_feature (1)..(359): Homolog of NCBI NO: 39726027 NR Description: putative cellulose synthase catalytic subunit
  misc_feature (370)..(674): Homolog of NCBI NO: 39726027 NR Description: putative cellulose synthase catalytic subunit
  misc_feature (1)..(359): Homolog of NCBI NO: 9622882 NR Description: cellulose synthase-5 [Zea mays]
MYHHVHSLVTANNTLITCLLLLSDIVLAFMWATTTSLRLNPVHRTECPEKYAAKPEDFPKLDVFICTADPYKEPPMMVVNTALSVMAYEYPSDKISVYVSDDGGSSLTFFALIEAAKFSKQWLPFCKKNNVQDRSPEVYFSSESHSRSDEAENLKTNILKCEVEQMMYEDMKSRVEHVVESGKVETAFITCDQFRGVFDLWTDKFSRHDHPTIIQVLQNSETDMDNTRKYIMPNLIYVSREKSKVSPHHFKAGALNTLLRVSGVMTNSPIILTLDCDMYSNDPATLVRALCYLTDPEIKSGLGYVQFPQKFLGISKNDIYACENKRLFIINMVGFDGLMGPTHVGTGCFFNRRAFYGPPYMLILPEINELKPYRIADKSIKAQDVLSLAHNVAGCIYEYNTNWGSKIGFRYGSLVEDYYTGFMLHCEGWRSVFCNPKKAAFYGDSPKCLVDLVGQQIRWAVGLFEMSFSKYSPITYGIKSLDLLMGLGYCNSPFKPFWSIPLTVYGLLPQLALISGVSVFPKASDPWFWLYIILFFGAYAQDLSDFLLEGGTYRKWWNDQRMLMIKGLSSFFFGFIEFILKTLNLSTPKFNVTSKANDDDEQRKRYEQEIFDFGTSSSMFLPLTTVAIVNLLAFVWGLYGILFCGGELYLELMLVSFAVVNCLPIYGAMVLRKDDGKLSKRTCFLAGNLHVGSYCVKLLRPQVTSPLRLIHNNNTSGWFKRKKHNMNESV

SEQ ID NO: 69854 - protein, 701 aa, Arabidopsis thaliana
  peptide (1)..(701): Ceres Seq. ID no. 1830956
  misc_feature (229)..(660): Homolog of NCBI NO: 7487588 NR Description: hypothetical protein T32A16.170 - Arabidopsis >gi|4972104|emb|CAB43900.1| putative protein [Arabidopsis >gi|7269249|emb|CAB81318.1| putative protein [Arabidopsis
  misc_feature (1)..(187): Homolog of NCBI NO: 7487588 NR Description: hypothetical protein T32A16.170 - Arabidopsis >gi|4972104|emb|CAB43900.1| putative protein [Arabidopsis >gi|7269249|emb|CAB81318.1| putative protein [Arabidopsis
  misc_feature (230)..(660): Homolog of NCBI NO: 15233649 NR Description: cellulose synthase catalytic subunit - like protein id: At4g23990.1 [Arabidopsis thaliana]
  misc_feature (1)..(187): Homolog of NCBI NO: 15233649 NR Description: cellulose synthase catalytic subunit - like protein id: At4g23990.1 [Arabidopsis thaliana]
  misc_feature (1)..(649): Homolog of NCBI NO: 16519227 NR Description: cellulose synthase-like protein OsCslE2 [Oryza
  misc_feature (1)..(195): Homolog of NCBI NO: 17380774 NR Description: unknown protein [Arabidopsis thaliana]
  misc_feature (1)..(195): Homolog of NCBI NO: 21536834 NR Description: unknown [Arabidopsis thaliana]
  misc_feature (1)..(330): Homolog of NCBI NO: 39726027 NR Description: putative cellulose synthase catalytic subunit
  misc_feature (341)..(645): Homolog of NCBI NO: 39726027 NR Description: putative cellulose synthase catalytic subunit
  misc_feature (1)..(330): Homolog of NCBI NO: 9622882 NR Description: cellulose synthase-5 [Zea mays]
MWATTTSLRLNPVHRTECPEKYAAKPEDFPKLDVFICTADPYKEPPMMVVNTALSVMAYEYPSDKISVYVSDDGGSSLTFFALIEAAKFSKQWLPFCKKNNVQDRSPEVYFSSESHSRSDEAENLKTNILKCEVEQMMYEDMKSRVEHVVESGKVETAFITCDQFRGVFDLWTDKFSRHDHPTIIQVLQNSETDMDNTRKYIMPNLIYVSREKSKVSPHHFKAGALNTLLRVSGVMTNSPIILTLDCDMYSNDPATLVRALCYLTDPEIKSGLGYVQFPQKFLGISKNDIYACENKRLFIINMVGFDGLMGPTHVGTGCFFNRRAFYGPPYMLILPEINELKPYRIADKSIKAQDVLSLAHNVAGCIYEYNTNWGSKIGFRYGSLVEDYYTGFMLHCEGWRSVFCNPKKAAFYGDSPKCLVDLVGQQIRWAVGLFEMSFSKYSPITYGIKSLDLLMGLGYCNSPFKPFWSIPLTVYGLLPQLALISGVSVFPKASDPWFWLYIILFFGAYAQDLSDFLLEGGTYRKWWNDQRMLMIKGLSSFFFGFIEFILKTLNLSTPKFNVTSKANDDDEQRKRYEQEIFDFGTSSSMFLPLTTVAIVNLLAFVWGLYGILFCGGELYLELMLVSFAVVNCLPIYGAMVLRKDDGKLSKRTCFLAGNLHVGSYCVKLLRPQVTSPLRLIHNNNTSGWFKRKKHNMNESV

SEQ ID NO: 69855 - DNA, 789 bp, Arabidopsis thaliana
  misc_feature (1)..(789): Ceres Seq. ID no. 1830981
  misc_feature: MA Experiment ID: 20000328 Result: Up-regulated in Transcription
  misc_feature: MA Experiment 20000328 PARAMETER Experiment Name: At_42deg_Heat_Sub_P Parameter: Age (day) Value: 14
  misc_feature: MA Experiment 20000328 PARAMETER Experiment Name: At_42deg_Heat_Sub_P Parameter: Organism Value: A. thaliana
  misc_feature: MA Experiment 20000328 PARAMETER Experiment Name: At_42deg_Heat_Sub_P Parameter: Plant Line Value: WS
  misc_feature: MA Experiment 20000328 PARAMETER Experiment Name: At_42deg_Heat_Sub_P Parameter: Temperature (deg C) Value: 42 vs. 22
  misc_feature: MA Experiment 20000328 PARAMETER Experiment Name: At_42deg_Heat_Sub_P Parameter: Timepoint (hr) Value: 6
  misc_feature: MA Experiment 20000328 PARAMETER Experiment Name: At_42deg_Heat_Sub_P Parameter: Tissue Value: Aerial
atgatcataacagtccttcattctcatgtctcattctatttcatcatccttagcttcctcttcttccatgctaaagcattgcatttggtaggaagtgatggtgctacaataaccatcgtaaatcgatgcagcttcaccgtgtggccgggaattttgtccaactccggaagcggcgatataggcaccaccggcttcgagctcgttcccggtggttcacgttcgttccaagctccagctagctggtcaggtcggttttgggcacgaaccggttgcaacttcaactcagacacaggacaaggcacctgcctaaccggggactgcggctctaaccaggtcgaatgtaacggtgcaggagcaaaaccgcccgctacactcgccgaattcacaatcgggtcaggtccagcagacccggcccgtaaacaagacttctacgacgtaagcctcgtggacggttacaacgttcccatgttggtggaagcaagtggcgggtcagaaggtacttgcttaaccacgggatgcgtaacggatctaaaccaaaaatgtccaacggagctccggttcgggtccgggtcagcatgcaaaagcgcgtgtgaggcttttggtagtccagaatattgttgtagtggcgcgtacgcctcacccaccgagtgtaaaccatcgatgtactcggagatattcaaatctgcgtgtccaagatcatatagctacgcgttcgacgatgctacaagtacgttcacatgcactgatgctgattacaccatcactttttgcccttccttgcctaggtag

SEQ ID NO: 69856 - protein, 262 aa, Arabidopsis thaliana
  peptide (1)..(262): Ceres Seq. ID no. 1830982
  misc_feature (41)..(258): Pfam Name: Thaumatin family Pfam Description: Thaumatin family
  misc_feature (1)..(262): Homolog of NCBI NO: 2262099 NR Description: thaumatin isolog [Arabidopsis thaliana]
  misc_feature (1)..(262): Homolog of NCBI NO: 15233738 NR Description: thaumatin-like protein; protein id: At4g24180.1
  misc_feature (20)..(261): Homolog of NCBI NO: 21592749 NR Description: putative thaumatin-like protein [Arabidopsis
  misc_feature (20)..(261): Homolog of NCBI NO: 18420282 NR Description: putative thaumatin-like protein; protein id: supported by cDNA: 32152., supported by cDNA: gi_17979354, by cDNA: gi_20466020 [Arabidopsis thaliana]
  misc_feature (29)..(261): Homolog of NCBI NO: 7442168 NR Description: pathogenesis-related protein F20M13.220 -
  misc_feature (31)..(259): Homolog of NCBI NO: 37531036 NR Description: putative thaumatin-like protein [Oryza sativa
  misc_feature (20)..(259): Homolog of NCBI NO: 15233437 NR Description: thaumatin-like protein; protein id: At4g36010.1, by cDNA: gi_13430505, supported by cDNA: gi_21280948 [Arabidopsis
  misc_feature (13)..(259): Homolog of NCBI NO: 25296204 NR Description: hypothetical protein T20H2.19 [imported] - thaliana >gi|8778995|gb|AAF79910.1|AC022472_19 Contains to SCUTL1 mRNA from Vitis vinifera gb|AF195653 and is a member of
  misc_feature (16)..(261): Homolog of NCBI NO: 37531042 NR Description: putative thaumatin-like protein [Oryza sativa
  misc_feature (36)..(259): Homolog of NCBI NO: 30686652 NR Description: thaumatin family [Arabidopsis thaliana] calreticulin, putative [Arabidopsis thaliana]
MIITVLHSHVSFYFIILSFLFFHAKALHLVGSDGATITIVNRCSFTVWPGILSNSGSGDIGTTGFELVPGGSRSFQAPASWSGRFWARTGCNFNSDTGQGTCLTGDCGSNQVECNGAGAKPPATLAEFTIGSGPADPARKQDFYDVSLVDGYNVPMLVEASGGSEGTCLTTGCVTDLNQKCPTELRFGSGSACKSACEAFGSPEYCCSGAYASPTECKPSMYSEIFKSACPRSYSYAFDDATSTFTCTDADYTITFCPSLPR

SEQ ID NO: 69857 - DNA, 1914 bp, Arabidopsis thaliana
  misc_feature (1)..(1914): Ceres Seq. ID no. 1832524
  misc_feature: MA Experiment ID: 20000185 Result: Up-regulated in Transcription
  misc_feature: MA Experiment 20000185 PARAMETER Experiment Name: At_Roots__P Parameter: Age (day) Value: 7 vs. 21
  misc_feature: MA Experiment 20000185 PARAMETER Experiment Name: At_Roots__P Parameter: Organism Value: A. thaliana
  misc_feature: MA Experiment 20000185 PARAMETER Experiment Name: At_Roots__P Parameter: Tissue Value: Roots vs. Whole Plant
  misc_feature: MA Experiment ID: 20000227 Result: Down-regulated in Transcription
  misc_feature: MA Experiment 20000227 PARAMETER Experiment Name: At_Root-Tips-vs-Tops_P Parameter: Tissue Value: Root Tips vs. Root Tops
  misc_feature: MA Experiment ID: 20000267 Result: Down-regulated in Transcription
  misc_feature: MA Experiment 20000267 PARAMETER Experiment Name: At_Drought_P Parameter: Age (day) Value: 7
  misc_feature: MA Experiment 20000267 PARAMETER Experiment Name: At_Drought_P Parameter: Organism Value: A. thaliana
  misc_feature: MA Experiment 20000267 PARAMETER Experiment Name: At_Drought_P Parameter: Plant Line Value: WS
  misc_feature: MA Experiment 20000267 PARAMETER Experiment Name: At_Drought_P Parameter: Timepoint (hr) Value: 6
  misc_feature: MA Experiment 20000267 PARAMETER Experiment Name: At_Drought_P Parameter: Tissue Value: Whole Plant
  misc_feature: MA Experiment 20000267 PARAMETER Experiment Name: At_Drought_P Parameter: Treatment Value: Drought vs. No Drought
  misc_feature: MA Experiment ID: 20000439 Result: Up-regulated in Transcription
  misc_feature: MA Experiment 20000439 PARAMETER Experiment Name: At_Roots__P Parameter: Age (day) Value: 14 vs. 21
  misc_feature: MA Experiment 20000439 PARAMETER Experiment Name: At_Roots__P Parameter: Organism Value: A. thaliana
  misc_feature: MA Experiment 20000439 PARAMETER Experiment Name: At_Roots__P Parameter: Tissue Value: Roots vs. Whole Plant
  misc_feature: MA Experiment ID: 20000460 Result: Down-regulated in Transcription
  misc_feature: MA Experiment 20000460 PARAMETER Experiment Name: At_10percent_PEG_P Parameter: Age (day) Value: 12
  misc_feature: MA Experiment 20000460 PARAMETER Experiment Name: At_10percent_PEG_P Parameter: Organism Value: A. thaliana
  misc_feature: MA Experiment 20000460 PARAMETER Experiment Name: At_10percent_PEG_P Parameter: Plant Line Value: WS
  misc_feature: MA Experiment 20000460 PARAMETER Experiment Name: At_10percent_PEG_P Parameter: Timepoint (day) Value: 12
  misc_feature: MA Experiment 20000460 PARAMETER Experiment Name: At_10percent_PEG_P Parameter: Tissue Value: Whole Plant
  misc_feature: MA Experiment 20000460 PARAMETER Experiment Name: At_10percent_PEG_P Parameter: Treatment Value: 10percent PEG vs. No Treatment
atgtcgaaaaaaccgaagtctgttcatttctctacctcttctcctaaatcattcctttcttcttttccttcattcacttctctcccggcttctcctctcaaccagactttttctcagtcgatgatggaggaaaccgttgaggccgcagaatcaatcatcaagaaatgggatccgaactcaccatcctacacaaagatcatctctctgtttagtcatagcagaagagaggccaaagaattcatcagatgcatccgtgacttacgcagagccatgcactttcttatctctcagcactcaaaatctgccaagctagttcttgcacagcacctgatgcagattgctatggccaggctcgaaaaagagttcttccagattctgtcttcaaaccgagaccaacttgatcctgaatctgtctctggtcactcctccatttcaagcaattcagaatttgaagatgttatgcaatcttctgatgatgaagaagaagatgagctgaagaaggctggtgaaacgatcactaaggtcgaaaaagctgcagcacttgtgatgtcagacctcaaggtcatagcagagactatgatcagctgtggatatggtaaagagtgcataaagagctataagttgatcagaaagtcaattgtagatgaagggctacacttacttggtatcgaaaagtgcaagatctcccggttcaacagaatggactgggacgtgctcgagcatatgatcaagaactggatcaaagctgcaaagattggtgtcataacactcctccgcggagagaaacttctatgtgatcatgtcttctctgcttcaagtacaataagagagtcttgcttttacgagatagtgaacgaagcaggaatcaatcttttcaagttcccagaactcgttgcggagaaaaaaccatcgccagagaggatcttcaggctgatggatctctatgcagcaatctctgaccttagaccagacatagaactgatattccactttgactcagtagctgctgttaaaactctggtcctctcatcgctgaagaaactcaaggactcaatctacacaagtctcatggaatttgagtcaacaatacaaaaggattcttctaaagcactaactgcaggaggagggattcacaagctgactagatcaaccatgagtttcatatcatctctttctgaatacagccgtgtgttatcagagattcttgcagagcatccacttaagaaaaacacacgtatgctagaatcttatttcacagctccaatcttagaagatgaacacaacaaccacgcagtctcggtccatctagcttggctcatcttgattttcctatgcaaactagacatcaaagcagagagttacaaggatgtttccctctcttacctcttcctagtgaacaacattcagtttgtggttgataccgttcgttcaacacacctcaggaacctcctcggagacgactggctcacaaagcacgaagcaaaactcagaagctacgctgcaaactatgagatcgcagcgtgggccaatgtatacatatctttaccagagaaaacaagtagcagactatcaccagaggaagccaaaacacatttcaagaggtttcacgcggtattcgaagaagcttatatgaaacaatcatcatgtgtgataacagatgcaaaacttaggaacgagctaaaagtttccatagcaaagaaaatagtaccggaatacagagagttttacggtaagtacttgccaacgctgagtaaggagagaaacatagagatgctggtgagctttaagcctgataacttggagaactatctctcggatttgttccatggaacaccaatacttagtggctcttcttcttcttcttcctctttgtcttcttcatcttgtatctcacttggatgtgtaagaaactaa

SEQ ID NO: 69858 - protein, 637 aa, Arabidopsis thaliana
  peptide (1)..(637): Ceres Seq. ID no. 1832525
  misc_feature (34)..(609): Pfam Name: Exo70 exocyst complex subunit Pfam Description: Exo70 exocyst complex subunit
  misc_feature (1)..(635): Homolog of NCBI NO: 22331801 NR Description: putative protein; protein id: At3g55150.1, by cDNA: gi_18377617, supported by cDNA: gi_20465378 [Arabidopsis >gi|18377618|gb|AAL66959.1| unknown protein [Arabidopsis
  misc_feature (10)..(635): Homolog of NCBI NO: 11278980 NR Description: hypothetical protein T26I12.30 - Arabidopsis >gi|7019648|emb|CAB75749.1| putative protein [Arabidopsis
  misc_feature (20)..(631): Homolog of NCBI NO: 15232697 NR Description: hypothetical protein; protein id: At3g09520.1 thaliana] >gi|6682261|gb|AAF23313.1|AC016661_38 hypothetical
  misc_feature (29)..(628): Homolog of NCBI NO: 23397263 NR Description: unknown protein [Arabidopsis thaliana]
  misc_feature (29)..(628): Homolog of NCBI NO: 15238510 NR Description: putative protein; protein id: At5g59730.1, by cDNA: gi_13430533, supported by cDNA: gi_14334437, supported cDNA: gi_15010739, supported by cDNA: gi_16974428, supported by
  misc_feature (17)..(613): Homolog of NCBI NO: 15232699 NR Description: hypothetical protein; protein id: At3g09530.1 thaliana] >gi|6682232|gb|AAF23284.1|AC016661_9 hypothetical
  misc_feature (29)..(569): Homolog of NCBI NO: 23397289 NR Description: unknown protein [Arabidopsis thaliana]
  misc_feature (35)..(628): Homolog of NCBI NO: 15226917 NR Description: unknown protein; protein id: At2g28640.1
  misc_feature (35)..(610): Homolog of NCBI NO: 25308573 NR Description: hypothetical protein [imported] - Arabidopsis >gi|8439895|gb|AAF75081.1|AC007583_17 It contains a interferon domain PF|00143. EST gb|N96176 comes from this gene. [Arabidopsis
  misc_feature (94)..(617): Homolog of NCBI NO: 100226 NR Description: tomato leucine zipper-containing protein - tomato protein of unknown function [Lycopersicon esculentum]
MSKKPKSVHFSTSSPKSFLSSFPSFTSLPASPLNQTFSQSMMEETVEAAESIIKKWDPNSPSYTKIISLFSHSRREAKEFIRCIRDLRRAMHFLISQHSKSAKLVLAQHLMQIAMARLEKEFFQILSSNRDQLDPESVSGHSSISSNSEFEDVMQSSDDEEEDELKKAGETITKVEKAAALVMSDLKVIAETMISCGYGKECIKSYKLIRKSIVDEGLHLLGIEKCKISRFNRMDWDVLEHMIKNWIKAAKIGVITLLRGEKLLCDHVFSASSTIRESCFYEIVNEAGINLFKFPELVAEKKPSPERIFRLMDLYAAISDLRPDIELIFHFDSVAAVKTLVLSSLKKLKDSIYTSLMEFESTIQKDSSKALTAGGGIHKLTRSTMSFISSLSEYSRVLSEILAEHPLKKNTRMLESYFTAPILEDEHNNHAVSVHLAWLILIFLCKLDIKAESYKDVSLSYLFLVNNIQFVVDTVRSTHLRNLLGDDWLTKHEAKLRSYAANYEIAAWANVYISLPEKTSSRLSPEEAKTHFKRFHAVFEEAYMKQSSCVITDAKLRNELKVSIAKKIVPEYREFYGKYLPTLSKERNIEMLVSFKPDNLENYLSDLFHGTPILSGSSSSSSSLSSSSCISLGCVRN

SEQ ID NO: 69859 - protein, 597 aa, Arabidopsis thaliana
  peptide (1)..(597): Ceres Seq. ID no. 1832526
  misc_feature (1)..(569): Pfam Name: Exo70 exocyst complex subunit Pfam Description: Exo70 exocyst complex subunit
  misc_feature (1)..(595): Homolog of NCBI NO: 22331801 NR Description: putative protein; protein id: At3g55150.1, by cDNA: gi_18377617, supported by cDNA: gi_20465378 [Arabidopsis >gi|18377618|gb|AAL66959.1| unknown protein [Arabidopsis
  misc_feature (1)..(595): Homolog of NCBI NO: 11278980 NR Description: hypothetical protein T26I12.30 - Arabidopsis >gi|7019648|emb|CAB75749.1| putative protein [Arabidopsis
  misc_feature (1)..(591): Homolog of NCBI NO: 15232697 NR Description: hypothetical protein; protein id: At3g09520.1 thaliana] >gi|6682261|gb|AAF23313.1|AC016661_38 hypothetical
  misc_feature (1)..(588): Homolog of NCBI NO: 23397263 NR Description: unknown protein [Arabidopsis thaliana]
  misc_feature (1)..(588): Homolog of NCBI NO: 15238510 NR Description: putative protein; protein id: At5g59730.1, by cDNA: gi_13430533, supported by cDNA: gi_14334437, supported cDNA: gi_15010739, supported by cDNA: gi_16974428, supported by
  misc_feature (1)..(573): Homolog of NCBI NO: 15232699 NR Description: hypothetical protein; protein id: At3g09530.1 thaliana] >gi|6682232|gb|AAF23284.1|AC016661_9 hypothetical
  misc_feature (1)..(529): Homolog of NCBI NO: 23397289 NR Description: unknown protein [Arabidopsis thaliana]
  misc_feature (1)..(588): Homolog of NCBI NO: 15226917 NR Description: unknown protein; protein id: At2g28640.1
  misc_feature (1)..(570): Homolog of NCBI NO: 25308573 NR Description: hypothetical protein [imported] - Arabidopsis >gi|8439895|gb|AAF75081.1|AC007583_17 It contains a interferon domain PF|00143. EST gb|N96176 comes from this gene. [Arabidopsis
  misc_feature (54)..(577): Homolog of NCBI NO: 100226 NR Description: tomato leucine zipper-containing protein - tomato protein of unknown function [Lycopersicon esculentum]
MMEETVEAAESIIKKWDPNSPSYTKIISLFSHSRREAKEFIRCIRDLRRAMHFLISQHSKSAKLVLAQHLMQIAMARLEKEFFQILSSNRDQLDPESVSGHSSISSNSEFEDVMQSSDDEEEDELKKAGETITKVEKAAALVMSDLKVIAETMISCGYGKECIKSYKLIRKSIVDEGLHLLGIEKCKISRFNRMDWDVLEHMIKNWIKAAKIGVITLLRGEKLLCDHVFSASSTIRESCFYEIVNEAGINLFKFPELVAEKKPSPERIFRLMDLYAAISDLRPDIELIFHFDSVAAVKTLVLSSLKKLKDSIYTSLMEFESTIQKDSSKALTAGGGIHKLTRSTMSFISSLSEYSRVLSEILAEHPLKKNTRMLESYFTAPILEDEHNNHAVSVHLAWLILIFLCKLDIKAESYKDVSLSYLFLVNNIQFVVDTVRSTHLRNLLGDDWLTKHEAKLRSYAANYEIAAWANVYISLPEKTSSRLSPEEAKTHFKRFHAVFEEAYMKQSSCVITDAKLRNELKVSIAKKIVPEYREFYGKYLPTLSKERNIEMLVSFKPDNLENYLSDLFHGTPILSGSSSSSSSLSSSSCISLGCVRN

SEQ ID NO: 69860 - protein, 596 aa, Arabidopsis thaliana
  peptide (1)..(596): Ceres Seq. ID no. 1832527
  misc_feature (1)..(568): Pfam Name: Exo70 exocyst complex subunit Pfam Description: Exo70 exocyst complex subunit
  misc_feature (1)..(594): Homolog of NCBI NO: 22331801 NR Description: putative protein; protein id: At3g55150.1, by cDNA: gi_18377617, supported by cDNA: gi_20465378 [Arabidopsis >gi|18377618|gb|AAL66959.1| unknown protein [Arabidopsis
  misc_feature (1)..(594): Homolog of NCBI NO: 11278980 NR Description: hypothetical protein T26I12.30 - Arabidopsis >gi|7019648|emb|CAB75749.1| putative protein [Arabidopsis
  misc_feature (1)..(590): Homolog of NCBI NO: 15232697 NR Description: hypothetical protein; protein id: At3g09520.1 thaliana] >gi|6682261|gb|AAF23313.1|AC016661_38 hypothetical
  misc_feature (1)..(587): Homolog of NCBI NO: 23397263 NR Description: unknown protein [Arabidopsis thaliana]
  misc_feature (1)..(587): Homolog of NCBI NO: 15238510 NR Description: putative protein; protein id: At5g59730.1, by cDNA: gi_13430533, supported by cDNA: gi_14334437, supported cDNA: gi_15010739, supported by cDNA: gi_16974428, supported by
  misc_feature (1)..(572): Homolog of NCBI NO: 15232699 NR Description: hypothetical protein; protein id: At3g09530.1 thaliana] >gi|6682232|gb|AAF23284.1|AC016661_9 hypothetical
  misc_feature (1)..(528): Homolog of NCBI NO: 23397289 NR Description: unknown protein [Arabidopsis thaliana]
  misc_feature (1)..(587): Homolog of NCBI NO: 15226917 NR Description: unknown protein; protein id: At2g28640.1
  misc_feature (1)..(569): Homolog of NCBI NO: 25308573 NR Description: hypothetical protein [imported] - Arabidopsis >gi|8439895|gb|AAF75081.1|AC007583_17 It contains a interferon domain PF|00143. EST gb|N96176 comes from this gene. [Arabidopsis
  misc_feature (53)..(576): Homolog of NCBI NO: 100226 NR Description: tomato leucine zipper-containing protein - tomato protein of unknown function [Lycopersicon esculentum]
MEETVEAAESIIKKWDPNSPSYTKIISLFSHSRREAKEFIRCIRDLRRAMHFLISQHSKSAKLVLAQHLMQIAMARLEKEFFQILSSNRDQLDPESVSGHSSISSNSEFEDVMQSSDDEEEDELKKAGETITKVEKAAALVMSDLKVIAETMISCGYGKECIKSYKLIRKSIVDEGLHLLGIEKCKISRFNRMDWDVLEHMIKNWIKAAKIGVITLLRGEKLLCDHVFSASSTIRESCFYEIVNEAGINLFKFPELVAEKKPSPERIFRLMDLYAAISDLRPDIELIFHFDSVAAVKTLVLSSLKKLKDSIYTSLMEFESTIQKDSSKALTAGGGIHKLTRSTMSFISSLSEYSRVLSEILAEHPLKKNTRMLESYFTAPILEDEHNNHAVSVHLAWLILIFLCKLDIKAESYKDVSLSYLFLVNNIQFVVDTVRSTHLRNLLGDDWLTKHEAKLRSYAANYEIAAWANVYISLPEKTSSRLSPEEAKTHFKRFHAVFEEAYMKQSSCVITDAKLRNELKVSIAKKIVPEYREFYGKYLPTLSKERNIEMLVSFKPDNLENYLSDLFHGTPILSGSSSSSSSLSSSSCISLGCVRN

SEQ ID NO: 69861 - DNA, 891 bp, Arabidopsis thaliana
  misc_feature (1)..(891): Ceres Seq. ID no. 1841049
  misc_feature: MA Experiment ID: 20000307 Result: Up-regulated in Transcription
  misc_feature: MA Experiment 20000307 PARAMETER Experiment Name: At_Germinating_Seeds_Sub_P Parameter: Age (hr) Value: 24 vs. 0
  misc_feature: MA Experiment 20000307 PARAMETER Experiment Name: At_Germinating_Seeds_Sub_P Parameter: Organism Value: A. thaliana
  misc_feature: MA Experiment 20000307 PARAMETER Experiment Name: At_Germinating_Seeds_Sub_P Parameter: Plant Line Value: WS
  misc_feature: MA Experiment 20000307 PARAMETER Experiment Name: At_Germinating_Seeds_Sub_P Parameter: Tissue Value: Germinating Seeds
  misc_feature: MA Experiment ID: 20000314 Result: Up-regulated in Transcription
  misc_feature: MA Experiment 20000314 PARAMETER Experiment Name: At_14day_Shoots-Roots_Sub_P Parameter: Age (day) Value: 14
  misc_feature: MA Experiment 20000314 PARAMETER Experiment Name: At_14day_Shoots-Roots_Sub_P Parameter: Organism Value: A. thaliana
  misc_feature: MA Experiment 20000314 PARAMETER Experiment Name: At_14day_Shoots-Roots_Sub_P Parameter: Plant Line Value: WS
  misc_feature: MA Experiment 20000314 PARAMETER Experiment Name: At_14day_Shoots-Roots_Sub_P Parameter: Tissue Value: Roots vs. Whole Plant
atgcctatagctatcaataccgagacggcaaagactcaacactatgaattaccaacagctttcttcgaacatgctcttggaagaaacatcaaatacagctgttgttactattcaaacgattcaagtagcttagaagaggcaggggaagctatgttggctctttcttgtgaaagagctaaagtggaagatggtcaaagtgttcttgatatcggatgtggctggggatctttgactttgtacattgcacgcaagtacagcaaatgcaagttaaccggtatctgcaactccaaaacgcagaaagcatttatcgatgagaaatgccggaaactcgggcttcagaatgtcgaaatcattgctgcggatattagcacttttgagcatgaagggacatacgatcggatattctccatcgaaatgttcgagcatatgaaaaactatggagagctactgaagaagataggaaactggatgaaggaagatagtcttctgtttgttcactatctctgccataagacatatgcttaccactttgaggatgtgaatgacgatgactggatcacaagacacttcttcagcggaggaacaatgccatcagcagatcttctcctatatttccaagtaatatacattataacttgtgaaaatgtttcgattatggatcattggctcgttaacgggacgcattatgcaaagacaagtgaagagtggctgaaaggaatggataaggagatagttgccgtaaaagagataatggaagtgacttatgggaaagaagaagcagtgaagtggacggtttactggagaaccttcttcatcgcgcttgctgagcttttcgcatacaacaatggagacgagtggatgattgcacacttcctcttcaagaagaaatga

SEQ ID NO: 69862 - protein, 296 aa, Arabidopsis thaliana
  peptide (1)..(296): Ceres Seq. ID no. 1841050
  misc_feature (118)..(295): Pfam Name: Cyclopropane-fatty-acyl-phospholipid synthase Pfam Description: Cyclopropane-fatty-acyl-phospholipid synthase
  misc_feature (3)..(296): Homolog of NCBI NO: 21242125 NR Description: conserved hypothetical protein [Xanthomonas pv. citri str. 306] >gi|21107536|gb|AAM36243.1| conserved
  misc_feature (2)..(295): Homolog of NCBI NO: 39997416 NR Description: cyclopropane-fatty-acyl-phospholipid synthase,
  misc_feature (1)..(296): Homolog of NCBI NO: 30689611 NR Description: expressed protein [Arabidopsis thaliana]
  misc_feature (1)..(296): Homolog of NCBI NO: 18418151 NR Description: putative protein; protein id: At4g33110.1, by cDNA: 4369. [Arabidopsis thaliana] >gi|22531140|gb|AAM97074.1|
  misc_feature (1)..(296): Homolog of NCBI NO: 16754879 NR Description: coclaurine N-methyltransferase [Coptis japonica]
  misc_feature (1)..(296): Homolog of NCBI NO: 33413898 NR Description: S-adenosyl-L-methionine:coclaurine
  misc_feature (1)..(296): Homolog of NCBI NO: 26451688 NR Description: unknown protein [Arabidopsis thaliana]
  misc_feature (1)..(296): Homolog of NCBI NO: 21593795 NR Description: coclaurine N-methyltransferase [Arabidopsis
  misc_feature (1)..(296): Homolog of NCBI NO: 7486450 NR Description: hypothetical protein F4I10.50 - Arabidopsis >gi|4455326|emb|CAB36786.1| putative protein [Arabidopsis >gi|7270259|emb|CAB80029.1| putative protein [Arabidopsis
  misc_feature (3)..(296): Homolog of NCBI NO: 21230783 NR Description: conserved hypothetical protein [Xanthomonas pv. campestris str. ATCC 33913] >gi|21112382|gb|AAM40624.1| hypothetical protein [Xanthomonas campestris pv. campestris str.
MPIAINTETAKTQHYELPTAFFEHALGRNIKYSCCYYSNDSSSLEEAGEAMLALSCERAKVEDGQSVLDIGCGWGSLTLYIARKYSKCKLTGICNSKTQKAFIDEKCRKLGLQNVEIIAADISTFEHEGTYDRIFSIEMFEHMKNYGELLKKIGNWMKEDSLLFVHYLCHKTYAYHFEDVNDDDWITRHFFSGGTMPSADLLLYFQVIYIITCENVSIMDHWLVNGTHYAKTSEEWLKGMDKEIVAVKEIMEVTYGKEEAVKWTVYWRTFFIALAELFAYNNGDEWMIAHFLFKKK

SEQ ID NO: 69863 - protein, 246 aa, Arabidopsis thaliana
  peptide (1)..(246): Ceres Seq. ID no. 1841051
  misc_feature (68)..(245): Pfam Name: Cyclopropane-fatty-acyl-phospholipid synthase Pfam Description: Cyclopropane-fatty-acyl-phospholipid synthase
  misc_feature (1)..(246): Homolog of NCBI NO: 7486450 NR Description: hypothetical protein F4I10.50 - Arabidopsis >gi|4455326|emb|CAB36786.1| putative protein [Arabidopsis >gi|7270259|emb|CAB80029.1| putative protein [Arabidopsis
  misc_feature (1)..(246): Homolog of NCBI NO: 30689611 NR Description: expressed protein [Arabidopsis thaliana]
  misc_feature (1)..(246): Homolog of NCBI NO: 21593795 NR Description: coclaurine N-methyltransferase [Arabidopsis
  misc_feature (1)..(246): Homolog of NCBI NO: 18418151 NR Description: putative protein; protein id: At4g33110.1, by cDNA: 4369. [Arabidopsis thaliana] >gi|22531140|gb|AAM97074.1|
  misc_feature (1)..(246): Homolog of NCBI NO: 26451688 NR Description: unknown protein [Arabidopsis thaliana]
  misc_feature (1)..(246): Homolog of NCBI NO: 16754879 NR Description: coclaurine N-methyltransferase [Coptis japonica]
  misc_feature (1)..(246): Homolog of NCBI NO: 33413898 NR Description: S-adenosyl-L-methionine:coclaurine
  misc_feature (1)..(246): Homolog of NCBI NO: 21242125 NR Description: conserved hypothetical protein [Xanthomonas pv. citri str. 306] >gi|21107536|gb|AAM36243.1| conserved
  misc_feature (1)..(245): Homolog of NCBI NO: 39997416 NR Description: cyclopropane-fatty-acyl-phospholipid synthase,
  misc_feature (1)..(246): Homolog of NCBI NO: 21230783 NR Description: conserved hypothetical protein [Xanthomonas pv. campestris str. ATCC 33913] >gi|21112382|gb|AAM40624.1| hypothetical protein [Xanthomonas campestris pv. campestris str.
MLALSCERAKVEDGQSVLDIGCGWGSLTLYIARKYSKCKLTGICNSKTQKAFIDEKCRKLGLQNVEIIAADISTFEHEGTYDRIFSIEMFEHMKNYGELLKKIGNWMKEDSLLFVHYLCHKTYAYHFEDVNDDDWITRHFFSGGTMPSADLLLYFQVIYIITCENVSIMDHWLVNGTHYAKTSEEWLKGMDKEIVAVKEIMEVTYGKEEAVKWTVYWRTFFIALAELFAYNNGDEWMIAHFLFKKK

SEQ ID NO: 69864 - protein, 158 aa, Arabidopsis thaliana
  peptide (1)..(158): Ceres Seq. ID no. 1841052
  misc_feature (1)..(157): Pfam Name: Cyclopropane-fatty-acyl-phospholipid synthase Pfam Description: Cyclopropane-fatty-acyl-phospholipid synthase
  misc_feature (1)..(158): Homolog of NCBI NO: 7486450 NR Description: hypothetical protein F4I10.50 - Arabidopsis >gi|4455326|emb|CAB36786.1| putative protein [Arabidopsis >gi|7270259|emb|CAB80029.1| putative protein [Arabidopsis
  misc_feature (1)..(158): Homolog of NCBI NO: 30689611 NR Description: expressed protein [Arabidopsis thaliana]
  misc_feature (1)..(158): Homolog of NCBI NO: 21593795 NR Description: coclaurine N-methyltransferase [Arabidopsis
  misc_feature (1)..(158): Homolog of NCBI NO: 18418151 NR Description: putative protein; protein id: At4g33110.1, by cDNA: 4369. [Arabidopsis thaliana] >gi|22531140|gb|AAM97074.1|
  misc_feature (1)..(158): Homolog of NCBI NO: 26451688 NR Description: unknown protein [Arabidopsis thaliana]
  misc_feature (1)..(158): Homolog of NCBI NO: 16754879 NR Description: coclaurine N-methyltransferase [Coptis japonica]
  misc_feature (1)..(158): Homolog of NCBI NO: 33413898 NR Description: S-adenosyl-L-methionine:coclaurine
  misc_feature (1)..(158): Homolog of NCBI NO: 21242125 NR Description: conserved hypothetical protein [Xanthomonas pv. citri str. 306] >gi|21107536|gb|AAM36243.1| conserved
  misc_feature (1)..(157): Homolog of NCBI NO: 39997416 NR Description: cyclopropane-fatty-acyl-phospholipid synthase,
  misc_feature (1)..(158): Homolog of NCBI NO: 21230783 NR Description: conserved hypothetical protein [Xanthomonas pv. campestris str. ATCC 33913] >gi|21112382|gb|AAM40624.1| hypothetical protein [Xanthomonas campestris pv. campestris str.
MFEHMKNYGELLKKIGNWMKEDSLLFVHYLCHKTYAYHFEDVNDDDWITRHFFSGGTMPSADLLLYFQVIYIITCENVSIMDHWLVNGTHYAKTSEEWLKGMDKEIVAVKEIMEVTYGKEEAVKWTVYWRTFFIALAELFAYNNGDEWMIAHFLFKKK

SEQ ID NO: 69865 - DNA, 1056 bp, Arabidopsis thaliana
  misc_feature (1)..(1056): Ceres Seq. ID no. 1843013
  misc_feature: MA Experiment ID: 20000182 Result: Down-regulated in Transcription
  misc_feature: MA Experiment 20000182 PARAMETER Experiment Name: At_2mM_SA_P Parameter: Age (day) Value: 14
  misc_feature: MA Experiment 20000182 PARAMETER Experiment Name: At_2mM_SA_P Parameter: Organism Value: A. thaliana
  misc_feature: MA Experiment 20000182 PARAMETER Experiment Name: At_2mM_SA_P Parameter: Plant Line Value: WS
  misc_feature: MA Experiment 20000182 PARAMETER Experiment Name: At_2mM_SA_P Parameter: Timepoint (hr) Value: 6
  misc_feature: MA Experiment 20000182 PARAMETER Experiment Name: At_2mM_SA_P Parameter: Tissue Value: Aerial
  misc_feature: MA Experiment 20000182 PARAMETER Experiment Name: At_2mM_SA_P Parameter: Treatment Value: 2mM SA vs. No Treatment
  misc_feature: MA Experiment ID: 20000185 Result: Down-regulated in Transcription
  misc_feature: MA Experiment 20000185 PARAMETER Experiment Name: At_Roots__P Parameter: Age (day) Value: 7 vs. 21
  misc_feature: MA Experiment 20000185 PARAMETER Experiment Name: At_Roots__P Parameter: Organism Value: A. thaliana
  misc_feature: MA Experiment 20000185 PARAMETER Experiment Name: At_Roots__P Parameter: Tissue Value: Roots vs. Whole Plant
  misc_feature: MA Experiment ID: 20000234 Result: Up-regulated in Transcription
  misc_feature: MA Experiment 20000234 PARAMETER Experiment Name: At_Siliques_P Parameter: Age (day) Value: 21
  misc_feature: MA Experiment 20000234 PARAMETER Experiment Name: At_Siliques_P Parameter: Organism Value: A. thaliana
  misc_feature: MA Experiment 20000234 PARAMETER Experiment Name: At_Siliques_P Parameter: Plant Line Value: WS
  misc_feature: MA Experiment 20000234 PARAMETER Experiment Name: At_Siliques_P Parameter: Tissue Value: Less Than 5mm Siliques vs. Whole Plant
  misc_feature: MA Experiment ID: 20000235 Result: Up-regulated in Transcription
  misc_feature: MA Experiment 20000235 PARAMETER Experiment Name: At_Siliques_P Parameter: Age (day) Value: 21
  misc_feature: MA Experiment 20000235 PARAMETER Experiment Name: At_Siliques_P Parameter: Organism Value: A. thaliana
  misc_feature: MA Experiment 20000235 PARAMETER Experiment Name: At_Siliques_P Parameter: Plant Line Value: WS
  misc_feature: MA Experiment 20000235 PARAMETER Experiment Name: At_Siliques_P Parameter: Tissue Value: 5-10mm Siliques vs. Whole Plant
  misc_feature: MA Experiment ID: 20000265 Result: Up-regulated in Transcription
  misc_feature: MA Experiment 20000265 PARAMETER Experiment Name: At_Open_Flower_P Parameter: Age (day) Value: 21
  misc_feature: MA Experiment 20000265 PARAMETER Experiment Name: At_Open_Flower_P Parameter: Plant Line Value: WS
  misc_feature: MA Experiment 20000265 PARAMETER Experiment Name: At_Open_Flower_P Parameter: Tissue Value: Closed Flower vs. Whole Plant
  misc_feature: MA Experiment ID: 20000286 Result: Up-regulated in Transcription
  misc_feature: MA Experiment 20000286 PARAMETER Experiment Name: At_Open_Flower_P Parameter: Age (day) Value: 21
  misc_feature: MA Experiment 20000286 PARAMETER Experiment Name: At_Open_Flower_P Parameter: Plant Line Value: WS
  misc_feature: MA Experiment 20000286 PARAMETER Experiment Name: At_Open_Flower_P Parameter: Tissue Value: Half Open vs. Whole Plant
  misc_feature: MA Experiment ID: 20000308 Result: Up-regulated in Transcription
  misc_feature: MA Experiment 20000308 PARAMETER Experiment Name: At_100mM_NaCl__P Parameter: Age (day) Value: 17
  misc_feature: MA Experiment 20000308 PARAMETER Experiment Name: At_100mM_NaCl__P Parameter: Organism Value: A. thaliana
  misc_feature: MA Experiment 20000308 PARAMETER Experiment Name: At_100mM_NaCl__P Parameter: Plant Line Value: WS
  misc_feature: MA Experiment 20000308 PARAMETER Experiment Name: At_100mM_NaCl__P Parameter: Timepoint (hr) Value: 72
  misc_feature: MA Experiment 20000308 PARAMETER Experiment Name: At_100mM_NaCl__P Parameter: Tissue Value: Whole Plant
  misc_feature: MA Experiment 20000308 PARAMETER Experiment Name: At_100mM_NaCl__P Parameter: Treatment Value: 100mM NaCl vs. No Treatment
  misc_feature: MA Experiment ID: 20000437 Result: Down-regulated in Transcription
  misc_feature: MA Experiment 20000437 PARAMETER Experiment Name: At_Drought_P Parameter: Age (day) Value: 8
  misc_feature: MA Experiment 20000437 PARAMETER Experiment Name: At_Drought_P Parameter: Organism Value: A. thaliana
  misc_feature: MA Experiment 20000437 PARAMETER Experiment Name: At_Drought_P Parameter: Plant Line Value: WS
  misc_feature: MA Experiment 20000437 PARAMETER Experiment Name: At_Drought_P Parameter: Timepoint (hr) Value: 24
  misc_feature: MA Experiment 20000437 PARAMETER Experiment Name: At_Drought_P Parameter: Tissue Value: Whole Plant
  misc_feature: MA Experiment 20000437 PARAMETER Experiment Name: At_Drought_P Parameter: Treatment Value: Drought vs. No Drought
  misc_feature: MA Experiment ID: 20000438 Result: Down-regulated in Transcription
  misc_feature: MA Experiment 20000438 PARAMETER Experiment Name: At_Shoots__P Parameter: Age (day) Value: 14
  misc_feature: MA Experiment 20000438 PARAMETER Experiment Name: At_Shoots__P Parameter: Tissue Value: Shoots vs. Whole Plant
  misc_feature: MA Experiment ID: 20000439 Result: Down-regulated in Transcription
  misc_feature: MA Experiment 20000439 PARAMETER Experiment Name: At_Roots__P Parameter: Age (day) Value: 14 vs. 21
  misc_feature: MA Experiment 20000439 PARAMETER Experiment Name: At_Roots__P Parameter: Organism Value: A. thaliana
  misc_feature: MA Experiment 20000439 PARAMETER Experiment Name: At_Roots__P Parameter: Tissue Value: Roots vs. Whole Plant
  misc_feature: MA Experiment ID: 20000441 Result: Down-regulated in Transcription
  misc_feature: MA Experiment 20000441 PARAMETER Experiment Name: At_1uM_BR-BRZ__P Parameter: Tissue Value: Shoot Apices
  misc_feature: MA Experiment 20000441 PARAMETER Experiment Name: At_1uM_BR-BRZ__P Parameter: Treatment Value: 1uM BR vs. No Treatment
  misc_feature: MA Experiment ID: 20000443 Result: Down-regulated in Transcription
  misc_feature: MA Experiment 20000443 PARAMETER Experiment Name: At_1uM_BR-BRZ__P Parameter: Tissue Value: Shoot Apices
  misc_feature: MA Experiment 20000443 PARAMETER Experiment Name: At_1uM_BR-BRZ__P Parameter: Treatment Value: 1uM BRZ vs. No Treatment
  misc_feature: MA Experiment ID: 20000453 Result: Up-regulated in Transcription
  misc_feature: MA Experiment 20000453 PARAMETER Experiment Name: At_100uM_ABA_P Parameter: Age (day) Value: 15
  misc_feature: MA Experiment 20000453 PARAMETER Experiment Name: At_100uM_ABA_P Parameter: Organism Value: A. thaliana
  misc_feature: MA Experiment 20000453 PARAMETER Experiment Name: At_100uM_ABA_P Parameter: Plant Line Value: WS
  misc_feature: MA Experiment 20000453 PARAMETER Experiment Name: At_100uM_ABA_P Parameter: Timepoint (hr) Value: 24
  misc_feature: MA Experiment 20000453 PARAMETER Experiment Name: At_100uM_ABA_P Parameter: Tissue Value: Aerial
  misc_feature: MA Experiment 20000453 PARAMETER Experiment Name: At_100uM_ABA_P Parameter: Treatment Value: 100uM ABA vs. No Treatment
  misc_feature: MA Experiment ID: 20000455 Result: Up-regulated in Transcription
  misc_feature: MA Experiment 20000455 PARAMETER Experiment Name: At_100uM_ABA_P Parameter: Age (day) Value: 16
  misc_feature: MA Experiment 20000455 PARAMETER Experiment Name: At_100uM_ABA_P Parameter: Organism Value: A. thaliana
  misc_feature: MA Experiment 20000455 PARAMETER Experiment Name: At_100uM_ABA_P Parameter: Plant Line Value: WS
  misc_feature: MA Experiment 20000455 PARAMETER Experiment Name: At_100uM_ABA_P Parameter: Timepoint (hr) Value: 48
  misc_feature: MA Experiment 20000455 PARAMETER Experiment Name: At_100uM_ABA_P Parameter: Tissue Value: Aerial
  misc_feature: MA Experiment 20000455 PARAMETER Experiment Name: At_100uM_ABA_P Parameter: Treatment Value: 100uM ABA vs. No Treatment
  misc_feature: MA Experiment ID: 20000456 Result: Down-regulated in Transcription
  misc_feature: MA Experiment 20000456 PARAMETER Experiment Name: At_100uM_BA_P Parameter: Age (day) Value: 14
  misc_feature: MA Experiment 20000456 PARAMETER Experiment Name: At_100uM_BA_P Parameter: Organism Value: A. thaliana
  misc_feature: MA Experiment 20000456 PARAMETER Experiment Name: At_100uM_BA_P Parameter: Plant Line Value: WS
  misc_feature: MA Experiment 20000456 PARAMETER Experiment Name: At_100uM_BA_P Parameter: Timepoint (hr) Value: 6
  misc_feature: MA Experiment 20000456 PARAMETER Experiment Name: At_100uM_BA_P Parameter: Tissue Value: Aerial
  misc_feature: MA Experiment 20000456 PARAMETER Experiment Name: At_100uM_BA_P Parameter: Treatment Value: 100uM BA vs. No Treatment
  misc_feature: MA Experiment ID: 20000495 Result: Down-regulated in Transcription
  misc_feature: MA Experiment 20000495 PARAMETER Experiment Name: At_Guard_Cells_P Parameter: Harvest Date Value: 8/2/2002
  misc_feature: MA Experiment 20000495 PARAMETER Experiment Name: At_Guard_Cells_P Parameter: Organism Value: A. thaliana
  misc_feature: MA Experiment 20000495 PARAMETER Experiment Name: At_Guard_Cells_P Parameter: Tissue Value: Guard Cells vs. Leaves
  misc_feature: MA Experiment ID: 20001554 Result: Up-regulated in Transcription
  misc_feature: MA Experiment 20001554 PARAMETER Experiment Name: At_Drought_Soil_Dry_P Parameter: Age (day) Value: 21
  misc_feature: MA Experiment 20001554 PARAMETER Experiment Name: At_Drought_Soil_Dry_P Parameter: Organism Value: A. thaliana
  misc_feature: MA Experiment 20001554 PARAMETER Experiment Name: At_Drought_Soil_Dry_P Parameter: Plant Line Value: WS
  misc_feature: MA Experiment 20001554 PARAMETER Experiment Name: At_Drought_Soil_Dry_P Parameter: Post Timepoint (hr) Value: None
  misc_feature: MA Experiment 20001554 PARAMETER Experiment Name: At_Drought_Soil_Dry_P Parameter: Post-Treatment Value: None
  misc_feature: MA Experiment 20001554 PARAMETER Experiment Name: At_Drought_Soil_Dry_P Parameter: Timepoint (day) Value: 7
  misc_feature: MA Experiment 20001554 PARAMETER Experiment Name: At_Drought_Soil_Dry_P Parameter: Treatment Value: Drought vs. No Drought
  misc_feature: MA Experiment ID: 20001555 Result: Up-regulated in Transcription
  misc_feature: MA Experiment 20001555 PARAMETER Experiment Name: At_Drought_Soil_Dry_P Parameter: Age (day) Value: 24
  misc_feature: MA Experiment 20001555 PARAMETER Experiment Name: At_Drought_Soil_Dry_P Parameter: Organism Value: A. thaliana
  misc_feature: MA Experiment 20001555 PARAMETER Experiment Name: At_Drought_Soil_Dry_P Parameter: Plant Line Value: WS
  misc_feature: MA Experiment 20001555 PARAMETER Experiment Name: At_Drought_Soil_Dry_P Parameter: Post Timepoint (hr) Value: None
  misc_feature: MA Experiment 20001555 PARAMETER Experiment Name: At_Drought_Soil_Dry_P Parameter: Post-Treatment Value: None
  misc_feature: MA Experiment 20001555 PARAMETER Experiment Name: At_Drought_Soil_Dry_P Parameter: Timepoint (day) Value: 10
  misc_feature: MA Experiment 20001555 PARAMETER Experiment Name: At_Drought_Soil_Dry_P Parameter: Treatment Value: Drought vs. No Drought
  misc_feature: MA Experiment ID: 20001556 Result: Up-regulated in Transcription
  misc_feature: MA Experiment 20001556 PARAMETER Experiment Name: At_Drought_Soil_Dry_P Parameter: Age (day) Value: 26
  misc_feature: MA Experiment 20001556 PARAMETER Experiment Name: At_Drought_Soil_Dry_P Parameter: Organism Value: A. thaliana
  misc_feature: MA Experiment 20001556 PARAMETER Experiment Name: At_Drought_Soil_Dry_P Parameter: Plant Line Value: WS
  misc_feature: MA Experiment 20001556 PARAMETER Experiment Name: At_Drought_Soil_Dry_P Parameter: Post Timepoint (hr) Value: None
  misc_feature: MA Experiment 20001556 PARAMETER Experiment Name: At_Drought_Soil_Dry_P Parameter: Post-Treatment Value: None
  misc_feature: MA Experiment 20001556 PARAMETER Experiment Name: At_Drought_Soil_Dry_P Parameter: Timepoint (day) Value: 12
  misc_feature: MA Experiment 20001556 PARAMETER Experiment Name: At_Drought_Soil_Dry_P Parameter: Treatment Value: Drought vs. No Drought
  misc_feature: MA Experiment ID: 20001557 Result: Up-regulated in Transcription
  misc_feature: MA Experiment 20001557 PARAMETER Experiment Name: At_Drought_Soil_Dry_P Parameter: Age (day) Value: 27
  misc_feature: MA Experiment 20001557 PARAMETER Experiment Name: At_Drought_Soil_Dry_P Parameter: Organism Value: A. thaliana
  misc_feature: MA Experiment 20001557 PARAMETER Experiment Name: At_Drought_Soil_Dry_P Parameter: Plant Line Value: WS
  misc_feature: MA Experiment 20001557 PARAMETER Experiment Name: At_Drought_Soil_Dry_P Parameter: Post Timepoint (hr) Value: 3
  misc_feature: MA Experiment 20001557 PARAMETER Experiment Name: At_Drought_Soil_Dry_P Parameter: Post-Treatment Value: Re-Water vs. No Drought
  misc_feature: MA Experiment 20001557 PARAMETER Experiment Name: At_Drought_Soil_Dry_P Parameter: Timepoint (day) Value: 13
  misc_feature: MA Experiment 20001557 PARAMETER Experiment Name: At_Drought_Soil_Dry_P Parameter: Treatment Value: Drought vs. No Drought
  misc_feature: MA Experiment ID: 20001558 Result: Up-regulated in Transcription
  misc_feature: MA Experiment 20001558 PARAMETER Experiment Name: At_Drought_Soil_Dry_P Parameter: Age (day) Value: 27
  misc_feature: MA Experiment 20001558 PARAMETER Experiment Name: At_Drought_Soil_Dry_P Parameter: Organism Value: A. thaliana
  misc_feature: MA Experiment 20001558 PARAMETER Experiment Name: At_Drought_Soil_Dry_P Parameter: Plant Line Value: WS
  misc_feature: MA Experiment 20001558 PARAMETER Experiment Name: At_Drought_Soil_Dry_P Parameter: Post Timepoint (hr) Value: 6
  misc_feature: MA Experiment 20001558 PARAMETER Experiment Name: At_Drought_Soil_Dry_P Parameter: Post-Treatment Value: Re-Water vs. No Drought
  misc_feature: MA Experiment 20001558 PARAMETER Experiment Name: At_Drought_Soil_Dry_P Parameter: Timepoint (day) Value: 13
  misc_feature: MA Experiment 20001558 PARAMETER Experiment Name: At_Drought_Soil_Dry_P Parameter: Treatment Value: Drought vs. No Drought
  misc_feature: MA Experiment ID: 20001559 Result: Up-regulated in Transcription
  misc_feature: MA Experiment 20001559 PARAMETER Experiment Name: At_Drought_Soil_Dry_P Parameter: Age (day) Value: 28
  misc_feature: MA Experiment 20001559 PARAMETER Experiment Name: At_Drought_Soil_Dry_P Parameter: Organism Value: A. thaliana
  misc_feature: MA Experiment 20001559 PARAMETER Experiment Name: At_Drought_Soil_Dry_P Parameter: Plant Line Value: WS
  misc_feature: MA Experiment 20001559 PARAMETER Experiment Name: At_Drought_Soil_Dry_P Parameter: Post Timepoint (hr) Value: 29
  misc_feature: MA Experiment 20001559 PARAMETER Experiment Name: At_Drought_Soil_Dry_P Parameter: Post-Treatment Value: Re-Water vs. No Drought
  misc_feature: MA Experiment 20001559 PARAMETER Experiment Name: At_Drought_Soil_Dry_P Parameter: Timepoint (day) Value: 14
  misc_feature: MA Experiment 20001559 PARAMETER Experiment Name: At_Drought_Soil_Dry_P Parameter: Treatment Value: Drought vs. No Drought
  misc_feature: MA Experiment ID: 20001560 Result: Up-regulated in Transcription
  misc_feature: MA Experiment 20001560 PARAMETER Experiment Name: At_Drought_Soil_Dry_P Parameter: Age (day) Value: 28
  misc_feature: MA Experiment 20001560 PARAMETER Experiment Name: At_Drought_Soil_Dry_P Parameter: Organism Value: A. thaliana
  misc_feature: MA Experiment 20001560 PARAMETER Experiment Name: At_Drought_Soil_Dry_P Parameter: Plant Line Value: WS
  misc_feature: MA Experiment 20001560 PARAMETER Experiment Name: At_Drought_Soil_Dry_P Parameter: Post Timepoint (hr) Value: None
  misc_feature: MA Experiment 20001560 PARAMETER Experiment Name: At_Drought_Soil_Dry_P Parameter: Post-Treatment Value: None
  misc_feature: MA Experiment 20001560 PARAMETER Experiment Name: At_Drought_Soil_Dry_P Parameter: Timepoint (day) Value: 14
  misc_feature: MA Experiment 20001560 PARAMETER Experiment Name: At_Drought_Soil_Dry_P Parameter: Treatment Value: Drought vs. No Drought
  misc_feature: MA Experiment ID: 20001768 Result: Up-regulated in Transcription
  misc_feature: MA Experiment 20001768 PARAMETER Experiment Name: At_Far-red-enriched-adult_P Parameter: Age (day) Value: 28
  misc_feature: MA Experiment 20001768 PARAMETER Experiment Name: At_Far-red-enriched-adult_P Parameter: Light Value: Far-red enriched vs. White
  misc_feature: MA Experiment 20001768 PARAMETER Experiment Name: At_Far-red-enriched-adult_P Parameter: Organism Value: A. thaliana
  misc_feature: MA Experiment 20001768 PARAMETER Experiment Name: At_Far-red-enriched-adult_P Parameter: Plant Line Value: Columbia
  misc_feature: MA Experiment 20001768 PARAMETER Experiment Name: At_Far-red-enriched-adult_P Parameter: Timepoint (hr) Value: 1
  misc_feature: MA Experiment 20001768 PARAMETER Experiment Name: At_Far-red-enriched-adult_P Parameter: Tissue Value: Aerial
  misc_feature: MA Experiment ID: 20001773 Result: Up-regulated in Transcription
  misc_feature: MA Experiment 20001773 PARAMETER Experiment Name: At_Far-red-enriched-adult_P Parameter: Age (day) Value: 30
  misc_feature: MA Experiment 20001773 PARAMETER Experiment Name: At_Far-red-enriched-adult_P Parameter: Light Value: Far-red enriched vs. White
  misc_feature: MA Experiment 20001773 PARAMETER Experiment Name: At_Far-red-enriched-adult_P Parameter: Organism Value: A. thaliana
  misc_feature: MA Experiment 20001773 PARAMETER Experiment Name: At_Far-red-enriched-adult_P Parameter: Plant Line Value: Columbia
  misc_feature: MA Experiment 20001773 PARAMETER Experiment Name: At_Far-red-enriched-adult_P Parameter: Timepoint (hr) Value: 48
  misc_feature: MA Experiment 20001773 PARAMETER Experiment Name: At_Far-red-enriched-adult_P Parameter: Tissue Value: Aerial
  misc_feature: MA Experiment ID: 20001906 Result: Down-regulated in Transcription
  misc_feature: MA Experiment 20001906 PARAMETER Experiment Name: At_Drought_Reproduction_P Parameter: Age (day) Value: 35
  misc_feature: MA Experiment 20001906 PARAMETER Experiment Name: At_Drought_Reproduction_P Parameter: Organism Value: A. thaliana
  misc_feature: MA Experiment 20001906 PARAMETER Experiment Name: At_Drought_Reproduction_P Parameter: Plant Line Value: WS
  misc_feature: MA Experiment 20001906 PARAMETER Experiment Name: At_Drought_Reproduction_P Parameter: Timepoint (day) Value: 5
  misc_feature: MA Experiment 20001906 PARAMETER Experiment Name: At_Drought_Reproduction_P Parameter: Tissue Value: Siliques
  misc_feature: MA Experiment 20001906 PARAMETER Experiment Name: At_Drought_Reproduction_P Parameter: Treatment Value: Drought vs. No Drought
  misc_feature: MA Experiment ID: 20001908 Result: Down-regulated in Transcription
  misc_feature: MA Experiment 20001908 PARAMETER Experiment Name: At_Drought_Reproduction_P Parameter: Age (day) Value: 40
  misc_feature: MA Experiment 20001908 PARAMETER Experiment Name: At_Drought_Reproduction_P Parameter: Organism Value: A. thaliana
  misc_feature: MA Experiment 20001908 PARAMETER Experiment Name: At_Drought_Reproduction_P Parameter: Plant Line Value: WS
  misc_feature: MA Experiment 20001908 PARAMETER Experiment Name: At_Drought_Reproduction_P Parameter: Timepoint (day) Value: 10
  misc_feature: MA Experiment 20001908 PARAMETER Experiment Name: At_Drought_Reproduction_P Parameter: Tissue Value: Siliques
  misc_feature: MA Experiment 20001908 PARAMETER Experiment Name: At_Drought_Reproduction_P Parameter: Treatment Value: Drought vs. No Drought
  misc_feature: MA Experiment ID: 20001911 Result: Down-regulated in Transcription
  misc_feature: MA Experiment 20001911 PARAMETER Experiment Name: At_Drought_Reproduction_P Parameter: Age (day) Value: 40
  misc_feature: MA Experiment 20001911 PARAMETER Experiment Name: At_Drought_Reproduction_P Parameter: Organism Value: A. thaliana
  misc_feature: MA Experiment 20001911 PARAMETER Experiment Name: At_Drought_Reproduction_P Parameter: Plant Line Value: WS
  misc_feature: MA Experiment 20001911 PARAMETER Experiment Name: At_Drought_Reproduction_P Parameter: Timepoint (day) Value: 10
  misc_feature: MA Experiment 20001911 PARAMETER Experiment Name: At_Drought_Reproduction_P Parameter: Tissue Value: Flowers
  misc_feature: MA Experiment 20001911 PARAMETER Experiment Name: At_Drought_Reproduction_P Parameter: Treatment Value: Drought vs. No Drought
atgaaagaagctcttacgcagagctacgtcaagcaatgcgacttcgtagcagtcttcgatgctgatttccaacccgagcccgattatctcatccgcgctgtccctttccttgtccacaaccctgacgttgctctagttcaagcccgatggatatttgttaacgcgaacaaatgcttgatgacgaggatgcaagagatgtctctcaactatcatttcaaagtggaacaagaatcagggtcgactagacatgctttcttcgggtttaatggaaccgcgggtgtatggagaatatcggcaatggaagcagcaggaggatggaaatcaaggaccacagtagaggacatggacttggctgttcgtgttggtcttcatggctggaaatttgtctaccttaacgacctcacggtgagaaacgagcttccaagcaaatttaaggcctacagattccagcaacataggtggtcctgtggaccggcgaatctatttagaaaaatgacgatggagatcattttcaataagagagtatcaatttggaagaagttttatgtgatctacagctttttcttcgtaaggaaagtggcggtacacttcttgacattcttcttctactgtataattgtgccaacaagtgtcttcttccctgaaatccacatcccatcttggtctaccatttacgttccctctttgatcagtatcttccacaccctggcaactccaagatccttctacctcgtgatattttgggtcttgttcgagaatgtaatggctatgcatcgaaccaaaggtacgtgcattggcctacttgaaggaggaagagtaaacgaatgggttgtgaccgaaaaactaggagatgctttgaagagtaagctactctctcgggtagtccaaagaaaatcttgttatcaaagagtgaattccaaggaagtgatggtgggggtatacatattaggatgtgcactctatggcctgatctatgggcacacatggttacatttctatctttttcttcaggccacagcctttttcgtctccggttttggttttgtcggaacctaa

SEQ ID NO: 69866 - protein, 351 aa, Arabidopsis thaliana
  peptide (1)..(351): Ceres Seq. ID no. 1843014
  misc_feature (1)..(103): Pfam Name: Glycosyl transferase Pfam Description: Glycosyl transferase
  misc_feature (1)..(351): Homolog of NCBI NO: 15235809 NR Description: cellulose synthase like protein; protein id:
  misc_feature (1)..(351): Homolog of NCBI NO: 28393622 NR Description: putative cellulose synthase [Arabidopsis thaliana]
  misc_feature (1)..(351): Homolog of NCBI NO: 15221657 NR Description: glucosyltransferase, putative; protein id:
  misc_feature (5)..(351): Homolog of NCBI NO: 26452420 NR Description: putative glucosyltransferase [Arabidopsis
  misc_feature (1)..(351): Homolog of NCBI NO: 30688411 NR Description: glycosyltransferase family 2 [Arabidopsis >gi|8778578|gb|AAF79586.1|AC007945_6 F28C11.11 [Arabidopsis >gi|20466606|gb|AAM20620.1| unknown protein [Arabidopsis
  misc_feature (1)..(351): Homolog of NCBI NO: 30688416 NR Description: glycosyltransferase family 2 [Arabidopsis
  misc_feature (1)..(351): Homolog of NCBI NO: 25518505 NR Description: hypothetical protein F5O8.4 [imported] - thaliana >gi|4056432|gb|AAC98005.1| Similar to gi|2245014 homolog from Arabidopsis thaliana chromosome 4 contig gb|Z97341.
  misc_feature (1)..(351): Homolog of NCBI NO: 16519223 NR Description: cellulose synthase-like protein OsCslA9 [Oryza
  misc_feature (1)..(351): Homolog of NCBI NO: 34419204 NR Description: TPA: cellulose synthase-like A1 [Oryza sativa
  misc_feature (1)..(351): Homolog of NCBI NO: 34148023 NR Description: glycosyltransferase 5 [Ipomoea trifida]
MKEALTQSYVKQCDFVAVFDADFQPEPDYLIRAVPFLVHNPDVALVQARWIFVNANKCLMTRMQEMSLNYHFKVEQESGSTRHAFFGFNGTAGVWRISAMEAAGGWKSRTTVEDMDLAVRVGLHGWKFVYLNDLTVRNELPSKFKAYRFQQHRWSCGPANLFRKMTMEIIFNKRVSIWKKFYVIYSFFFVRKVAVHFLTFFFYCIIVPTSVFFPEIHIPSWSTIYVPSLISIFHTLATPRSFYLVIFWVLFENVMAMHRTKGTCIGLLEGGRVNEWVVTEKLGDALKSKLLSRVVQRKSCYQRVNSKEVMVGVYILGCALYGLIYGHTWLHFYLFLQATAFFVSGFGFVGT

SEQ ID NO: 69867 - protein, 292 aa, Arabidopsis thaliana
  peptide (1)..(292): Ceres Seq. ID no. 1843015
  misc_feature (1)..(292): Homolog of NCBI NO: 15235809 NR Description: cellulose synthase like protein; protein id:
  misc_feature (1)..(292): Homolog of NCBI NO: 28393622 NR Description: putative cellulose synthase [Arabidopsis thaliana]
  misc_feature (1)..(292): Homolog of NCBI NO: 15221657 NR Description: glucosyltransferase, putative; protein id:
  misc_feature (1)..(292): Homolog of NCBI NO: 26452420 NR Description: putative glucosyltransferase [Arabidopsis
  misc_feature (1)..(292): Homolog of NCBI NO: 30688411 NR Description: glycosyltransferase family 2 [Arabidopsis >gi|8778578|gb|AAF79586.1|AC007945_6 F28C11.11 [Arabidopsis >gi|20466606|gb|AAM20620.1| unknown protein [Arabidopsis
  misc_feature (1)..(292): Homolog of NCBI NO: 30688416 NR Description: glycosyltransferase family 2 [Arabidopsis
  misc_feature (1)..(292): Homolog of NCBI NO: 25518505 NR Description: hypothetical protein F5O8.4 [imported] - thaliana >gi|4056432|gb|AAC98005.1| Similar to gi|2245014 homolog from Arabidopsis thaliana chromosome 4 contig gb|Z97341.
  misc_feature (1)..(292): Homolog of NCBI NO: 16519223 NR Description: cellulose synthase-like protein OsCslA9 [Oryza
  misc_feature (1)..(292): Homolog of NCBI NO: 34419204 NR Description: TPA: cellulose synthase-like A1 [Oryza sativa
  misc_feature (1)..(292): Homolog of NCBI NO: 34148023 NR Description: glycosyltransferase 5 [Ipomoea trifida]
MTRMQEMSLNYHFKVEQESGSTRHAFFGFNGTAGVWRISAMEAAGGWKSRTTVEDMDLAVRVGLHGWKFVYLNDLTVRNELPSKFKAYRFQQHRWSCGPANLFRKMTMEIIFNKRVSIWKKFYVIYSFFFVRKVAVHFLTFFFYCIIVPTSVFFPEIHIPSWSTIYVPSLISIFHTLATPRSFYLVIFWVLFENVMAMHRTKGTCIGLLEGGRVNEWVVTEKLGDALKSKLLSRVVQRKSCYQRVNSKEVMVGVYILGCALYGLIYGHTWLHFYLFLQATAFFVSGFGFVGT

SEQ ID NO: 69868 - protein, 289 aa, Arabidopsis thaliana
  peptide (1)..(289): Ceres Seq. ID no. 1843016
  misc_feature (1)..(289): Homolog of NCBI NO: 15235809 NR Description: cellulose synthase like protein; protein id:
  misc_feature (1)..(289): Homolog of NCBI NO: 28393622 NR Description: putative cellulose synthase [Arabidopsis thaliana]
  misc_feature (1)..(289): Homolog of NCBI NO: 15221657 NR Description: glucosyltransferase, putative; protein id:
  misc_feature (1)..(289): Homolog of NCBI NO: 26452420 NR Description: putative glucosyltransferase [Arabidopsis
  misc_feature (1)..(289): Homolog of NCBI NO: 30688411 NR Description: glycosyltransferase family 2 [Arabidopsis >gi|8778578|gb|AAF79586.1|AC007945_6 F28C11.11 [Arabidopsis >gi|20466606|gb|AAM20620.1| unknown protein [Arabidopsis
  misc_feature (1)..(289): Homolog of NCBI NO: 30688416 NR Description: glycosyltransferase family 2 [Arabidopsis
  misc_feature (1)..(289): Homolog of NCBI NO: 25518505 NR Description: hypothetical protein F5O8.4 [imported] - thaliana >gi|4056432|gb|AAC98005.1| Similar to gi|2245014 homolog from Arabidopsis thaliana chromosome 4 contig gb|Z97341.
  misc_feature (1)..(289): Homolog of NCBI NO: 16519223 NR Description: cellulose synthase-like protein OsCslA9 [Oryza
  misc_feature (1)..(289): Homolog of NCBI NO: 34419204 NR Description: TPA: cellulose synthase-like A1 [Oryza sativa
  misc_feature (1)..(289): Homolog of NCBI NO: 34148023 NR Description: glycosyltransferase 5 [Ipomoea trifida]
MQEMSLNYHFKVEQESGSTRHAFFGFNGTAGVWRISAMEAAGGWKSRTTVEDMDLAVRVGLHGWKFVYLNDLTVRNELPSKFKAYRFQQHRWSCGPANLFRKMTMEIIFNKRVSIWKKFYVIYSFFFVRKVAVHFLTFFFYCIIVPTSVFFPEIHIPSWSTIYVPSLISIFHTLATPRSFYLVIFWVLFENVMAMHRTKGTCIGLLEGGRVNEWVVTEKLGDALKSKLLSRVVQRKSCYQRVNSKEVMVGVYILGCALYGLIYGHTWLHFYLFLQATAFFVSGFGFVGT

SEQ ID NO: 69869 - DNA, 1032 bp, Arabidopsis thaliana
  misc_feature (1)..(1032): Ceres Seq. ID no. 1989254
  misc_feature: MA Experiment ID: 20000184 Result: Down-regulated in Transcription
  misc_feature: MA Experiment 20000184 PARAMETER Experiment Name: At_Shoots__P Parameter: Age (day) Value: 7
  misc_feature: MA Experiment 20000184 PARAMETER Experiment Name: At_Shoots__P Parameter: Tissue Value: Shoots vs. Whole Plant
  misc_feature: MA Experiment ID: 20000794 Result: Up-regulated in Transcription
  misc_feature: MA Experiment 20000794 PARAMETER Experiment Name: At_Petals_P Parameter: Age (day) Value: 23-25 days
  misc_feature: MA Experiment 20000794 PARAMETER Experiment Name: At_Petals_P Parameter: Plant Line Value: WS
  misc_feature: MA Experiment 20000794 PARAMETER Experiment Name: At_Petals_P Parameter: Tissue Value: Petals vs. Whole plant
  misc_feature: Pfam Name: WD40 Pfam Description: WD domain, G-beta repeat
atggagaagaagaaggtgacgattccacaagtgtgtcatggccattcaagacctgttgttgatttgttctacagtccaattactcctgacggtttcttcctcatcagcgctagcaaagattcgcatccaatgttgagaaatggggaaactggagactggattggtacatttgaagggcataaaggtgcagtttggagttcttgtctggataacaatgcattacgtgctgcatctgcttctgccgatttttcagccaaactttgggatgcgttaacaggggatgtgctgcattcttttgagcacaagcatattgtccgagcatgcgccttctcagaggatacaaaatcgttgctcacaggagggtttgagaaaattcttcgtgtttttgacatgaatcggttggatgcacctcctacagaagttgataaatctcctggttctatcagaaccctcacatggcttcacagtgatcaaacaatattaagttcatgtactgatattggcggtgtaaggttatgggatgtgaggagtgggaaaattgtgcaaacgttagaaactaagtctcctgtcaccagtgctgaagtgagccaagatggacggtatataacaactgctgatgggtcaactgttaaattctgggacgctaaccattttggactagtgaagagttacgacatgccctgcaatattgaatctgcatcgttggagccaaagtctggtgaaaaatttgttgctggtggagaggatatgtgggtccgagtgtttgatttctacactggcgaagagattggatgcaacaagggacatcacggtccagtacactgcgttaggtttactcccactggtttatcctatgcctcgggatctgaagacgggacaatcagaatctggcaaacaacaccagcaaatcccgaagagaacgaaactagctcgaggagagtgaagcatagcgtggatgaagtttcaaagaagattgaaggctttcacatcaacaaagaaggaaaaaccgcagagaaaccatctgatacttaa

SEQ ID NO: 69870 - protein, 343 aa, Arabidopsis thaliana
  peptide (1)..(343): Ceres Seq. ID no. 2037535
  misc_feature: Pfam Name: WD40 Pfam Description: WD domain, G-beta repeat
  misc_feature (1)..(343): Homolog of NCBI NO: 30695318 NR Description: transducin / WD-40 repeat protein family
  misc_feature (1)..(342): Homolog of NCBI NO: 18400838 NR Description: expressed protein; protein id: At3g15610.1,
  misc_feature (1)..(263): Homolog of NCBI NO: 15219076 NR Description: unknown protein; protein id: At1g52730.1
  misc_feature (9)..(338): Homolog of NCBI NO: 18394249 NR Description: expressed protein; protein id: At1g15470.1, by cDNA: 113014., supported by cDNA: gi_18389289 [Arabidopsis >gi|5103845|gb|AAD39675.1|AC007591_40 Strong similarity to
  misc_feature (9)..(299): Homolog of NCBI NO: 29437263 NR Description: Similar to serine/threonine kinase receptor
  misc_feature (9)..(299): Homolog of NCBI NO: 12667270 NR Description: serine-threonine kinase receptor-associated
  misc_feature (8)..(300): Homolog of NCBI NO: 19922822 NR Description: CG3957-PA [Drosophila melanogaster]
  misc_feature (9)..(299): Homolog of NCBI NO: 4519417 NR Description: WD-40 repeat protein [Homo sapiens]
  misc_feature (9)..(299): Homolog of NCBI NO: 12643951 NR Description: UNR-interacting protein (WD-40 repeat protein
  misc_feature (9)..(299): Homolog of NCBI NO: 20149592 NR Description: unr-interacting protein [Homo sapiens]
MEKKKVTIPQVCHGHSRPVVDLFYSPITPDGFFLISASKDSHPMLRNGETGDWIGTFEGHKGAVWSSCLDNNALRAASASADFSAKLWDALTGDVLHSFEHKHIVRACAFSEDTKSLLTGGFEKILRVFDMNRLDAPPTEVDKSPGSIRTLTWLHSDQTILSSCTDIGGVRLWDVRSGKIVQTLETKSPVTSAEVSQDGRYITTADGSTVKFWDANHFGLVKSYDMPCNIESASLEPKSGEKFVAGGEDMWVRVFDFYTGEEIGCNKGHHGPVHCVRFTPTGLSYASGSEDGTIRIWQTTPANPEENETSSRRVKHSVDEVSKKIEGFHINKEGKTAEKPSDT

SEQ ID NO: 69871 - protein, 300 aa, Arabidopsis thaliana
  peptide (1)..(300): Ceres Seq. ID no. 2037536
  misc_feature: Pfam Name: WD40 Pfam Description: WD domain, G-beta repeat
  misc_feature (1)..(300): Homolog of NCBI NO: 30695318 NR Description: transducin / WD-40 repeat protein family
  misc_feature (1)..(299): Homolog of NCBI NO: 18400838 NR Description: expressed protein; protein id: At3g15610.1,
  misc_feature (1)..(220): Homolog of NCBI NO: 15219076 NR Description: unknown protein; protein id: At1g52730.1
  misc_feature (1)..(295): Homolog of NCBI NO: 18394249 NR Description: expressed protein; protein id: At1g15470.1, by cDNA: 113014., supported by cDNA: gi_18389289 [Arabidopsis >gi|5103845|gb|AAD39675.1|AC007591_40 Strong similarity to
  misc_feature (1)..(256): Homolog of NCBI NO: 29437263 NR Description: Similar to serine/threonine kinase receptor
  misc_feature (1)..(256): Homolog of NCBI NO: 12667270 NR Description: serine-threonine kinase receptor-associated
  misc_feature (1)..(257): Homolog of NCBI NO: 19922822 NR Description: CG3957-PA [Drosophila melanogaster]
  misc_feature (1)..(256): Homolog of NCBI NO: 4519417 NR Description: WD-40 repeat protein [Homo sapiens]
  misc_feature (1)..(256): Homolog of NCBI NO: 12643951 NR Description: UNR-interacting protein (WD-40 repeat protein
  misc_feature (1)..(256): Homolog of NCBI NO: 20149592 NR Description: unr-interacting protein [Homo sapiens]
MLRNGETGDWIGTFEGHKGAVWSSCLDNNALRAASASADFSAKLWDALTGDVLHSFEHKHIVRACAFSEDTKSLLTGGFEKILRVFDMNRLDAPPTEVDKSPGSIRTLTWLHSDQTILSSCTDIGGVRLWDVRSGKIVQTLETKSPVTSAEVSQDGRYITTADGSTVKFWDANHFGLVKSYDMPCNIESASLEPKSGEKFVAGGEDMWVRVFDFYTGEEIGCNKGHHGPVHCVRFTPTGLSYASGSEDGTIRIWQTTPANPEENETSSRRVKHSVDEVSKKIEGFHINKEGKTAEKPSDT

SEQ ID NO: 69872 - protein, 213 aa, Arabidopsis thaliana
  peptide (1)..(213): Ceres Seq. ID no. 2037537
  misc_feature: Pfam Name: WD40 Pfam Description: WD domain, G-beta repeat
  misc_feature (1)..(213): Homolog of NCBI NO: 30695318 NR Description: transducin / WD-40 repeat protein family
  misc_feature (1)..(212): Homolog of NCBI NO: 18400838 NR Description: expressed protein; protein id: At3g15610.1,
  misc_feature (1)..(133): Homolog of NCBI NO: 15219076 NR Description: unknown protein; protein id: At1g52730.1
  misc_feature (1)..(208): Homolog of NCBI NO: 18394249 NR Description: expressed protein; protein id: At1g15470.1, by cDNA: 113014., supported by cDNA: gi_18389289 [Arabidopsis >gi|5103845|gb|AAD39675.1|AC007591_40 Strong similarity to
  misc_feature (1)..(169): Homolog of NCBI NO: 29437263 NR Description: Similar to serine/threonine kinase receptor
  misc_feature (1)..(169): Homolog of NCBI NO: 12667270 NR Description: serine-threonine kinase receptor-associated
  misc_feature (1)..(170): Homolog of NCBI NO: 19922822 NR Description: CG3957-PA [Drosophila melanogaster]
  misc_feature (1)..(169): Homolog of NCBI NO: 4519417 NR Description: WD-40 repeat protein [Homo sapiens]
  misc_feature (1)..(169): Homolog of NCBI NO: 12643951 NR Description: UNR-interacting protein (WD-40 repeat protein
  misc_feature (1)..(169): Homolog of NCBI NO: 20149592 NR Description: unr-interacting protein [Homo sapiens]
MNRLDAPPTEVDKSPGSIRTLTWLHSDQTILSSCTDIGGVRLWDVRSGKIVQTLETKSPVTSAEVSQDGRYITTADGSTVKFWDANHFGLVKSYDMPCNIESASLEPKSGEKFVAGGEDMWVRVFDFYTGEEIGCNKGHHGPVHCVRFTPTGLSYASGSEDGTIRIWQTTPANPEENETSSRRVKHSVDEVSKKIEGFHINKEGKTAEKPSDT

SEQ ID NO: 69873 - DNA, 2124 bp, Arabidopsis thaliana
  misc_feature (1)..(2124): Ceres Seq. ID no. 1989451
  misc_feature: MA Experiment ID: 20000307 Result: Up-regulated in Transcription
  misc_feature: MA Experiment 20000307 PARAMETER Experiment Name: At_Germinating_Seeds_Sub_P Parameter: Age (hr) Value: 24 vs. 0
  misc_feature: MA Experiment 20000307 PARAMETER Experiment Name: At_Germinating_Seeds_Sub_P Parameter: Organism Value: A. thaliana
  misc_feature: MA Experiment 20000307 PARAMETER Experiment Name: At_Germinating_Seeds_Sub_P Parameter: Plant Line Value: WS
  misc_feature: MA Experiment 20000307 PARAMETER Experiment Name: At_Germinating_Seeds_Sub_P Parameter: Tissue Value: Germinating Seeds
  misc_feature: MA Experiment ID: 20000314 Result: Up-regulated in Transcription
  misc_feature: MA Experiment 20000314 PARAMETER Experiment Name: At_14day_Shoots-Roots_Sub_P Parameter: Age (day) Value: 14
  misc_feature: MA Experiment 20000314 PARAMETER Experiment Name: At_14day_Shoots-Roots_Sub_P Parameter: Organism Value: A. thaliana
  misc_feature: MA Experiment 20000314 PARAMETER Experiment Name: At_14day_Shoots-Roots_Sub_P Parameter: Plant Line Value: WS
  misc_feature: MA Experiment 20000314 PARAMETER Experiment Name: At_14day_Shoots-Roots_Sub_P Parameter: Tissue Value: Roots vs. Whole Plant
atgttcatgatcaaatataacataaaaccaaaacaaagaaaaaagatagttgcaatgggtgtgattagaacctcaagaacgatggggttaggacagtgcatggtttatgttgtcgtcctaagtgccattgcggctacagtgacatcatacccttacacatcccctcaaactccacattacaattctccaagccatgaacacaaaatccctaagtacacaccacatccaaaaccatctatttacagctcttcaccacctccatcatactactctccttctccaaaggttgattacaagtctccaccaccatcatacgtttacagttccccaccaccaccatactactctccgtctccaaaggttgactacaagtccctaccacccccatacgtctacagttccccacccccaccatactactctccttcaccaaaggttaactacaagtctccaccgccaccatacgtctacagctctccaccaccaccatactacagtccatctccaaagggtgactacaagtctccaccacccccatacgtctacagttccccacccccaccatactactctccttctccaaaggttgactacaagtctccaccaccaccatacgtctacagctccccaccaccaccatactacagtccaactccaaaggttgactacaagtccccaccacccccatacgtctacagctccccacccccaccatactacagtccatctccaaaggttgactacaagtctccaccacccccatacgtgtacagctccccacccccaccatactactctccttcaccaaaggttaactacaagtctccaccaccaccatacgtctacggctctccaccaccaccatactacagtccatctccaaaggttgactacaagtccccaccacccccatacgtctacagttccccacccccaccatactactctccttcaccaaaggttaactacaagtctccaccaccaccatacgtctacggctctccaccaccaccatactacagtccatctccaaaggttgactacaagtccccaccacccccatacgtctacagttccccacccccaccatactactctccttctccaaaggttgactacaagtctccaccaccaccatacgtttacagctccacaccaccaccatactacagtccatcaccaaaggttgactacaagtccccaccacccccatacgtctacagttccccacccccaccatactactctccttctccaaaggttgactacaagtccccaccaccaccatacatctacagctccacaccactaccatactacagtccatctccaaaggttgactacaagtccccaccacccccatacgtctacagctccccacccccaccatactactctccttctccaaaggttgactacaagcctccaccaccaccatacgtctacagctccccaccaccaccatactacagtccatctccaaaggttgactacaagtccccaccacccccatacgtctacagcttcccacccccaccatactacagtccatctccaaaggttgactacaagtctccaccacccccatacgtctacagctctccacccccaccatactactctccttcaccaaaggttaactataagtctccaccaccaccatacgtctacagttctccaccaccaccgtactactctccttctccaaaagttgaatacaagtccccaccacccccatacatctatagttccccacctccaccatactacgctccttcaccaaaggttgactacaagtctccaccaccaccatacgtctatagctccccacccccaccatattactctccttctccaaaagttgactataagtctccacctccaccatacgtctatagctcaccaccaccaccatactactctccttctccaaaggttaactacaagtccccaccaccaccatatgtctacagctccccacctccaccgtactactccccttctcctaaggtcgactacaaatcttccccaccacaatatgtctacagctcaccacccacaccatactactctccttctcctaaagtcacttacaagtctcccccaccaccatatgtttactag

SEQ ID NO: 69874 - protein, 707 aa, Arabidopsis thaliana
  peptide (1)..(707): Ceres Seq. ID no. 2028021
  misc_feature (126)..(429): Pfam Name: Formin Homology 2 Domain Pfam Description: Formin Homology 2 Domain
  misc_feature (28)..(590): Homolog of NCBI NO: 15224658 NR Description: unknown protein; protein id: At2g24980.1
  misc_feature (19)..(532): Homolog of NCBI NO: 15236486 NR Description: extensin-like protein; protein id: At4g08400.1
  misc_feature (104)..(640): Homolog of NCBI NO: 15224658 NR Description: unknown protein; protein id: At2g24980.1
  misc_feature (130)..(665): Homolog of NCBI NO: 15224658 NR Description: unknown protein; protein id: At2g24980.1
  misc_feature (155)..(690): Homolog of NCBI NO: 15224658 NR Description: unknown protein; protein id: At2g24980.1
  misc_feature (81)..(615): Homolog of NCBI NO: 15224658 NR Description: unknown protein; protein id: At2g24980.1
  misc_feature (180)..(707): Homolog of NCBI NO: 15224658 NR Description: unknown protein; protein id: At2g24980.1
  misc_feature (204)..(707): Homolog of NCBI NO: 15232552 NR Description: extensin precursor -like protein; protein id:
  misc_feature (155)..(632): Homolog of NCBI NO: 15236486 NR Description: extensin-like protein; protein id: At4g08400.1
  misc_feature (230)..(707): Homolog of NCBI NO: 15236486 NR Description: extensin-like protein; protein id: At4g08400.1
MFMIKYNIKPKQRKKIVAMGVIRTSRTMGLGQCMVYVVVLSAIAATVTSYPYTSPQTPHYNSPSHEHKIPKYTPHPKPSIYSSSPPPSYYSPSPKVDYKSPPPSYVYSSPPPPYYSPSPKVDYKSLPPPYVYSSPPPPYYSPSPKVNYKSPPPPYVYSSPPPPYYSPSPKGDYKSPPPPYVYSSPPPPYYSPSPKVDYKSPPPPYVYSSPPPPYYSPTPKVDYKSPPPPYVYSSPPPPYYSPSPKVDYKSPPPPYVYSSPPPPYYSPSPKVNYKSPPPPYVYGSPPPPYYSPSPKVDYKSPPPPYVYSSPPPPYYSPSPKVNYKSPPPPYVYGSPPPPYYSPSPKVDYKSPPPPYVYSSPPPPYYSPSPKVDYKSPPPPYVYSSTPPPYYSPSPKVDYKSPPPPYVYSSPPPPYYSPSPKVDYKSPPPPYIYSSTPLPYYSPSPKVDYKSPPPPYVYSSPPPPYYSPSPKVDYKPPPPPYVYSSPPPPYYSPSPKVDYKSPPPPYVYSFPPPPYYSPSPKVDYKSPPPPYVYSSPPPPYYSPSPKVNYKSPPPPYVYSSPPPPYYSPSPKVEYKSPPPPYIYSSPPPPYYAPSPKVDYKSPPPPYVYSSPPPPYYSPSPKVDYKSPPPPYVYSSPPPPYYSPSPKVNYKSPPPPYVYSSPPPPYYSPSPKVDYKSSPPQYVYSSPPTPYYSPSPKVTYKSPPPPYVY

SEQ ID NO: 69875 - protein, 705 aa, Arabidopsis thaliana
  peptide (1)..(705): Ceres Seq. ID no. 2028022
  misc_feature (124)..(427): Pfam Name: Formin Homology 2 Domain Pfam Description: Formin Homology 2 Domain
  misc_feature (26)..(588): Homolog of NCBI NO: 15224658 NR Description: unknown protein; protein id: At2g24980.1
  misc_feature (17)..(530): Homolog of NCBI NO: 15236486 NR Description: extensin-like protein; protein id: At4g08400.1
  misc_feature (102)..(638): Homolog of NCBI NO: 15224658 NR Description: unknown protein; protein id: At2g24980.1
  misc_feature (128)..(663): Homolog of NCBI NO: 15224658 NR Description: unknown protein; protein id: At2g24980.1
  misc_feature (153)..(688): Homolog of NCBI NO: 15224658 NR Description: unknown protein; protein id: At2g24980.1
  misc_feature (79)..(613): Homolog of NCBI NO: 15224658 NR Description: unknown protein; protein id: At2g24980.1
  misc_feature (178)..(705): Homolog of NCBI NO: 15224658 NR Description: unknown protein; protein id: At2g24980.1
  misc_feature (202)..(705): Homolog of NCBI NO: 15232552 NR Description: extensin precursor -like protein; protein id:
  misc_feature (153)..(630): Homolog of NCBI NO: 15236486 NR Description: extensin-like protein; protein id: At4g08400.1
  misc_feature (228)..(705): Homolog of NCBI NO: 15236486 NR Description: extensin-like protein; protein id: At4g08400.1
MIKYNIKPKQRKKIVAMGVIRTSRTMGLGQCMVYVVVLSAIAATVTSYPYTSPQTPHYNSPSHEHKIPKYTPHPKPSIYSSSPPPSYYSPSPKVDYKSPPPSYVYSSPPPPYYSPSPKVDYKSLPPPYVYSSPPPPYYSPSPKVNYKSPPPPYVYSSPPPPYYSPSPKGDYKSPPPPYVYSSPPPPYYSPSPKVDYKSPPPPYVYSSPPPPYYSPTPKVDYKSPPPPYVYSSPPPPYYSPSPKVDYKSPPPPYVYSSPPPPYYSPSPKVNYKSPPPPYVYGSPPPPYYSPSPKVDYKSPPPPYVYSSPPPPYYSPSPKVNYKSPPPPYVYGSPPPPYYSPSPKVDYKSPPPPYVYSSPPPPYYSPSPKVDYKSPPPPYVYSSTPPPYYSPSPKVDYKSPPPPYVYSSPPPPYYSPSPKVDYKSPPPPYIYSSTPLPYYSPSPKVDYKSPPPPYVYSSPPPPYYSPSPKVDYKPPPPPYVYSSPPPPYYSPSPKVDYKSPPPPYVYSFPPPPYYSPSPKVDYKSPPPPYVYSSPPPPYYSPSPKVNYKSPPPPYVYSSPPPPYYSPSPKVEYKSPPPPYIYSSPPPPYYAPSPKVDYKSPPPPYVYSSPPPPYYSPSPKVDYKSPPPPYVYSSPPPPYYSPSPKVNYKSPPPPYVYSSPPPPYYSPSPKVDYKSSPPQYVYSSPPTPYYSPSPKVTYKSPPPPYVY

SEQ ID NO: 69876 - protein, 689 aa, Arabidopsis thaliana
  peptide (1)..(689): Ceres Seq. ID no. 2028023
  misc_feature (108)..(411): Pfam Name: Formin Homology 2 Domain Pfam Description: Formin Homology 2 Domain
  misc_feature (10)..(572): Homolog of NCBI NO: 15224658 NR Description: unknown protein; protein id: At2g24980.1
  misc_feature (1)..(514): Homolog of NCBI NO: 15236486 NR Description: extensin-like protein; protein id: At4g08400.1
  misc_feature (86)..(622): Homolog of NCBI NO: 15224658 NR Description: unknown protein; protein id: At2g24980.1
  misc_feature (112)..(647): Homolog of NCBI NO: 15224658 NR Description: unknown protein; protein id: At2g24980.1
  misc_feature (137)..(672): Homolog of NCBI NO: 15224658 NR Description: unknown protein; protein id: At2g24980.1
  misc_feature (63)..(597): Homolog of NCBI NO: 15224658 NR Description: unknown protein; protein id: At2g24980.1
  misc_feature (162)..(689): Homolog of NCBI NO: 15224658 NR Description: unknown protein; protein id: At2g24980.1
  misc_feature (186)..(689): Homolog of NCBI NO: 15232552 NR Description: extensin precursor -like protein; protein id:
  misc_feature (137)..(614): Homolog of NCBI NO: 15236486 NR Description: extensin-like protein; protein id: At4g08400.1
  misc_feature (212)..(689): Homolog of NCBI NO: 15236486 NR Description: extensin-like protein; protein id: At4g08400.1
MGVIRTSRTMGLGQCMVYVVVLSAIAATVTSYPYTSPQTPHYNSPSHEHKIPKYTPHPKPSIYSSSPPPSYYSPSPKVDYKSPPPSYVYSSPPPPYYSPSPKVDYKSLPPPYVYSSPPPPYYSPSPKVNYKSPPPPYVYSSPPPPYYSPSPKGDYKSPPPPYVYSSPPPPYYSPSPKVDYKSPPPPYVYSSPPPPYYSPTPKVDYKSPPPPYVYSSPPPPYYSPSPKVDYKSPPPPYVYSSPPPPYYSPSPKVNYKSPPPPYVYGSPPPPYYSPSPKVDYKSPPPPYVYSSPPPPYYSPSPKVNYKSPPPPYVYGSPPPPYYSPSPKVDYKSPPPPYVYSSPPPPYYSPSPKVDYKSPPPPYVYSSTPPPYYSPSPKVDYKSPPPPYVYSSPPPPYYSPSPKVDYKSPPPPYIYSSTPLPYYSPSPKVDYKSPPPPYVYSSPPPPYYSPSPKVDYKPPPPPYVYSSPPPPYYSPSPKVDYKSPPPPYVYSFPPPPYYSPSPKVDYKSPPPPYVYSSPPPPYYSPSPKVNYKSPPPPYVYSSPPPPYYSPSPKVEYKSPPPPYIYSSPPPPYYAPSPKVDYKSPPPPYVYSSPPPPYYSPSPKVDYKSPPPPYVYSSPPPPYYSPSPKVNYKSPPPPYVYSSPPPPYYSPSPKVDYKSSPPQYVYSSPPTPYYSPSPKVTYKSPPPPYVY

SEQ ID NO: 69877 - protein, 643 aa, Arabidopsis thaliana
  peptide (1)..(643): Ceres Seq. ID no. 2028024
  misc_feature (186)..(457): Pfam Name: Syndecan domain Pfam Description: Syndecan domain
  misc_feature (285)..(382): Homolog of NCBI NO: 18411288 NR Description: expressed protein; protein id: At1g76930.1,
  misc_feature (335)..(432): Homolog of NCBI NO: 18411288 NR Description: expressed protein; protein id: At1g76930.1,
  misc_feature (544)..(642): Homolog of NCBI NO: 18411288 NR Description: expressed protein; protein id: At1g76930.1,
  misc_feature (235)..(323): Homolog of NCBI NO: 18411288 NR Description: expressed protein; protein id: At1g76930.1,
  misc_feature (194)..(282): Homolog of NCBI NO: 18411288 NR Description: expressed protein; protein id: At1g76930.1,
  misc_feature (493)..(582): Homolog of NCBI NO: 18411288 NR Description: expressed protein; protein id: At1g76930.1,
  misc_feature (385)..(488): Homolog of NCBI NO: 18411288 NR Description: expressed protein; protein id: At1g76930.1,
  misc_feature (409)..(507): Homolog of NCBI NO: 18411288 NR Description: expressed protein; protein id: At1g76930.1,
  misc_feature (134)..(232): Homolog of NCBI NO: 18411288 NR Description: expressed protein; protein id: At1g76930.1,
  misc_feature (60)..(157): Homolog of NCBI NO: 18411288 NR Description: expressed protein; protein id: At1g76930.1,
MNTKSLSTHHIQNHLFTALHHLHHTTLLLQRLITSLHHHHTFTVPHHHHTTLRLQRLTTSPYHPHTSTVPHPHHTTLLHQRLTTSLHRHHTSTALHHHHTTVHLQRVTTSLHHPHTSTVPHPHHTTLLLQRLTTSLHHHHTSTAPHHHHTTVQLQRLTTSPHHPHTSTAPHPHHTTVHLQRLTTSLHHPHTCTAPHPHHTTLLHQRLTTSLHHHHTSTALHHHHTTVHLQRLTTSPHHPHTSTVPHPHHTTLLHQRLTTSLHHHHTSTALHHHHTTVHLQRLTTSPHHPHTSTVPHPHHTTLLLQRLTTSLHHHHTFTAPHHHHTTVHHQRLTTSPHHPHTSTVPHPHHTTLLLQRLTTSPHHHHTSTAPHHYHTTVHLQRLTTSPHHPHTSTAPHPHHTTLLLQRLTTSLHHHHTSTAPHHHHTTVHLQRLTTSPHHPHTSTASHPHHTTVHLQRLTTSLHHPHTSTALHPHHTTLLHQRLTISLHHHHTSTVLHHHRTTLLLQKLNTSPHHPHTSIVPHLHHTTLLHQRLTTSLHHHHTSIAPHPHHITLLLQKLTISLHLHHTSIAHHHHHTTLLLQRLTTSPHHHHMSTAPHLHRTTPLLLRSTTNLPHHNMSTAHHPHHTTLLLLKSLTSLPHHHMFT

SEQ ID NO: 69878 - DNA, 606 bp, Arabidopsis thaliana
  misc_feature (1)..(606): Ceres Seq. ID no. 1989481
  misc_feature: MA Experiment ID: 20000185 Result: Down-regulated in Transcription
  misc_feature: MA Experiment 20000185 PARAMETER Experiment Name: At_Roots__P Parameter: Age (day) Value: 7 vs. 21
  misc_feature: MA Experiment 20000185 PARAMETER Experiment Name: At_Roots__P Parameter: Organism Value: A. thaliana
  misc_feature: MA Experiment 20000185 PARAMETER Experiment Name: At_Roots__P Parameter: Tissue Value: Roots vs. Whole Plant
  misc_feature: MA Experiment ID: 20000234 Result: Down-regulated in Transcription
  misc_feature: MA Experiment 20000234 PARAMETER Experiment Name: At_Siliques_P Parameter: Age (day) Value: 21
  misc_feature: MA Experiment 20000234 PARAMETER Experiment Name: At_Siliques_P Parameter: Organism Value: A. thaliana
  misc_feature: MA Experiment 20000234 PARAMETER Experiment Name: At_Siliques_P Parameter: Plant Line Value: WS
  misc_feature: MA Experiment 20000234 PARAMETER Experiment Name: At_Siliques_P Parameter: Tissue Value: Less Than 5mm Siliques vs. Whole Plant
  misc_feature: MA Experiment ID: 20000235 Result: Down-regulated in Transcription
  misc_feature: MA Experiment 20000235 PARAMETER Experiment Name: At_Siliques_P Parameter: Age (day) Value: 21
  misc_feature: MA Experiment 20000235 PARAMETER Experiment Name: At_Siliques_P Parameter: Organism Value: A. thaliana
  misc_feature: MA Experiment 20000235 PARAMETER Experiment Name: At_Siliques_P Parameter: Plant Line Value: WS
  misc_feature: MA Experiment 20000235 PARAMETER Experiment Name: At_Siliques_P Parameter: Tissue Value: 5-10mm Siliques vs. Whole Plant
  misc_feature: MA Experiment ID: 20000264 Result: Down-regulated in Transcription
  misc_feature: MA Experiment 20000264 PARAMETER Experiment Name: At_Open_Flower_P Parameter: Age (day) Value: 21
  misc_feature: MA Experiment 20000264 PARAMETER Experiment Name: At_Open_Flower_P Parameter: Plant Line Value: WS
  misc_feature: MA Experiment 20000264 PARAMETER Experiment Name: At_Open_Flower_P Parameter: Tissue Value: Open Flower vs. Whole Plant
  misc_feature: MA Experiment ID: 20000265 Result: Down-regulated in Transcription
  misc_feature: MA Experiment 20000265 PARAMETER Experiment Name: At_Open_Flower_P Parameter: Age (day) Value: 21
  misc_feature: MA Experiment 20000265 PARAMETER Experiment Name: At_Open_Flower_P Parameter: Plant Line Value: WS
  misc_feature: MA Experiment 20000265 PARAMETER Experiment Name: At_Open_Flower_P Parameter: Tissue Value: Closed Flower vs. Whole Plant
  misc_feature: MA Experiment ID: 20000286 Result: Down-regulated in Transcription
  misc_feature: MA Experiment 20000286 PARAMETER Experiment Name: At_Open_Flower_P Parameter: Age (day) Value: 21
  misc_feature: MA Experiment 20000286 PARAMETER Experiment Name: At_Open_Flower_P Parameter: Plant Line Value: WS
  misc_feature: MA Experiment 20000286 PARAMETER Experiment Name: At_Open_Flower_P Parameter: Tissue Value: Half Open vs. Whole Plant
  misc_feature: MA Experiment ID: 20000794 Result: Down-regulated in Transcription
  misc_feature: MA Experiment 20000794 PARAMETER Experiment Name: At_Petals_P Parameter: Age (day) Value: 23-25 days
  misc_feature: MA Experiment 20000794 PARAMETER Experiment Name: At_Petals_P Parameter: Plant Line Value: WS
  misc_feature: MA Experiment 20000794 PARAMETER Experiment Name: At_Petals_P Parameter: Tissue Value: Petals vs. Whole plant
  misc_feature: MA Experiment ID: 20001248 Result: Up-regulated in Transcription
  misc_feature: MA Experiment 20001248 PARAMETER Experiment Name: At_Far-red-induction_P Parameter: Age (day) Value: 7
  misc_feature: MA Experiment 20001248 PARAMETER Experiment Name: At_Far-red-induction_P Parameter: Light Value: Far-red vs. White
  misc_feature: MA Experiment 20001248 PARAMETER Experiment Name: At_Far-red-induction_P Parameter: Organism Value: A. thaliana
  misc_feature: MA Experiment 20001248 PARAMETER Experiment Name: At_Far-red-induction_P Parameter: Plant Line Value: Columbia
  misc_feature: MA Experiment 20001248 PARAMETER Experiment Name: At_Far-red-induction_P Parameter: Timepoint (hr) Value: 4
  misc_feature: MA Experiment 20001248 PARAMETER Experiment Name: At_Far-red-induction_P Parameter: Tissue Value: Whole Plant
  misc_feature: MA Experiment ID: 20001450 Result: Up-regulated in Transcription
  misc_feature: MA Experiment 20001450 PARAMETER Experiment Name: At_Far-red-induction_P Parameter: Age (day) Value: 7
  misc_feature: MA Experiment 20001450 PARAMETER Experiment Name: At_Far-red-induction_P Parameter: Light Value: Far-red vs. White
  misc_feature: MA Experiment 20001450 PARAMETER Experiment Name: At_Far-red-induction_P Parameter: Organism Value: A. thaliana
  misc_feature: MA Experiment 20001450 PARAMETER Experiment Name: At_Far-red-induction_P Parameter: Plant Line Value: Columbia
  misc_feature: MA Experiment 20001450 PARAMETER Experiment Name: At_Far-red-induction_P Parameter: Timepoint (hr) Value: 8
  misc_feature: MA Experiment 20001450 PARAMETER Experiment Name: At_Far-red-induction_P Parameter: Tissue Value: Whole Plant
  misc_feature: MA Experiment ID: 20001555 Result: Down-regulated in Transcription
  misc_feature: MA Experiment 20001555 PARAMETER Experiment Name: At_Drought_Soil_Dry_P Parameter: Age (day) Value: 24
  misc_feature: MA Experiment 20001555 PARAMETER Experiment Name: At_Drought_Soil_Dry_P Parameter: Organism Value: A. thaliana
  misc_feature: MA Experiment 20001555 PARAMETER Experiment Name: At_Drought_Soil_Dry_P Parameter: Plant Line Value: WS
  misc_feature: MA Experiment 20001555 PARAMETER Experiment Name: At_Drought_Soil_Dry_P Parameter: Post Timepoint (hr) Value: None
  misc_feature: MA Experiment 20001555 PARAMETER Experiment Name: At_Drought_Soil_Dry_P Parameter: Post-Treatment Value: None
  misc_feature: MA Experiment 20001555 PARAMETER Experiment Name: At_Drought_Soil_Dry_P Parameter: Timepoint (day) Value: 10
  misc_feature: MA Experiment 20001555 PARAMETER Experiment Name: At_Drought_Soil_Dry_P Parameter: Treatment Value: Drought vs. No Drought
  misc_feature: MA Experiment ID: 20001556 Result: Down-regulated in Transcription
  misc_feature: MA Experiment 20001556 PARAMETER Experiment Name: At_Drought_Soil_Dry_P Parameter: Age (day) Value: 26
  misc_feature: MA Experiment 20001556 PARAMETER Experiment Name: At_Drought_Soil_Dry_P Parameter: Organism Value: A. thaliana
  misc_feature: MA Experiment 20001556 PARAMETER Experiment Name: At_Drought_Soil_Dry_P Parameter: Plant Line Value: WS
  misc_feature: MA Experiment 20001556 PARAMETER Experiment Name: At_Drought_Soil_Dry_P Parameter: Post Timepoint (hr) Value: None
  misc_feature: MA Experiment 20001556 PARAMETER Experiment Name: At_Drought_Soil_Dry_P Parameter: Post-Treatment Value: None
  misc_feature: MA Experiment 20001556 PARAMETER Experiment Name: At_Drought_Soil_Dry_P Parameter: Timepoint (day) Value: 12
  misc_feature: MA Experiment 20001556 PARAMETER Experiment Name: At_Drought_Soil_Dry_P Parameter: Treatment Value: Drought vs. No Drought
  misc_feature: MA Experiment ID: 20001557 Result: Down-regulated in Transcription
  misc_feature: MA Experiment 20001557 PARAMETER Experiment Name: At_Drought_Soil_Dry_P Parameter: Age (day) Value: 27
  misc_feature: MA Experiment 20001557 PARAMETER Experiment Name: At_Drought_Soil_Dry_P Parameter: Organism Value: A. thaliana
  misc_feature: MA Experiment 20001557 PARAMETER Experiment Name: At_Drought_Soil_Dry_P Parameter: Plant Line Value: WS
  misc_feature: MA Experiment 20001557 PARAMETER Experiment Name: At_Drought_Soil_Dry_P Parameter: Post Timepoint (hr) Value: 3
  misc_feature: MA Experiment 20001557 PARAMETER Experiment Name: At_Drought_Soil_Dry_P Parameter: Post-Treatment Value: Re-Water vs. No Drought
  misc_feature: MA Experiment 20001557 PARAMETER Experiment Name: At_Drought_Soil_Dry_P Parameter: Timepoint (day) Value: 13
  misc_feature: MA Experiment 20001557 PARAMETER Experiment Name: At_Drought_Soil_Dry_P Parameter: Treatment Value: Drought vs. No Drought
atgtacgggagaaaagggtatcagcttatcaaagattttgccaccggagagaagggtcagctcaaacctttcaacagcaaactctttgatgaaacaatcgaagagtgtgaccagaatcaccatcttatccagtccttgataaggaaaatgcaacaagaaggtttggatgttcagaacaacagaaacgctgaccactatggagcactaattcaccaccttgctttgatccggaacaagcgctgcctcatggcttatgtgtacaaccgagcagaaattgtgcgtgatttggcatggagagtagggcttgaacttctcgaccttccctctgaaatccaagagaagctcactacactagagaaggaatacttcaaaaaccattcggttgctctaaaatcatacatgggaaaagtaggaatcgagttgaatgtcgatatggtccctcctaaagatccttatatcaaggtcagaattttggatgatattgatgaaggaatcgtgctgagtgacaaaacaacaaattttgcccgtcattctatgcatttcctcaaacgtactgatgcggaaccatacattgctcggggccaaatggaggagctgacaggatga

SEQ ID NO: 69879 - protein, 201 aa, Arabidopsis thaliana
  peptide (1)..(201): Ceres Seq. ID no. 2028105
  misc_feature (1)..(199): Pfam Name: Partner of SLD five, PSF1 Pfam Description: Partner of SLD five, PSF1
  misc_feature (1)..(201): Homolog of NCBI NO: 15220076 NR Description: unknown protein; protein id: At1g80190.1
  misc_feature (1)..(199): Homolog of NCBI NO: 29365479 NR Description: Psf1 [Xenopus laevis]
  misc_feature (1)..(199): Homolog of NCBI NO: 10800148 NR Description: KIAA0186 gene product [Homo sapiens] Hypothetical protein KIAA0186 >gi|1136432|dbj|BAA11503.1|
  misc_feature (1)..(199): Homolog of NCBI NO: 40788899 NR Description: KIAA0186 [Homo sapiens]
  misc_feature (1)..(199): Homolog of NCBI NO: 15214812 NR Description: KIAA0186 gene product [Homo sapiens]
  misc_feature (1)..(199): Homolog of NCBI NO: 28487734 NR Description: RIKEN cDNA 2810418N01 [Mus musculus]
  misc_feature (20)..(199): Homolog of NCBI NO: 24655047 NR Description: CG9187-PA [Drosophila melanogaster]
  misc_feature (5)..(197): Homolog of NCBI NO: 39589214 NR Description: Hypothetical protein CBG01004 [Caenorhabditis
  misc_feature (1)..(199): Homolog of NCBI NO: 32422773 NR Description: hypothetical protein [Neurospora crassa]
  misc_feature (1)..(155): Homolog of NCBI NO: 9407835 NR Description: bA384D7.3 (KIAA0186 protein) [Homo sapiens]
MYGRKGYQLIKDFATGEKGQLKPFNSKLFDETIEECDQNHHLIQSLIRKMQQEGLDVQNNRNADHYGALIHHLALIRNKRCLMAYVYNRAEIVRDLAWRVGLELLDLPSEIQEKLTTLEKEYFKNHSVALKSYMGKVGIELNVDMVPPKDPYIKVRILDDIDEGIVLSDKTTNFARHSMHFLKRTDAEPYIARGQMEELTG

SEQ ID NO: 69880 - protein, 152 aa, Arabidopsis thaliana
  peptide (1)..(152): Ceres Seq. ID no. 2028106
  misc_feature (1)..(150): Pfam Name: Partner of SLD five, PSF1 Pfam Description: Partner of SLD five, PSF1
  misc_feature (1)..(152): Homolog of NCBI NO: 15220076 NR Description: unknown protein; protein id: At1g80190.1
  misc_feature (1)..(150): Homolog of NCBI NO: 29365479 NR Description: Psf1 [Xenopus laevis]
  misc_feature (1)..(150): Homolog of NCBI NO: 10800148 NR Description: KIAA0186 gene product [Homo sapiens] Hypothetical protein KIAA0186 >gi|1136432|dbj|BAA11503.1|
  misc_feature (1)..(150): Homolog of NCBI NO: 40788899 NR Description: KIAA0186 [Homo sapiens]
  misc_feature (1)..(150): Homolog of NCBI NO: 15214812 NR Description: KIAA0186 gene product [Homo sapiens]
  misc_feature (1)..(150): Homolog of NCBI NO: 28487734 NR Description: RIKEN cDNA 2810418N01 [Mus musculus]
  misc_feature (1)..(150): Homolog of NCBI NO: 24655047 NR Description: CG9187-PA [Drosophila melanogaster]
  misc_feature (1)..(148): Homolog of NCBI NO: 39589214 NR Description: Hypothetical protein CBG01004 [Caenorhabditis
  misc_feature (1)..(150): Homolog of NCBI NO: 32422773 NR Description: hypothetical protein [Neurospora crassa]
  misc_feature (1)..(106): Homolog of NCBI NO: 9407835 NR Description: bA384D7.3 (KIAA0186 protein) [Homo sapiens]
MQQEGLDVQNNRNADHYGALIHHLALIRNKRCLMAYVYNRAEIVRDLAWRVGLELLDLPSEIQEKLTTLEKEYFKNHSVALKSYMGKVGIELNVDMVPPKDPYIKVRILDDIDEGIVLSDKTTNFARHSMHFLKRTDAEPYIARGQMEELTG

SEQ ID NO: 69881 - protein, 119 aa, Arabidopsis thaliana
  peptide (1)..(119): Ceres Seq. ID no. 2028107
  misc_feature (1)..(117): Pfam Name: Partner of SLD five, PSF1 Pfam Description: Partner of SLD five, PSF1
  misc_feature (1)..(119): Homolog of NCBI NO: 15220076 NR Description: unknown protein; protein id: At1g80190.1
  misc_feature (1)..(117): Homolog of NCBI NO: 29365479 NR Description: Psf1 [Xenopus laevis]
  misc_feature (1)..(117): Homolog of NCBI NO: 10800148 NR Description: KIAA0186 gene product [Homo sapiens] Hypothetical protein KIAA0186 >gi|1136432|dbj|BAA11503.1|
  misc_feature (1)..(117): Homolog of NCBI NO: 40788899 NR Description: KIAA0186 [Homo sapiens]
  misc_feature (1)..(117): Homolog of NCBI NO: 15214812 NR Description: KIAA0186 gene product [Homo sapiens]
  misc_feature (1)..(117): Homolog of NCBI NO: 28487734 NR Description: RIKEN cDNA 2810418N01 [Mus musculus]
  misc_feature (1)..(117): Homolog of NCBI NO: 24655047 NR Description: CG9187-PA [Drosophila melanogaster]
  misc_feature (1)..(115): Homolog of NCBI NO: 39589214 NR Description: Hypothetical protein CBG01004 [Caenorhabditis
  misc_feature (1)..(117): Homolog of NCBI NO: 32422773 NR Description: hypothetical protein [Neurospora crassa]
  misc_feature (1)..(73): Homolog of NCBI NO: 9407835 NR Description: bA384D7.3 (KIAA0186 protein) [Homo sapiens]
MAYVYNRAEIVRDLAWRVGLELLDLPSEIQEKLTTLEKEYFKNHSVALKSYMGKVGIELNVDMVPPKDPYIKVRILDDIDEGIVLSDKTTNFARHSMHFLKRTDAEPYIARGQMEELTG

SEQ ID NO: 69882 - DNA, 3909 bp, Arabidopsis thaliana
  misc_feature (1)..(3909): Ceres Seq. ID no. 1989489
atgttgaggtcacggcgttcacgttcccgtcacggtgcacaagcttgcgccgttatgtctgccgttcttcttctcgcttccgtctcacttctctacactcgtctctcactcttctcatctcactcgccgaatcacctccgctctggctccagcgaagacacagttttgttccctgattctgtcctcgtctcagattccgacgttgaaaccaccggcggaggaggaagaggatccactacctcaaccgaagacagaatcgacgagcacgacgatgcgatcgaagacgacggcgtttcgaatgaggaagatgagaatcaagacgcagagcaagagcaagaagtggatcttaatcggaacaaggctgcttcatcttctgggttttacttcgatcatgttaatggagttataagaagagctttcaataaacgatctatagatgaatgggattacgattacacaggttttagtatagattctgatagttcaggagataagagtagtagagctgcgtttggatctgatgatgttcctttagatgaatctattcgtaggaagattgttgaggttacgagtgtggaagatgccttgttgttaaaatctggtaaaaaggtctcgcctttgagacaaggttggggagattggtttgataagaaaggtgatttcttgaggagagatagaatgtttaagtcgaatattgagactttgaatccgttgaataatccaatgttgcaggatcctgatagtgttgggaatactggattgactagaggtgataaggttgtgcagaaatggaggttgaatcagattaagagaaacccttttatggcaaagaagccattgagtgttgtttcagagaagaaggaaccaaatgagtttaggttgctgagtagtgttggtgagatcaagagaggtgaacgtaagacattagacaatgatgagaaaattgagagagaggaacagaagaatgtggaatctgagaggaagcatgatgaggttacagaacatatgtatgcagatggaacaaaatggggatattatcctggtatagaaccgagtttgtcgttttcggattttatggattcgttttttagaaaggagaaatgttctatgagagtgtttatggtgtggaattcacctggttggatgtttagtgttagacatcaaagagggcttgagagcttactgtctcagcatcgagatgcttgtgttgtggttttctcagagactgttgagcttgatttcttcaggaacagctttgtgaaagatagttataaagttgctgtggcaatgcccaaccttgatgagttgctgcaggatactcctactcatgtatttgcttctgtatggtttgattggagaaaaactaagttctatcctactcactacagtgaactcgttcggcttgccgccctttataaatatggcggggtttacctcgattctgatgtgatagttttgggttcattatcgtctttgagaaatactattggcatggaggatcaggtagccggtgaatcactgaacggtgctgttatgtcattcgaaaagaaaagcccattcttacttgaatgcttgaacgagtactacttgacttacgatgataagtgtttgcgatgcaacggagcagatctcttgacccgagtagctaaacggtttttaaacgggaagaatcggcgtatgaatcaacaggagctgaacattcgaccgtcctctgttttcttcccaatcaactcacaacagatcacaaactattttgcataccctgcaatagaagatgagagatcgcagcaagacgaatcgttcaagaagatactcaatgagtccttaacgttccatttctggaacagcgtaacttcctcactgatccctgaacctgagagccttgtggctaaattgatctcttccgatcatgaatccagtgatttgtctcttccttcttctccatcatcgtcaccttctcaatgtctcgttaaatcggtctgttcattggtttgtacttcctatcttcgtcaaaaccatgtcgtatcatccccacaccgagtcaatctcgacttcgatgctaattctcttacccacgagcaagcgatcactgtggtggcttcactcgcgagcgaatctggttcgatggttgctctgtgcttcttctattgggcagtgggtttcgaaaagttccgacatttcatgagattgtatctcgtaaccgctgattctttgcttgctaatgggaatttgcagaaagctcacgaggttatgcgatgcatgcttagaaatttctcggagattgggagattgaatgaggctgttggtatggttatggatatgcagaatcaggggttaacacctagctcgataactatgaattgtgttctcgaaattgccgttgagttgggtttgattgaatatgcagagaatgtgttcgacgaaatgtctgtgagaggagtagttccggattctagttcttataagcttatggttattggttgttttagagatggtaagattcaggaagctgatagatggttaactggaatgattcaaagaggatttattcctgataacgctacatgtaccttgattctcactgcattgtgtgagaatggtttagtgaatagagcgatttggtatttccgtaagatgattgatctagggtttaagccaaacttgataaattttacgtctttgattgatgggttatgcaagaagggtagtatcaagcaggcttttgaaatgttagaggaaatggttagaaatgggtggaagccaaatgtgtatacacacacggctttaattgatgggctatgtaaaagaggatggactgagaaagcgtttaggctgttcctgaaactcgttcgtagtgatacttacaaacccaatgtgcatacttatacttcgatgattggtgggtattgcaaggaagataagttgaaccgtgcagagatgttgtttagtagaatgaaagaacagggtttgtttccgaacgtgaacacgtatacaacactcatcaatggtcactgtaaagcaggaagcttcggtagagcgtacgagttgatgaatttgatgggtgatgaaggttttatgccgaatatttatacgtataatgcagctattgacagtctctgtaagaaatcaagggcacctgaggcatatgagttgctgaataaagcattttcttgtggattagaagctgatggagttacttacactattcttattcaagaacagtgtaagcaaaatgacattaaccaagctcttgcttttttctgtcggatgaataagactggttttgaagccgatatgcgcctgaacaacatactgatagctgcattttgtaggcaaaagaaaatgaaggaaagtgagaggctttttcagttggtggtgagtcttggattgattccaacgaaggagacttatacgtctatgataagctgttattgtaaagaaggcgacattgatctggctttgaaatattttcacaacatgaagaggcatggttgtgttcctgatagcttcacttatggttcactaataagcggtctctgcaagaagtccatggtagatgaagcttgtaagctttacgaagcgatgattgacagaggtttatctcctcctgaggtaactcgagtcacattagcatatgagtattgtaagaggaatgattcagccaatgcaatgattctgcttgaacctttagataagaagctgtggattagaacggttaggacacttgttagaaagttatgtagcgagaagaaagttggagtggcagctctgttctttcagaaattgttggagaaggacagtagtgctgatcgtgttaccttagctgctttcactacagcttgttctgagtctggcaaaaacaaccttgttactgatttgactgagagaatctccagaggagtaggctag

SEQ ID NO: 69883 - protein, 1302 aa, Arabidopsis thaliana
  peptide (1)..(1302): Ceres Seq. ID no. 2028121
  misc_feature (512)..(648): Pfam Name: Alpha 1,4-glycosyltransferase conserved region Pfam Description: Alpha 1,4-glycosyltransferase conserved region
  misc_feature (314)..(634): Homolog of NCBI NO: 34899808 NR Description: OJ1092_A07.13 [Oryza sativa (japonica
  misc_feature (6)..(271): Homolog of NCBI NO: 34899808 NR Description: OJ1092_A07.13 [Oryza sativa (japonica
  misc_feature (750)..(1228): Homolog of NCBI NO: 15242446 NR Description: putative protein; protein id: At5g39710.1
  misc_feature (639)..(1302): Homolog of NCBI NO: 15238505 NR Description: putative protein; protein id: At5g65560.1
  misc_feature (754)..(1202): Homolog of NCBI NO: 15234269 NR Description: putative protein; protein id: At4g11690.1
  misc_feature (778)..(1265): Homolog of NCBI NO: 15231863 NR Description: putative protein; protein id: At3g53700.1, by cDNA: gi_15982930 [Arabidopsis thaliana]
  misc_feature (755)..(1233): Homolog of NCBI NO: 34394163 NR Description: putative fertility restorer homologue [Oryza
  misc_feature (754)..(1279): Homolog of NCBI NO: 30840327 NR Description: fertility restorer homologue [Raphanus sativus]
  misc_feature (755)..(1296): Homolog of NCBI NO: 15221300 NR Description: hypothetical protein; protein id: At1g74580.1
  misc_feature (813)..(1281): Homolog of NCBI NO: 34015356 NR Description: putative fertility restorer [Oryza sativa
MLRSRRSRSRHGAQACAVMSAVLLLASVSLLYTRLSLFSSHSPNHLRSGSSEDTVLFPDSVLVSDSDVETTGGGGRGSTTSTEDRIDEHDDAIEDDGVSNEEDENQDAEQEQEVDLNRNKAASSSGFYFDHVNGVIRRAFNKRSIDEWDYDYTGFSIDSDSSGDKSSRAAFGSDDVPLDESIRRKIVEVTSVEDALLLKSGKKVSPLRQGWGDWFDKKGDFLRRDRMFKSNIETLNPLNNPMLQDPDSVGNTGLTRGDKVVQKWRLNQIKRNPFMAKKPLSVVSEKKEPNEFRLLSSVGEIKRGERKTLDNDEKIEREEQKNVESERKHDEVTEHMYADGTKWGYYPGIEPSLSFSDFMDSFFRKEKCSMRVFMVWNSPGWMFSVRHQRGLESLLSQHRDACVVVFSETVELDFFRNSFVKDSYKVAVAMPNLDELLQDTPTHVFASVWFDWRKTKFYPTHYSELVRLAALYKYGGVYLDSDVIVLGSLSSLRNTIGMEDQVAGESLNGAVMSFEKKSPFLLECLNEYYLTYDDKCLRCNGADLLTRVAKRFLNGKNRRMNQQELNIRPSSVFFPINSQQITNYFAYPAIEDERSQQDESFKKILNESLTFHFWNSVTSSLIPEPESLVAKLISSDHESSDLSLPSSPSSSPSQCLVKSVCSLVCTSYLRQNHVVSSPHRVNLDFDANSLTHEQAITVVASLASESGSMVALCFFYWAVGFEKFRHFMRLYLVTADSLLANGNLQKAHEVMRCMLRNFSEIGRLNEAVGMVMDMQNQGLTPSSITMNCVLEIAVELGLIEYAENVFDEMSVRGVVPDSSSYKLMVIGCFRDGKIQEADRWLTGMIQRGFIPDNATCTLILTALCENGLVNRAIWYFRKMIDLGFKPNLINFTSLIDGLCKKGSIKQAFEMLEEMVRNGWKPNVYTHTALIDGLCKRGWTEKAFRLFLKLVRSDTYKPNVHTYTSMIGGYCKEDKLNRAEMLFSRMKEQGLFPNVNTYTTLINGHCKAGSFGRAYELMNLMGDEGFMPNIYTYNAAIDSLCKKSRAPEAYELLNKAFSCGLEADGVTYTILIQEQCKQNDINQALAFFCRMNKTGFEADMRLNNILIAAFCRQKKMKESERLFQLVVSLGLIPTKETYTSMISCYCKEGDIDLALKYFHNMKRHGCVPDSFTYGSLISGLCKKSMVDEACKLYEAMIDRGLSPPEVTRVTLAYEYCKRNDSANAMILLEPLDKKLWIRTVRTLVRKLCSEKKVGVAALFFQKLLEKDSSADRVTLAAFTTACSESGKNNLVTDLTERISRGVG

SEQ ID NO: 69884 - protein, 1284 aa, Arabidopsis thaliana
  peptide (1)..(1284): Ceres Seq. ID no. 2028122
  misc_feature (494)..(630): Pfam Name: Alpha 1,4-glycosyltransferase conserved region Pfam Description: Alpha 1,4-glycosyltransferase conserved region
  misc_feature (296)..(616): Homolog of NCBI NO: 34899808 NR Description: OJ1092_A07.13 [Oryza sativa (japonica
  misc_feature (1)..(253): Homolog of NCBI NO: 34899808 NR Description: OJ1092_A07.13 [Oryza sativa (japonica
  misc_feature (732)..(1210): Homolog of NCBI NO: 15242446 NR Description: putative protein; protein id: At5g39710.1
  misc_feature (621)..(1284): Homolog of NCBI NO: 15238505 NR Description: putative protein; protein id: At5g65560.1
  misc_feature (736)..(1184): Homolog of NCBI NO: 15234269 NR Description: putative protein; protein id: At4g11690.1
  misc_feature (760)..(1247): Homolog of NCBI NO: 15231863 NR Description: putative protein; protein id: At3g53700.1, by cDNA: gi_15982930 [Arabidopsis thaliana]
  misc_feature (737)..(1215): Homolog of NCBI NO: 34394163 NR Description: putative fertility restorer homologue [Oryza
  misc_feature (736)..(1261): Homolog of NCBI NO: 30840327 NR Description: fertility restorer homologue [Raphanus sativus]
  misc_feature (737)..(1278): Homolog of NCBI NO: 15221300 NR Description: hypothetical protein; protein id: At1g74580.1
  misc_feature (795)..(1263): Homolog of NCBI NO: 34015356 NR Description: putative fertility restorer [Oryza sativa
MSAVLLLASVSLLYTRLSLFSSHSPNHLRSGSSEDTVLFPDSVLVSDSDVETTGGGGRGSTTSTEDRIDEHDDAIEDDGVSNEEDENQDAEQEQEVDLNRNKAASSSGFYFDHVNGVIRRAFNKRSIDEWDYDYTGFSIDSDSSGDKSSRAAFGSDDVPLDESIRRKIVEVTSVEDALLLKSGKKVSPLRQGWGDWFDKKGDFLRRDRMFKSNIETLNPLNNPMLQDPDSVGNTGLTRGDKVVQKWRLNQIKRNPFMAKKPLSVVSEKKEPNEFRLLSSVGEIKRGERKTLDNDEKIEREEQKNVESERKHDEVTEHMYADGTKWGYYPGIEPSLSFSDFMDSFFRKEKCSMRVFMVWNSPGWMFSVRHQRGLESLLSQHRDACVVVFSETVELDFFRNSFVKDSYKVAVAMPNLDELLQDTPTHVFASVWFDWRKTKFYPTHYSELVRLAALYKYGGVYLDSDVIVLGSLSSLRNTIGMEDQVAGESLNGAVMSFEKKSPFLLECLNEYYLTYDDKCLRCNGADLLTRVAKRFLNGKNRRMNQQELNIRPSSVFFPINSQQITNYFAYPAIEDERSQQDESFKKILNESLTFHFWNSVTSSLIPEPESLVAKLISSDHESSDLSLPSSPSSSPSQCLVKSVCSLVCTSYLRQNHVVSSPHRVNLDFDANSLTHEQAITVVASLASESGSMVALCFFYWAVGFEKFRHFMRLYLVTADSLLANGNLQKAHEVMRCMLRNFSEIGRLNEAVGMVMDMQNQGLTPSSITMNCVLEIAVELGLIEYAENVFDEMSVRGVVPDSSSYKLMVIGCFRDGKIQEADRWLTGMIQRGFIPDNATCTLILTALCENGLVNRAIWYFRKMIDLGFKPNLINFTSLIDGLCKKGSIKQAFEMLEEMVRNGWKPNVYTHTALIDGLCKRGWTEKAFRLFLKLVRSDTYKPNVHTYTSMIGGYCKEDKLNRAEMLFSRMKEQGLFPNVNTYTTLINGHCKAGSFGRAYELMNLMGDEGFMPNIYTYNAAIDSLCKKSRAPEAYELLNKAFSCGLEADGVTYTILIQEQCKQNDINQALAFFCRMNKTGFEADMRLNNILIAAFCRQKKMKESERLFQLVVSLGLIPTKETYTSMISCYCKEGDIDLALKYFHNMKRHGCVPDSFTYGSLISGLCKKSMVDEACKLYEAMIDRGLSPPEVTRVTLAYEYCKRNDSANAMILLEPLDKKLWIRTVRTLVRKLCSEKKVGVAALFFQKLLEKDSSADRVTLAAFTTACSESGKNNLVTDLTERISRGVG

SEQ ID NO: 69885 - protein, 1076 aa, Arabidopsis thaliana
  peptide (1)..(1076): Ceres Seq. ID no. 2028123
  misc_feature (286)..(422): Pfam Name: Alpha 1,4-glycosyltransferase conserved region Pfam Description: Alpha 1,4-glycosyltransferase conserved region
  misc_feature (88)..(408): Homolog of NCBI NO: 34899808 NR Description: OJ1092_A07.13 [Oryza sativa (japonica
  misc_feature (1)..(45): Homolog of NCBI NO: 34899808 NR Description: OJ1092_A07.13 [Oryza sativa (japonica
  misc_feature (524)..(1002): Homolog of NCBI NO: 15242446 NR Description: putative protein; protein id: At5g39710.1
  misc_feature (413)..(1076): Homolog of NCBI NO: 15238505 NR Description: putative protein; protein id: At5g65560.1
  misc_feature (528)..(976): Homolog of NCBI NO: 15234269 NR Description: putative protein; protein id: At4g11690.1
  misc_feature (552)..(1039): Homolog of NCBI NO: 15231863 NR Description: putative protein; protein id: At3g53700.1, by cDNA: gi_15982930 [Arabidopsis thaliana]
  misc_feature (529)..(1007): Homolog of NCBI NO: 34394163 NR Description: putative fertility restorer homologue [Oryza
  misc_feature (528)..(1053): Homolog of NCBI NO: 30840327 NR Description: fertility restorer homologue [Raphanus sativus]
  misc_feature (529)..(1070): Homolog of NCBI NO: 15221300 NR Description: hypothetical protein; protein id: At1g74580.1
  misc_feature (587)..(1055): Homolog of NCBI NO: 34015356 NR Description: putative fertility restorer [Oryza sativa
MFKSNIETLNPLNNPMLQDPDSVGNTGLTRGDKVVQKWRLNQIKRNPFMAKKPLSVVSEKKEPNEFRLLSSVGEIKRGERKTLDNDEKIEREEQKNVESERKHDEVTEHMYADGTKWGYYPGIEPSLSFSDFMDSFFRKEKCSMRVFMVWNSPGWMFSVRHQRGLESLLSQHRDACVVVFSETVELDFFRNSFVKDSYKVAVAMPNLDELLQDTPTHVFASVWFDWRKTKFYPTHYSELVRLAALYKYGGVYLDSDVIVLGSLSSLRNTIGMEDQVAGESLNGAVMSFEKKSPFLLECLNEYYLTYDDKCLRCNGADLLTRVAKRFLNGKNRRMNQQELNIRPSSVFFPINSQQITNYFAYPAIEDERSQQDESFKKILNESLTFHFWNSVTSSLIPEPESLVAKLISSDHESSDLSLPSSPSSSPSQCLVKSVCSLVCTSYLRQNHVVSSPHRVNLDFDANSLTHEQAITVVASLASESGSMVALCFFYWAVGFEKFRHFMRLYLVTADSLLANGNLQKAHEVMRCMLRNFSEIGRLNEAVGMVMDMQNQGLTPSSITMNCVLEIAVELGLIEYAENVFDEMSVRGVVPDSSSYKLMVIGCFRDGKIQEADRWLTGMIQRGFIPDNATCTLILTALCENGLVNRAIWYFRKMIDLGFKPNLINFTSLIDGLCKKGSIKQAFEMLEEMVRNGWKPNVYTHTALIDGLCKRGWTEKAFRLFLKLVRSDTYKPNVHTYTSMIGGYCKEDKLNRAEMLFSRMKEQGLFPNVNTYTTLINGHCKAGSFGRAYELMNLMGDEGFMPNIYTYNAAIDSLCKKSRAPEAYELLNKAFSCGLEADGVTYTILIQEQCKQNDINQALAFFCRMNKTGFEADMRLNNILIAAFCRQKKMKESERLFQLVVSLGLIPTKETYTSMISCYCKEGDIDLALKYFHNMKRHGCVPDSFTYGSLISGLCKKSMVDEACKLYEAMIDRGLSPPEVTRVTLAYEYCKRNDSANAMILLEPLDKKLWIRTVRTLVRKLCSEKKVGVAALFFQKLLEKDSSADRVTLAAFTTACSESGKNNLVTDLTERISRGVG

SEQ ID NO: 69886 - DNA, 1431 bp, Arabidopsis thaliana
  misc_feature (1)..(1431): Ceres Seq. ID no. 1989637
  misc_feature: MA Experiment ID: 20000185 Result: Up-regulated in Transcription
  misc_feature: MA Experiment 20000185 PARAMETER Experiment Name: At_Roots__P Parameter: Age (day) Value: 7 vs. 21
  misc_feature: MA Experiment 20000185 PARAMETER Experiment Name: At_Roots__P Parameter: Organism Value: A. thaliana
  misc_feature: MA Experiment 20000185 PARAMETER Experiment Name: At_Roots__P Parameter: Tissue Value: Roots vs. Whole Plant
  misc_feature: MA Experiment ID: 20000439 Result: Up-regulated in Transcription
  misc_feature: MA Experiment 20000439 PARAMETER Experiment Name: At_Roots__P Parameter: Age (day) Value: 14 vs. 21
  misc_feature: MA Experiment 20000439 PARAMETER Experiment Name: At_Roots__P Parameter: Organism Value: A. thaliana
  misc_feature: MA Experiment 20000439 PARAMETER Experiment Name: At_Roots__P Parameter: Tissue Value: Roots vs. Whole Plant
  misc_feature: MA Experiment ID: 20001247 Result: Up-regulated in Transcription
  misc_feature: MA Experiment 20001247 PARAMETER Experiment Name: At_Far-red-induction_P Parameter: Age (day) Value: 7
  misc_feature: MA Experiment 20001247 PARAMETER Experiment Name: At_Far-red-induction_P Parameter: Light Value: Far-red vs. White
  misc_feature: MA Experiment 20001247 PARAMETER Experiment Name: At_Far-red-induction_P Parameter: Organism Value: A. thaliana
  misc_feature: MA Experiment 20001247 PARAMETER Experiment Name: At_Far-red-induction_P Parameter: Plant Line Value: Columbia
  misc_feature: MA Experiment 20001247 PARAMETER Experiment Name: At_Far-red-induction_P Parameter: Timepoint (hr) Value: 1
  misc_feature: MA Experiment 20001247 PARAMETER Experiment Name: At_Far-red-induction_P Parameter: Tissue Value: Whole Plant
atgttagagatcattacggtaagaaaagtgttcttgatcggattcttgatcttgatactgaattgggtatggagagctgtgaattgggtttggttaaggccaaagagactggagaaatatctgaagaaacaaggattctctgggaattcttatagaattttaatgggagatatgagagagagtaatcagatggatcaagttgctcactctcttcctcttcctctcgacgccgattttctccctcgcatgatgccttttctccaccacactgttctaaaacatgggaagaagtgtttcacatggtacggaccgtacccgaacgtgatagtaatggatccagagacactccgagagattatgtcaaaacacgaactctttccaaaaccaaagatcgggtcacataatcatgttttcctaagtggtcttctcaatcacgaaggtcctaaatggtccaagcatcgaagcattcttaatcctgcttttcgtattgataatttgaagagcatactaccagcatttaactcgagttgcaaagaaatgttagaagaatgggagagattagcctcagcaaaaggaacaatggaacttgattcatggactcactgtcatgacttaaccagaaacatgcttgctcgtgcttcttttggtgattcctacaaagatggtatcaagatcttcgaaatccaacaagaacagattgatcttggtctccttgctattcgagccgtctacattcctggctcaaagtttttgccaacaaagttcaacaggaggttgagagaaaccgaaagggacatgagggctatgtttaaagcgatgattgagacaaaagaggaggagataaaaagaggaagagctggtcaaaatgtgacttcttcattgtttgtttggacacttgttgctctaagccaacatcaagattggcaaaacaaagcaagagacgagatttctcaggccttcggtaacaacgaacccgatttcgaagggctaagccacctgaaagtcgtaacaatgatcctccatgaagttctacgactctattcaccagcttacttcacatgtcggataactaaacaagaagtgaagctagagagattctctttacctgaaggagttgtagtaacaataccaatgctcttggtgcaccatgattctgatctttggggagacgatgtgaaagagtttaagcccgagagattcgccaatggcgtggcgggtgcaaccaaaggaagactctccttcttgccatttagctcgggccctcggacttgtatcggtcagaacttttcgatgttgcaagctaaactcttcttggcaatggtacttcaaaggttcagtgttgaactctctccatcgtatactcatgctcctttcccagctgcaactacatttccacaacatggagctcatttgatcatccgaaaactgtag

SEQ ID NO: 69887 - protein, 476 aa, Arabidopsis thaliana
  peptide (1)..(476): Ceres Seq. ID no. 2028493
  misc_feature (88)..(289): Pfam Name: Cytochrome P450 Pfam Description: Cytochrome P450
  misc_feature (1)..(476): Homolog of NCBI NO: 15220009 NR Description: cytochrome P450, putative; protein id: [Arabidopsis thaliana] >gi|25282661|pir||D86306 Similar to
  misc_feature (5)..(286): Homolog of NCBI NO: 15231907 NR Description: cytochrome P450, putative; protein id: supported by cDNA: gi_15292786, supported by cDNA: gi_20465786 thaliana] >gi|9294391|dbj|BAB02401.1| cytochrome P450
  misc_feature (237)..(476): Homolog of NCBI NO: 15231907 NR Description: cytochrome P450, putative; protein id: supported by cDNA: gi_15292786, supported by cDNA: gi_20465786 thaliana] >gi|9294391|dbj|BAB02401.1| cytochrome P450
  misc_feature (5)..(289): Homolog of NCBI NO: 15231899 NR Description: cytochrome P450, putative; protein id:
  misc_feature (286)..(476): Homolog of NCBI NO: 15231899 NR Description: cytochrome P450, putative; protein id:
  misc_feature (2)..(289): Homolog of NCBI NO: 7430703 NR Description: cytochrome P450 - Madagascar periwinkle
  misc_feature (286)..(476): Homolog of NCBI NO: 7430703 NR Description: cytochrome P450 - Madagascar periwinkle
  misc_feature (2)..(289): Homolog of NCBI NO: 461812 NR Description: Cytochrome P450 72A1 (CYPLXXII) (Secologanin
  misc_feature (286)..(476): Homolog of NCBI NO: 461812 NR Description: Cytochrome P450 72A1 (CYPLXXII) (Secologanin
  misc_feature (18)..(289): Homolog of NCBI NO: 7488960 NR Description: cytochrome P450 (CYP72C) - Madagascar periwinkle
MLEIITVRKVFLIGFLILILNWVWRAVNWVWLRPKRLEKYLKKQGFSGNSYRILMGDMRESNQMDQVAHSLPLPLDADFLPRMMPFLHHTVLKHGKKCFTWYGPYPNVIVMDPETLREIMSKHELFPKPKIGSHNHVFLSGLLNHEGPKWSKHRSILNPAFRIDNLKSILPAFNSSCKEMLEEWERLASAKGTMELDSWTHCHDLTRNMLARASFGDSYKDGIKIFEIQQEQIDLGLLAIRAVYIPGSKFLPTKFNRRLRETERDMRAMFKAMIETKEEEIKRGRAGQNVTSSLFVWTLVALSQHQDWQNKARDEISQAFGNNEPDFEGLSHLKVVTMILHEVLRLYSPAYFTCRITKQEVKLERFSLPEGVVVTIPMLLVHHDSDLWGDDVKEFKPERFANGVAGATKGRLSFLPFSSGPRTCIGQNFSMLQAKLFLAMVLQRFSVELSPSYTHAPFPAATTFPQHGAHLIIRKL

SEQ ID NO: 69888 - protein, 422 aa, Arabidopsis thaliana
  peptide (1)..(422): Ceres Seq. ID no. 2028494
  misc_feature (34)..(235): Pfam Name: Cytochrome P450 Pfam Description: Cytochrome P450
  misc_feature (1)..(422): Homolog of NCBI NO: 15220009 NR Description: cytochrome P450, putative; protein id: [Arabidopsis thaliana] >gi|25282661|pir||D86306 Similar to
  misc_feature (1)..(232): Homolog of NCBI NO: 15231907 NR Description: cytochrome P450, putative; protein id: supported by cDNA: gi_15292786, supported by cDNA: gi_20465786 thaliana] >gi|9294391|dbj|BAB02401.1| cytochrome P450
  misc_feature (183)..(422): Homolog of NCBI NO: 15231907 NR Description: cytochrome P450, putative; protein id: supported by cDNA: gi_15292786, supported by cDNA: gi_20465786 thaliana] >gi|9294391|dbj|BAB02401.1| cytochrome P450
  misc_feature (1)..(235): Homolog of NCBI NO: 15231899 NR Description: cytochrome P450, putative; protein id:
  misc_feature (232)..(422): Homolog of NCBI NO: 15231899 NR Description: cytochrome P450, putative; protein id:
  misc_feature (1)..(235): Homolog of NCBI NO: 7430703 NR Description: cytochrome P450 - Madagascar periwinkle
  misc_feature (232)..(422): Homolog of NCBI NO: 7430703 NR Description: cytochrome P450 - Madagascar periwinkle
  misc_feature (1)..(235): Homolog of NCBI NO: 461812 NR Description: Cytochrome P450 72A1 (CYPLXXII) (Secologanin
  misc_feature (232)..(422): Homolog of NCBI NO: 461812 NR Description: Cytochrome P450 72A1 (CYPLXXII) (Secologanin
  misc_feature (1)..(235): Homolog of NCBI NO: 7488960 NR Description: cytochrome P450 (CYP72C) - Madagascar periwinkle
MGDMRESNQMDQVAHSLPLPLDADFLPRMMPFLHHTVLKHGKKCFTWYGPYPNVIVMDPETLREIMSKHELFPKPKIGSHNHVFLSGLLNHEGPKWSKHRSILNPAFRIDNLKSILPAFNSSCKEMLEEWERLASAKGTMELDSWTHCHDLTRNMLARASFGDSYKDGIKIFEIQQEQIDLGLLAIRAVYIPGSKFLPTKFNRRLRETERDMRAMFKAMIETKEEEIKRGRAGQNVTSSLFVWTLVALSQHQDWQNKARDEISQAFGNNEPDFEGLSHLKVVTMILHEVLRLYSPAYFTCRITKQEVKLERFSLPEGVVVTIPMLLVHHDSDLWGDDVKEFKPERFANGVAGATKGRLSFLPFSSGPRTCIGQNFSMLQAKLFLAMVLQRFSVELSPSYTHAPFPAATTFPQHGAHLIIRKL

SEQ ID NO: 69889 - protein, 419 aa, Arabidopsis thaliana
  peptide (1)..(419): Ceres Seq. ID no. 2028495
  misc_feature (31)..(232): Pfam Name: Cytochrome P450 Pfam Description: Cytochrome P450
  misc_feature (1)..(419): Homolog of NCBI NO: 15220009 NR Description: cytochrome P450, putative; protein id: [Arabidopsis thaliana] >gi|25282661|pir||D86306 Similar to
  misc_feature (1)..(229): Homolog of NCBI NO: 15231907 NR Description: cytochrome P450, putative; protein id: supported by cDNA: gi_15292786, supported by cDNA: gi_20465786 thaliana] >gi|9294391|dbj|BAB02401.1| cytochrome P450
  misc_feature (180)..(419): Homolog of NCBI NO: 15231907 NR Description: cytochrome P450, putative; protein id: supported by cDNA: gi_15292786, supported by cDNA: gi_20465786 thaliana] >gi|9294391|dbj|BAB02401.1| cytochrome P450
  misc_feature (1)..(232): Homolog of NCBI NO: 15231899 NR Description: cytochrome P450, putative; protein id:
  misc_feature (229)..(419): Homolog of NCBI NO: 15231899 NR Description: cytochrome P450, putative; protein id:
  misc_feature (1)..(232): Homolog of NCBI NO: 7430703 NR Description: cytochrome P450 - Madagascar periwinkle
  misc_feature (229)..(419): Homolog of NCBI NO: 7430703 NR Description: cytochrome P450 - Madagascar periwinkle
  misc_feature (1)..(232): Homolog of NCBI NO: 461812 NR Description: Cytochrome P450 72A1 (CYPLXXII) (Secologanin
  misc_feature (229)..(419): Homolog of NCBI NO: 461812 NR Description: Cytochrome P450 72A1 (CYPLXXII) (Secologanin
  misc_feature (1)..(232): Homolog of NCBI NO: 7488960 NR Description: cytochrome P450 (CYP72C) - Madagascar periwinkle
MRESNQMDQVAHSLPLPLDADFLPRMMPFLHHTVLKHGKKCFTWYGPYPNVIVMDPETLREIMSKHELFPKPKIGSHNHVFLSGLLNHEGPKWSKHRSILNPAFRIDNLKSILPAFNSSCKEMLEEWERLASAKGTMELDSWTHCHDLTRNMLARASFGDSYKDGIKIFEIQQEQIDLGLLAIRAVYIPGSKFLPTKFNRRLRETERDMRAMFKAMIETKEEEIKRGRAGQNVTSSLFVWTLVALSQHQDWQNKARDEISQAFGNNEPDFEGLSHLKVVTMILHEVLRLYSPAYFTCRITKQEVKLERFSLPEGVVVTIPMLLVHHDSDLWGDDVKEFKPERFANGVAGATKGRLSFLPFSSGPRTCIGQNFSMLQAKLFLAMVLQRFSVELSPSYTHAPFPAATTFPQHGAHLIIRKL

SEQ ID NO: 69890 - DNA, 846 bp, Arabidopsis thaliana
  misc_feature (1)..(846): Ceres Seq. ID no. 1989714
atgacgacgttcaattactatttagcggagcatccaacgatcgttaacttccgttggagtccaacccaatcctacgcctccacgtggtctttcctcttcaccgccgtctcatcttacatcatcgccgccgtcactctccacctcctcctcctcataaccctctccctctctaaccgccgccgcggattctccctcggtccaatcccagctctacacagcttaaccatttccataatctccgccgtcatattcgtcggtatcctcctctccgccgcagcagagatcagagacacgcggtggctatggcgtcgcacccgcaccactgctctccaatggttcctctgctttcccgtaggtacacgcgcttcgggacgcgtgttcttctggtcatacgcgttttacctctcaagattccttcacttgttccgtactttcttctccgtgatacgacgtcgtaaactcagcttcttccagcttatcaaccagtcttctcttctctgtatctccttcctctggctcgaatattcccaatcctttcaggtggtagcgatactattaacgaccgtttcgtacgccgttgtgtacggttacaggttctggacggagattgggttgcgtggcgcgtgttttccgtttgtcggaaactgtcaagccattctgttagggtgtatgacggtttgccacgtaggcgtactctgtatacacctggtcaaacgcggcggttgtaacggtatcggtgcttggttgtttaactctgttcttaacgccgttatcacgttgctctacttgaagttttattgcaagacgcgttcaatgatgaccaaggctaatcacaacaccacataa

SEQ ID NO: 69891 - protein, 281 aa, Arabidopsis thaliana
  peptide (1)..(281): Ceres Seq. ID no. 2037343
  misc_feature (1)..(256): Pfam Name: GNS1/SUR4 family Pfam Description: GNS1/SUR4 family
  misc_feature (1)..(281): Homolog of NCBI NO: 15222085 NR Description: hypothetical protein; protein id: At1g75000.1
  misc_feature (1)..(275): Homolog of NCBI NO: 15234538 NR Description: putative protein; protein id: At4g36830.1
  misc_feature (2)..(268): Homolog of NCBI NO: 15230729 NR Description: unknown protein; protein id: At3g06470.1 thaliana] >gi|6437542|gb|AAF08569.1|AC011623_2 unknown protein
  misc_feature (8)..(266): Homolog of NCBI NO: 19033556 NR Description: putative long chain fatty acid elongation enzyme
  misc_feature (2)..(274): Homolog of NCBI NO: 15230725 NR Description: unknown protein; protein id: At3g06460.1, by cDNA: gi_18252966 [Arabidopsis thaliana] unknown protein [Arabidopsis thaliana]
  misc_feature (30)..(276): Homolog of NCBI NO: 19569971 NR Description: Hypothetical 36.2 kDa protein in UBP12-CDC6 region. [Dictyostelium discoideum] >gi|28829059|gb|AAM43611.2|
  misc_feature (29)..(281): Homolog of NCBI NO: 28828933 NR Description: similar to GNS1/SUR4 family protein
MTTFNYYLAEHPTIVNFRWSPTQSYASTWSFLFTAVSSYIIAAVTLHLLLLITLSLSNRRRGFSLGPIPALHSLTISIISAVIFVGILLSAAAEIRDTRWLWRRTRTTALQWFLCFPVGTRASGRVFFWSYAFYLSRFLHLFRTFFSVIRRRKLSFFQLINQSSLLCISFLWLEYSQSFQVVAILLTTVSYAVVYGYRFWTEIGLRGACFPFVGNCQAILLGCMTVCHVGVLCIHLVKRGGCNGIGAWLFNSVLNAVITLLYLKFYCKTRSMMTKANHNTT

SEQ ID NO: 69892 - DNA, 1542 bp, Arabidopsis thaliana
  misc_feature (1)..(1542): Ceres Seq. ID no. 1989744
  misc_feature: MA Experiment ID: 20000307 Result: Up-regulated in Transcription
  misc_feature: MA Experiment 20000307 PARAMETER Experiment Name: At_Germinating_Seeds_Sub_P Parameter: Age (hr) Value: 24 vs. 0
  misc_feature: MA Experiment 20000307 PARAMETER Experiment Name: At_Germinating_Seeds_Sub_P Parameter: Organism Value: A. thaliana
  misc_feature: MA Experiment 20000307 PARAMETER Experiment Name: At_Germinating_Seeds_Sub_P Parameter: Plant Line Value: WS
  misc_feature: MA Experiment 20000307 PARAMETER Experiment Name: At_Germinating_Seeds_Sub_P Parameter: Tissue Value: Germinating Seeds
  misc_feature: MA Experiment ID: 20000314 Result: Up-regulated in Transcription
  misc_feature: MA Experiment 20000314 PARAMETER Experiment Name: At_14day_Shoots-Roots_Sub_P Parameter: Age (day) Value: 14
  misc_feature: MA Experiment 20000314 PARAMETER Experiment Name: At_14day_Shoots-Roots_Sub_P Parameter: Organism Value: A. thaliana
  misc_feature: MA Experiment 20000314 PARAMETER Experiment Name: At_14day_Shoots-Roots_Sub_P Parameter: Plant Line Value: WS
  misc_feature: MA Experiment 20000314 PARAMETER Experiment Name: At_14day_Shoots-Roots_Sub_P Parameter: Tissue Value: Roots vs. Whole Plant
atgggtgtgattagaacctcaagaacgatggggttaggacagtgcatggtttatgttgtcgtcctaagtgccattgcggctacagtgacatcatacccttacacatcccctcaaactccacattacaattctccaagccatgaacacaaaatccctaagtacacaccacatccaaaaccatctatttacagctcttcaccacctccatcatactactctccttctccaaaggttgattacaagtctccaccaccatcatacgtttacagttccccaccaccaccatactactctccgtctccaaaggttgactacaagtccctaccacccccatacgtctacagttccccacccccaccatactactctccttcaccaaaggttaactacaagtctccaccgccaccatacgtctacagctctccaccaccaccatactacagtccatctccaaagggtgactacaagtctccaccacccccatacgtctacagttccccacccccaccatactactctccttctccaaaggttgactacaagtctccaccaccaccatacgtctacagctccccaccaccaccatactacagtccaactccaaaggttgactacaagtccccaccacccccatacgtctacagctccccacccccaccatactacagtccatctccaaaggttgactacaagtctccaccaccaccatacgtctacagctccccacccccaccatactactctccttcaccaaaggttaactacaagtctccaccaccaccatactacagatctccaccaccaccatactacagtccatctccaaaggttgattacaagtccccaccacccccatacgtctacagttccccacccccaccatactactctccttctccaaaggttgactacaagtctccaccaccaccatacgtctacagctccccaccaccaccatactacagtccaactccaaaggttgactacaagtccccaccacccccatacgtctacagctccccaccaccaccatactatagtccatctccaaaggttgactacaagtccccaccacccccatacgtctacagttccccacccccaccatactactctccttcaccaaaagttgactataagtctccaccaccaccatacgtctataactccccacccccaccatattactctccttctccaaaagttgactacaagtctccacctccaccatacatctataactccccacccccaccatattattctccttcaccaaaggtaaactacaaaactccaccaccaccatacgtctatagctccccaccaccaccatactactctccttctccaaaggttaactacaagtccccaccaccaccatatgtctacagctccccacctccaccgtactactccccttctccaaatgtcgactacaaatctcccccaccaccatatgtctacagctcaccacccacaccatactactctccttcttctaaagtcacttacaagtctcccccaccaccatatgtctactag

SEQ ID NO: 69893 - protein, 513 aa, Arabidopsis thaliana
  peptide (1)..(513): Ceres Seq. ID no. 2028747
  misc_feature (142)..(444): Pfam Name: Formin Homology 2 Domain Pfam Description: Formin Homology 2 Domain
  misc_feature (32)..(513): Homolog of NCBI NO: 15239790 NR Description: putative protein; protein id: At5g49080.1 thaliana] >gi|10176941|dbj|BAB10090.1|
  misc_feature (32)..(513): Homolog of NCBI NO: 15239790 NR Description: putative protein; protein id: At5g49080.1 thaliana] >gi|10176941|dbj|BAB10090.1|
  misc_feature (1)..(513): Homolog of NCBI NO: 15236488 NR Description: extensin-like protein; protein id: At4g08410.1
  misc_feature (10)..(513): Homolog of NCBI NO: 15239790 NR Description: putative protein; protein id: At5g49080.1 thaliana] >gi|10176941|dbj|BAB10090.1|
  misc_feature (32)..(513): Homolog of NCBI NO: 15239790 NR Description: putative protein; protein id: At5g49080.1 thaliana] >gi|10176941|dbj|BAB10090.1|
  misc_feature (32)..(513): Homolog of NCBI NO: 15239790 NR Description: putative protein; protein id: At5g49080.1 thaliana] >gi|10176941|dbj|BAB10090.1|
  misc_feature (10)..(513): Homolog of NCBI NO: 15224658 NR Description: unknown protein; protein id: At2g24980.1
  misc_feature (1)..(513): Homolog of NCBI NO: 15240117 NR Description: putative protein; protein id: At5g06640.1 thaliana] >gi|10178120|dbj|BAB11413.1|
  misc_feature (1)..(513): Homolog of NCBI NO: 15236486 NR Description: extensin-like protein; protein id: At4g08400.1
  misc_feature (32)..(513): Homolog of NCBI NO: 15236488 NR Description: extensin-like protein; protein id: At4g08410.1
MGVIRTSRTMGLGQCMVYVVVLSAIAATVTSYPYTSPQTPHYNSPSHEHKIPKYTPHPKPSIYSSSPPPSYYSPSPKVDYKSPPPSYVYSSPPPPYYSPSPKVDYKSLPPPYVYSSPPPPYYSPSPKVNYKSPPPPYVYSSPPPPYYSPSPKGDYKSPPPPYVYSSPPPPYYSPSPKVDYKSPPPPYVYSSPPPPYYSPTPKVDYKSPPPPYVYSSPPPPYYSPSPKVDYKSPPPPYVYSSPPPPYYSPSPKVNYKSPPPPYYRSPPPPYYSPSPKVDYKSPPPPYVYSSPPPPYYSPSPKVDYKSPPPPYVYSSPPPPYYSPTPKVDYKSPPPPYVYSSPPPPYYSPSPKVDYKSPPPPYVYSSPPPPYYSPSPKVDYKSPPPPYVYNSPPPPYYSPSPKVDYKSPPPPYIYNSPPPPYYSPSPKVNYKTPPPPYVYSSPPPPYYSPSPKVNYKSPPPPYVYSSPPPPYYSPSPNVDYKSPPPPYVYSSPPTPYYSPSSKVTYKSPPPPYVY

SEQ ID NO: 69894 - protein, 504 aa, Arabidopsis thaliana
  peptide (1)..(504): Ceres Seq. ID no. 2028748
  misc_feature (133)..(435): Pfam Name: Formin Homology 2 Domain Pfam Description: Formin Homology 2 Domain
  misc_feature (1)..(504): Homolog of NCBI NO: 15236486 NR Description: extensin-like protein; protein id: At4g08400.1
  misc_feature (1)..(504): Homolog of NCBI NO: 15236488 NR Description: extensin-like protein; protein id: At4g08410.1
  misc_feature (1)..(504): Homolog of NCBI NO: 15240117 NR Description: putative protein; protein id: At5g06640.1 thaliana] >gi|10178120|dbj|BAB11413.1|
  misc_feature (1)..(504): Homolog of NCBI NO: 15239790 NR Description: putative protein; protein id: At5g49080.1 thaliana] >gi|10176941|dbj|BAB10090.1|
  misc_feature (1)..(504): Homolog of NCBI NO: 15224658 NR Description: unknown protein; protein id: At2g24980.1
  misc_feature (23)..(504): Homolog of NCBI NO: 15239790 NR Description: putative protein; protein id: At5g49080.1 thaliana] >gi|10176941|dbj|BAB10090.1|
  misc_feature (23)..(504): Homolog of NCBI NO: 15239790 NR Description: putative protein; protein id: At5g49080.1 thaliana] >gi|10176941|dbj|BAB10090.1|
  misc_feature (23)..(504): Homolog of NCBI NO: 15239790 NR Description: putative protein; protein id: At5g49080.1 thaliana] >gi|10176941|dbj|BAB10090.1|
  misc_feature (23)..(504): Homolog of NCBI NO: 15239790 NR Description: putative protein; protein id: At5g49080.1 thaliana] >gi|10176941|dbj|BAB10090.1|
  misc_feature (23)..(504): Homolog of NCBI NO: 15236488 NR Description: extensin-like protein; protein id: At4g08410.1
MGLGQCMVYVVVLSAIAATVTSYPYTSPQTPHYNSPSHEHKIPKYTPHPKPSIYSSSPPPSYYSPSPKVDYKSPPPSYVYSSPPPPYYSPSPKVDYKSLPPPYVYSSPPPPYYSPSPKVNYKSPPPPYVYSSPPPPYYSPSPKGDYKSPPPPYVYSSPPPPYYSPSPKVDYKSPPPPYVYSSPPPPYYSPTPKVDYKSPPPPYVYSSPPPPYYSPSPKVDYKSPPPPYVYSSPPPPYYSPSPKVNYKSPPPPYYRSPPPPYYSPSPKVDYKSPPPPYVYSSPPPPYYSPSPKVDYKSPPPPYVYSSPPPPYYSPTPKVDYKSPPPPYVYSSPPPPYYSPSPKVDYKSPPPPYVYSSPPPPYYSPSPKVDYKSPPPPYVYNSPPPPYYSPSPKVDYKSPPPPYIYNSPPPPYYSPSPKVNYKTPPPPYVYSSPPPPYYSPSPKVNYKSPPPPYVYSSPPPPYYSPSPNVDYKSPPPPYVYSSPPTPYYSPSSKVTYKSPPPPYVY

SEQ ID NO: 69895 - protein, 498 aa, Arabidopsis thaliana
  peptide (1)..(498): Ceres Seq. ID no. 2028749
  misc_feature (127)..(429): Pfam Name: Formin Homology 2 Domain Pfam Description: Formin Homology 2 Domain
  misc_feature (1)..(498): Homolog of NCBI NO: 15236486 NR Description: extensin-like protein; protein id: At4g08400.1
  misc_feature (1)..(498): Homolog of NCBI NO: 15236488 NR Description: extensin-like protein; protein id: At4g08410.1
  misc_feature (1)..(498): Homolog of NCBI NO: 15240117 NR Description: putative protein; protein id: At5g06640.1 thaliana] >gi|10178120|dbj|BAB11413.1|
  misc_feature (1)..(498): Homolog of NCBI NO: 15239790 NR Description: putative protein; protein id: At5g49080.1 thaliana] >gi|10176941|dbj|BAB10090.1|
  misc_feature (1)..(498): Homolog of NCBI NO: 15224658 NR Description: unknown protein; protein id: At2g24980.1
  misc_feature (17)..(498): Homolog of NCBI NO: 15239790 NR Description: putative protein; protein id: At5g49080.1 thaliana] >gi|10176941|dbj|BAB10090.1|
  misc_feature (17)..(498): Homolog of NCBI NO: 15239790 NR Description: putative protein; protein id: At5g49080.1 thaliana] >gi|10176941|dbj|BAB10090.1|
  misc_feature (17)..(498): Homolog of NCBI NO: 15239790 NR Description: putative protein; protein id: At5g49080.1 thaliana] >gi|10176941|dbj|BAB10090.1|
  misc_feature (17)..(498): Homolog of NCBI NO: 15239790 NR Description: putative protein; protein id: At5g49080.1 thaliana] >gi|10176941|dbj|BAB10090.1|
  misc_feature (17)..(498): Homolog of NCBI NO: 15236488 NR Description: extensin-like protein; protein id: At4g08410.1
MVYVVVLSAIAATVTSYPYTSPQTPHYNSPSHEHKIPKYTPHPKPSIYSSSPPPSYYSPSPKVDYKSPPPSYVYSSPPPPYYSPSPKVDYKSLPPPYVYSSPPPPYYSPSPKVNYKSPPPPYVYSSPPPPYYSPSPKGDYKSPPPPYVYSSPPPPYYSPSPKVDYKSPPPPYVYSSPPPPYYSPTPKVDYKSPPPPYVYSSPPPPYYSPSPKVDYKSPPPPYVYSSPPPPYYSPSPKVNYKSPPPPYYRSPPPPYYSPSPKVDYKSPPPPYVYSSPPPPYYSPSPKVDYKSPPPPYVYSSPPPPYYSPTPKVDYKSPPPPYVYSSPPPPYYSPSPKVDYKSPPPPYVYSSPPPPYYSPSPKVDYKSPPPPYVYNSPPPPYYSPSPKVDYKSPPPPYIYNSPPPPYYSPSPKVNYKTPPPPYVYSSPPPPYYSPSPKVNYKSPPPPYVYSSPPPPYYSPSPNVDYKSPPPPYVYSSPPTPYYSPSSKVTYKSPPPPYVY

SEQ ID NO: 69896 - protein, 380 aa, Arabidopsis thaliana
  peptide (1)..(380): Ceres Seq. ID no. 2028750
  misc_feature (52)..(273): Pfam Name: Plasmodium histidine-rich protein (HRPII/III) Pfam Description: Plasmodium histidine-rich protein (HRPII/III)
  misc_feature (194)..(259): Homolog of NCBI NO: 30699212 NR Description: extensin family protein [Arabidopsis thaliana]
  misc_feature (184)..(244): Homolog of NCBI NO: 30699212 NR Description: extensin family protein [Arabidopsis thaliana]
  misc_feature (73)..(351): Homolog of NCBI NO: 1076557 NR Description: extensin-like protein - cowpea (fragment)
  misc_feature (186)..(380): Homolog of NCBI NO: 1076557 NR Description: extensin-like protein - cowpea (fragment)
  misc_feature (9)..(273): Homolog of NCBI NO: 1076557 NR Description: extensin-like protein - cowpea (fragment)
  misc_feature (1)..(239): Homolog of NCBI NO: 1076557 NR Description: extensin-like protein - cowpea (fragment)
  misc_feature (1)..(222): Homolog of NCBI NO: 1076557 NR Description: extensin-like protein - cowpea (fragment)
  misc_feature (1)..(184): Homolog of NCBI NO: 1076557 NR Description: extensin-like protein - cowpea (fragment)
MNTKSLSTHHIQNHLFTALHHLHHTTLLLQRLITSLHHHHTFTVPHHHHTTLRLQRLTTSPYHPHTSTVPHPHHTTLLHQRLTTSLHRHHTSTALHHHHTTVHLQRVTTSLHHPHTSTVPHPHHTTLLLQRLTTSLHHHHTSTAPHHHHTTVQLQRLTTSPHHPHTSTAPHPHHTTVHLQRLTTSLHHHHTSTAPHPHHTTLLHQRLTTSLHHHHTTDLHHHHTTVHLQRLITSPHHPHTSTVPHPHHTTLLLQRLTTSLHHHHTSTAPHHHHTTVQLQRLTTSPHHPHTSTAPHHHHTIVHLQRLTTSPHHPHTSTVPHPHHTTLLHQKLTISLHHHHTSITPHPHHITLLLQKLTTSLHLHHTSITPHPHHIILLHQR

SEQ ID NO: 69897 - DNA, 1047 bp, Arabidopsis thaliana
  misc_feature (1)..(1047): Ceres Seq. ID no. 2040308
  misc_feature: MA Experiment ID: 20000184 Result: Up-regulated in Transcription
  misc_feature: MA Experiment 20000184 PARAMETER Experiment Name: At_Shoots__P Parameter: Age (day) Value: 7
  misc_feature: MA Experiment 20000184 PARAMETER Experiment Name: At_Shoots__P Parameter: Tissue Value: Shoots vs. Whole Plant
  misc_feature: MA Experiment ID: 20000185 Result: Up-regulated in Transcription
  misc_feature: MA Experiment 20000185 PARAMETER Experiment Name: At_Roots__P Parameter: Age (day) Value: 7 vs. 21
  misc_feature: MA Experiment 20000185 PARAMETER Experiment Name: At_Roots__P Parameter: Organism Value: A. thaliana
  misc_feature: MA Experiment 20000185 PARAMETER Experiment Name: At_Roots__P Parameter: Tissue Value: Roots vs. Whole Plant
  misc_feature: MA Experiment ID: 20000227 Result: Down-regulated in Transcription
  misc_feature: MA Experiment 20000227 PARAMETER Experiment Name: At_Root-Tips-vs-Tops_P Parameter: Tissue Value: Root Tips vs. Root Tops
  misc_feature: MA Experiment ID: 20000439 Result: Up-regulated in Transcription
  misc_feature: MA Experiment 20000439 PARAMETER Experiment Name: At_Roots__P Parameter: Age (day) Value: 14 vs. 21
  misc_feature: MA Experiment 20000439 PARAMETER Experiment Name: At_Roots__P Parameter: Organism Value: A. thaliana
  misc_feature: MA Experiment 20000439 PARAMETER Experiment Name: At_Roots__P Parameter: Tissue Value: Roots vs. Whole Plant
atgggacacttcttgataggttttcttgtagttgtcttgtccgtgggaaatgttattgaagaagcaaatggtgaaatacctagaaccacattggaaaaaatagagaggatgaatcaaaagggtccttatttgggaattgtagctccaaacaactatgagcttaaccctcttctcggttctaaagcctatttcccatcttcttcgttgcctttcatcgatttcgcaggtcgaaaatttcgatttggaaaattatcaaaccaaccagtgataatcgtgatgtcgggattaggaatggtgaatgcaggagtaacaacacaattactggtgagcctctttaggctgaaaggagttttgcattatggaatcgctggaaacgcagatgttaaccttgagattggcgacgtcactattcctcaatattgggcacactctggcctttggaattggcagaggtatggagatgggattgacaacgaattagctcttgaatccggcggagactatactcgggaagttggttatctccagttttccaaatatagtaaccgaaccgataacttgcttaatcgagtttggtatcaaccggaagaaatcttcccggtcaccggaactcctgaagagcggcaacatgtgttctggattcccgttgacaagtcctacttgaaacttgcacgcaaactcgaggacacgaagctaccgcagtgtgttaacaccacatgccttcctcgaccaccgaaggtcaccatcgttaaacgtggtatgagtgcaagtgttttcatcgacaacgcagcttaccggactttcctcaactccaagtttaacgccaccgccgttgaaatggagagcgccgccgtggctctcatttcccaccagcaaaacctccctttcatcgtcatccgtgccctctccgatctcgctggcggcggctccgacgtctccaacgaggccagcatattcagcagcctcgccgcagaaaactccgtcgatattctcgttaagttcgttgctttgttgcctccacacgaaagcaagattcaatcagaatga

SEQ ID NO: 69898 - protein, 348 aa, Arabidopsis thaliana
  peptide (1)..(348): Ceres Seq. ID no. 2040309
  misc_feature (43)..(335): Pfam Name: Phosphorylase family Pfam Description: Phosphorylase family
  misc_feature (99)..(338): Homolog of NCBI NO: 34904294 NR Description: unnamed protein product [Oryza sativa (japonica group)] >gi|7630247|dbj|BAA94780.1| unnamed protein product
  misc_feature (5)..(341): Homolog of NCBI NO: 21593613 NR Description: unknown [Arabidopsis thaliana]
  misc_feature (3)..(340): Homolog of NCBI NO: 18416327 NR Description: putative protein; protein id: At4g24340.1, by cDNA: 8772. [Arabidopsis thaliana] unknown protein [Arabidopsis thaliana]
  misc_feature (3)..(339): Homolog of NCBI NO: 21617914 NR Description: unknown [Arabidopsis thaliana]
  misc_feature (5)..(341): Homolog of NCBI NO: 30686500 NR Description: expressed protein [Arabidopsis thaliana] unknown protein [Arabidopsis thaliana]
  misc_feature (3)..(340): Homolog of NCBI NO: 7487317 NR Description: hypothetical protein T22A6.170 - Arabidopsis >gi|5051776|emb|CAB45069.1| putative protein [Arabidopsis >gi|7269284|emb|CAB79344.1| putative protein [Arabidopsis
  misc_feature (254)..(348): Homolog of NCBI NO: 15235493 NR Description: putative protein; protein id: At4g28940.1
  misc_feature (213)..(339): Homolog of NCBI NO: 16126505 NR Description: phosphorylase family protein [Caulobacter
  misc_feature (76)..(144): Homolog of NCBI NO: 16126505 NR Description: phosphorylase family protein [Caulobacter
  misc_feature (99)..(347): Homolog of NCBI NO: 34897886 NR Description: ESTs AU032452(S10068),C23571(S10068) correspond a region of the predicted gene.~Similar to P.trichocarpa x P.
MGHFLIGFLVVVLSVGNVIEEANGEIPRTTLEKIERMNQKGPYLGIVAPNNYELNPLLGSKAYFPSSSLPFIDFAGRKFRFGKLSNQPVIIVMSGLGMVNAGVTTQLLVSLFRLKGVLHYGIAGNADVNLEIGDVTIPQYWAHSGLWNWQRYGDGIDNELALESGGDYTREVGYLQFSKYSNRTDNLLNRVWYQPEEIFPVTGTPEERQHVFWIPVDKSYLKLARKLEDTKLPQCVNTTCLPRPPKVTIVKRGMSASVFIDNAAYRTFLNSKFNATAVEMESAAVALISHQQNLPFIVIRALSDLAGGGSDVSNEASIFSSLAAENSVDILVKFVALLPPHESKIQSE

SEQ ID NO: 69899 - protein, 312 aa, Arabidopsis thaliana
  peptide (1)..(312): Ceres Seq. ID no. 2040310
  misc_feature (7)..(299): Pfam Name: Phosphorylase family Pfam Description: Phosphorylase family
  misc_feature (63)..(302): Homolog of NCBI NO: 34904294 NR Description: unnamed protein product [Oryza sativa (japonica group)] >gi|7630247|dbj|BAA94780.1| unnamed protein product
  misc_feature (1)..(305): Homolog of NCBI NO: 21593613 NR Description: unknown [Arabidopsis thaliana]
  misc_feature (1)..(304): Homolog of NCBI NO: 18416327 NR Description: putative protein; protein id: At4g24340.1, by cDNA: 8772. [Arabidopsis thaliana] unknown protein [Arabidopsis thaliana]
  misc_feature (1)..(303): Homolog of NCBI NO: 21617914 NR Description: unknown [Arabidopsis thaliana]
  misc_feature (1)..(305): Homolog of NCBI NO: 30686500 NR Description: expressed protein [Arabidopsis thaliana] unknown protein [Arabidopsis thaliana]
  misc_feature (1)..(304): Homolog of NCBI NO: 7487317 NR Description: hypothetical protein T22A6.170 - Arabidopsis >gi|5051776|emb|CAB45069.1| putative protein [Arabidopsis >gi|7269284|emb|CAB79344.1| putative protein [Arabidopsis
  misc_feature (218)..(312): Homolog of NCBI NO: 15235493 NR Description: putative protein; protein id: At4g28940.1
  misc_feature (177)..(303): Homolog of NCBI NO: 16126505 NR Description: phosphorylase family protein [Caulobacter
  misc_feature (40)..(108): Homolog of NCBI NO: 16126505 NR Description: phosphorylase family protein [Caulobacter
  misc_feature (63)..(311): Homolog of NCBI NO: 34897886 NR Description: ESTs AU032452(S10068),C23571(S10068) correspond a region of the predicted gene.~Similar to P.trichocarpa x P.
MNQKGPYLGIVAPNNYELNPLLGSKAYFPSSSLPFIDFAGRKFRFGKLSNQPVIIVMSGLGMVNAGVTTQLLVSLFRLKGVLHYGIAGNADVNLEIGDVTIPQYWAHSGLWNWQRYGDGIDNELALESGGDYTREVGYLQFSKYSNRTDNLLNRVWYQPEEIFPVTGTPEERQHVFWIPVDKSYLKLARKLEDTKLPQCVNTTCLPRPPKVTIVKRGMSASVFIDNAAYRTFLNSKFNATAVEMESAAVALISHQQNLPFIVIRALSDLAGGGSDVSNEASIFSSLAAENSVDILVKFVALLPPHESKIQSE

SEQ ID NO: 69900 - protein, 256 aa, Arabidopsis thaliana
  peptide (1)..(256): Ceres Seq. ID no. 2040311
  misc_feature (1)..(243): Pfam Name: Phosphorylase family Pfam Description: Phosphorylase family
  misc_feature (7)..(246): Homolog of NCBI NO: 34904294 NR Description: unnamed protein product [Oryza sativa (japonica group)] >gi|7630247|dbj|BAA94780.1| unnamed protein product
  misc_feature (1)..(249): Homolog of NCBI NO: 21593613 NR Description: unknown [Arabidopsis thaliana]
  misc_feature (1)..(248): Homolog of NCBI NO: 18416327 NR Description: putative protein; protein id: At4g24340.1, by cDNA: 8772. [Arabidopsis thaliana] unknown protein [Arabidopsis thaliana]
  misc_feature (1)..(247): Homolog of NCBI NO: 21617914 NR Description: unknown [Arabidopsis thaliana]
  misc_feature (1)..(249): Homolog of NCBI NO: 30686500 NR Description: expressed protein [Arabidopsis thaliana] unknown protein [Arabidopsis thaliana]
  misc_feature (1)..(248): Homolog of NCBI NO: 7487317 NR Description: hypothetical protein T22A6.170 - Arabidopsis >gi|5051776|emb|CAB45069.1| putative protein [Arabidopsis >gi|7269284|emb|CAB79344.1| putative protein [Arabidopsis
  misc_feature (162)..(256): Homolog of NCBI NO: 15235493 NR Description: putative protein; protein id: At4g28940.1
  misc_feature (121)..(247): Homolog of NCBI NO: 16126505 NR Description: phosphorylase family protein [Caulobacter
  misc_feature (1)..(52): Homolog of NCBI NO: 16126505 NR Description: phosphorylase family protein [Caulobacter
  misc_feature (7)..(255): Homolog of NCBI NO: 34897886 NR Description: ESTs AU032452(S10068),C23571(S10068) correspond a region of the predicted gene.~Similar to P.trichocarpa x P.
MSGLGMVNAGVTTQLLVSLFRLKGVLHYGIAGNADVNLEIGDVTIPQYWAHSGLWNWQRYGDGIDNELALESGGDYTREVGYLQFSKYSNRTDNLLNRVWYQPEEIFPVTGTPEERQHVFWIPVDKSYLKLARKLEDTKLPQCVNTTCLPRPPKVTIVKRGMSASVFIDNAAYRTFLNSKFNATAVEMESAAVALISHQQNLPFIVIRALSDLAGGGSDVSNEASIFSSLAAENSVDILVKFVALLPPHESKIQSE

SEQ ID NO: 69901 - DNA, 1467 bp, Arabidopsis thaliana
  misc_feature (1)..(1467): Ceres Seq. ID no. 2041250
  misc_feature: MA Experiment ID: 20000227 Result: Down-regulated in Transcription
  misc_feature: MA Experiment 20000227 PARAMETER Experiment Name: At_Root-Tips-vs-Tops_P Parameter: Tissue Value: Root Tips vs. Root Tops
atgaaccaaacgagacgtaagagacgacctgattcatctctctctagactcgattctctttcgccggaaatgctctttccggccaaatctccgtcgctaacttcttctcgcatcagaaacatcttcttattactcatcttttgtttcatcatctacatcatcttctcctacggcaccaatttccgccgtgaacagatttcatcaatcgctcgatcgttatctgtgttctccactcgtcgccgtcacttactcttctcgatcgccgcttctcacgactcttggctccgtcgtagctcgtacgttcgtctctggtactctcctgaatctacacgcgccgtcgtgtttctcgatcgcggtggattggagtccgatctaactcttcctcctgtgattgtctctaaagacgtttctaggtttccttataatttccctggtggtctccgatcggcgattcgtgtggctcgtgttgttaaagagacggttgatagaggagataaagatgtgcggtggtttgttttcggtgatgatgatactgtcttctttgtagataatttggtgacggttttatctaagtatgatcaccggaagtggttttacgtcggaagtaattcggagttttatgatcagaatgttaggtattcgtttgatatggcgtttggtggtggtggatttgctattagtgcttcgcttgcgaaggttttagctaaggttttggattcttgtttgatgaggtattcacatatgtatggaagtgattctaggatcttctcttgcgtcgctgagcttggtgttacattaactcatgaacctggatttcatcagattgatgtcagagggaacatatttggtctgctatgtgcgcaccctttatctccattggtatctcttcatcacttggatgcagttgatccgttttttccaaaaaggaacaggacagaatccgtggctcatcttatcggagctgcaagttttgattccgggaggattttacagcagagtgtttgttatgattctttgaacacagtgactgtttcggttgtgtggggttacgcggttcaagtttatgaaggaaataaacttcttccggatcttctcacactgcaaaagacattttctacatggaggagagggtcaggggtccaaagcaactatatgttcagtacaagagaatatccgagggatccatgtgggagaccgctcgtctttttcttggacagtgtaggatcagatggaactgagggaacatggagtaactataacatccatagagttggacactgtcacagagcagaagctgttgagcgtctagaacgcatcagagttctgtctcctaaactggaacgcaacgttgaacagatgggtttgcctcgccgccaatgttgtgacatctcatcgccatataataagtcaatggtcattaatataaggcaatgcatgccggatgagctaatcgccatgaacacttag

SEQ ID NO: 69902 - protein, 488 aa, Arabidopsis thaliana
  peptide (1)..(488): Ceres Seq. ID no. 2041251
  misc_feature (209)..(454): Pfam Name: Protein of unknown function, DUF604 Pfam Description: Protein of unknown function, DUF604
  misc_feature (1)..(488): Homolog of NCBI NO: 30683185 NR Description: fringe-related protein [Arabidopsis thaliana]
  misc_feature (1)..(454): Homolog of NCBI NO: 7459604 NR Description: hypothetical protein - Arabidopsis thaliana hypothetical protein [Arabidopsis thaliana]
  misc_feature (452)..(488): Homolog of NCBI NO: 7459604 NR Description: hypothetical protein - Arabidopsis thaliana hypothetical protein [Arabidopsis thaliana]
  misc_feature (63)..(488): Homolog of NCBI NO: 38636837 NR Description: putative fringe-related protein [Oryza sativa
  misc_feature (28)..(452): Homolog of NCBI NO: 15220466 NR Description: hypothetical protein; protein id: At1g05280.1
  misc_feature (81)..(484): Homolog of NCBI NO: 15238082 NR Description: putative protein; protein id: At5g41460.1 thaliana] >gi|9758054|dbj|BAB08517.1|
  misc_feature (60)..(483): Homolog of NCBI NO: 18416156 NR Description: Expressed protein; protein id: At4g23490.1, by cDNA: gi_15529152 [Arabidopsis thaliana]
  misc_feature (67)..(476): Homolog of NCBI NO: 18404516 NR Description: putative zinc finger protein; protein id: [Arabidopsis thaliana] >gi|7459605|pir||T02539 hypothetical
  misc_feature (28)..(452): Homolog of NCBI NO: 25336191 NR Description: hypothetical protein [imported] - Arabidopsis >gi|2388569|gb|AAB71450.1| Similar to hypothetical protein
  misc_feature (60)..(483): Homolog of NCBI NO: 15529153 NR Description: AT4g23490/F16G20_190 [Arabidopsis thaliana]
MNQTRRKRRPDSSLSRLDSLSPEMLFPAKSPSLTSSRIRNIFLLLIFCFIIYIIFSYGTNFRREQISSIARSLSVFSTRRRHLLFSIAASHDSWLRRSSYVRLWYSPESTRAVVFLDRGGLESDLTLPPVIVSKDVSRFPYNFPGGLRSAIRVARVVKETVDRGDKDVRWFVFGDDDTVFFVDNLVTVLSKYDHRKWFYVGSNSEFYDQNVRYSFDMAFGGGGFAISASLAKVLAKVLDSCLMRYSHMYGSDSRIFSCVAELGVTLTHEPGFHQIDVRGNIFGLLCAHPLSPLVSLHHLDAVDPFFPKRNRTESVAHLIGAASFDSGRILQQSVCYDSLNTVTVSVVWGYAVQVYEGNKLLPDLLTLQKTFSTWRRGSGVQSNYMFSTREYPRDPCGRPLVFFLDSVGSDGTEGTWSNYNIHRVGHCHRAEAVERLERIRVLSPKLERNVEQMGLPRRQCCDISSPYNKSMVINIRQCMPDELIAMNT

SEQ ID NO: 69903 - protein, 465 aa, Arabidopsis thaliana
  peptide (1)..(465): Ceres Seq. ID no. 2041252
  misc_feature (186)..(431): Pfam Name: Protein of unknown function, DUF604 Pfam Description: Protein of unknown function, DUF604
  misc_feature (1)..(465): Homolog of NCBI NO: 30683185 NR Description: fringe-related protein [Arabidopsis thaliana]
  misc_feature (1)..(431): Homolog of NCBI NO: 7459604 NR Description: hypothetical protein - Arabidopsis thaliana hypothetical protein [Arabidopsis thaliana]
  misc_feature (429)..(465): Homolog of NCBI NO: 7459604 NR Description: hypothetical protein - Arabidopsis thaliana hypothetical protein [Arabidopsis thaliana]
  misc_feature (40)..(465): Homolog of NCBI NO: 38636837 NR Description: putative fringe-related protein [Oryza sativa
  misc_feature (5)..(429): Homolog of NCBI NO: 15220466 NR Description: hypothetical protein; protein id: At1g05280.1
  misc_feature (58)..(461): Homolog of NCBI NO: 15238082 NR Description: putative protein; protein id: At5g41460.1 thaliana] >gi|9758054|dbj|BAB08517.1|
  misc_feature (37)..(460): Homolog of NCBI NO: 18416156 NR Description: Expressed protein; protein id: At4g23490.1, by cDNA: gi_15529152 [Arabidopsis thaliana]
  misc_feature (44)..(453): Homolog of NCBI NO: 18404516 NR Description: putative zinc finger protein; protein id: [Arabidopsis thaliana] >gi|7459605|pir||T02539 hypothetical
  misc_feature (5)..(429): Homolog of NCBI NO: 25336191 NR Description: hypothetical protein [imported] - Arabidopsis >gi|2388569|gb|AAB71450.1| Similar to hypothetical protein
  misc_feature (37)..(460): Homolog of NCBI NO: 15529153 NR Description: AT4g23490/F16G20_190 [Arabidopsis thaliana]
MLFPAKSPSLTSSRIRNIFLLLIFCFIIYIIFSYGTNFRREQISSIARSLSVFSTRRRHLLFSIAASHDSWLRRSSYVRLWYSPESTRAVVFLDRGGLESDLTLPPVIVSKDVSRFPYNFPGGLRSAIRVARVVKETVDRGDKDVRWFVFGDDDTVFFVDNLVTVLSKYDHRKWFYVGSNSEFYDQNVRYSFDMAFGGGGFAISASLAKVLAKVLDSCLMRYSHMYGSDSRIFSCVAELGVTLTHEPGFHQIDVRGNIFGLLCAHPLSPLVSLHHLDAVDPFFPKRNRTESVAHLIGAASFDSGRILQQSVCYDSLNTVTVSVVWGYAVQVYEGNKLLPDLLTLQKTFSTWRRGSGVQSNYMFSTREYPRDPCGRPLVFFLDSVGSDGTEGTWSNYNIHRVGHCHRAEAVERLERIRVLSPKLERNVEQMGLPRRQCCDISSPYNKSMVINIRQCMPDELIAMNT

SEQ ID NO: 69904 - protein, 272 aa, Arabidopsis thaliana
  peptide (1)..(272): Ceres Seq. ID no. 2041253
  misc_feature (1)..(238): Pfam Name: Protein of unknown function, DUF604 Pfam Description: Protein of unknown function, DUF604
  misc_feature (1)..(272): Homolog of NCBI NO: 30683185 NR Description: fringe-related protein [Arabidopsis thaliana]
  misc_feature (1)..(238): Homolog of NCBI NO: 7459604 NR Description: hypothetical protein - Arabidopsis thaliana hypothetical protein [Arabidopsis thaliana]
  misc_feature (236)..(272): Homolog of NCBI NO: 7459604 NR Description: hypothetical protein - Arabidopsis thaliana hypothetical protein [Arabidopsis thaliana]
  misc_feature (1)..(272): Homolog of NCBI NO: 38636837 NR Description: putative fringe-related protein [Oryza sativa
  misc_feature (1)..(236): Homolog of NCBI NO: 15220466 NR Description: hypothetical protein; protein id: At1g05280.1
  misc_feature (1)..(268): Homolog of NCBI NO: 15238082 NR Description: putative protein; protein id: At5g41460.1 thaliana] >gi|9758054|dbj|BAB08517.1|
  misc_feature (1)..(267): Homolog of NCBI NO: 18416156 NR Description: Expressed protein; protein id: At4g23490.1, by cDNA: gi_15529152 [Arabidopsis thaliana]
  misc_feature (1)..(260): Homolog of NCBI NO: 18404516 NR Description: putative zinc finger protein; protein id: [Arabidopsis thaliana] >gi|7459605|pir||T02539 hypothetical
  misc_feature (1)..(236): Homolog of NCBI NO: 25336191 NR Description: hypothetical protein [imported] - Arabidopsis >gi|2388569|gb|AAB71450.1| Similar to hypothetical protein
  misc_feature (1)..(267): Homolog of NCBI NO: 15529153 NR Description: AT4g23490/F16G20_190 [Arabidopsis thaliana]
MAFGGGGFAISASLAKVLAKVLDSCLMRYSHMYGSDSRIFSCVAELGVTLTHEPGFHQIDVRGNIFGLLCAHPLSPLVSLHHLDAVDPFFPKRNRTESVAHLIGAASFDSGRILQQSVCYDSLNTVTVSVVWGYAVQVYEGNKLLPDLLTLQKTFSTWRRGSGVQSNYMFSTREYPRDPCGRPLVFFLDSVGSDGTEGTWSNYNIHRVGHCHRAEAVERLERIRVLSPKLERNVEQMGLPRRQCCDISSPYNKSMVINIRQCMPDELIAMNT

SEQ ID NO: 69905 - DNA, 1737 bp, Arabidopsis thaliana
  misc_feature (1)..(1737): Ceres Seq. ID no. 2041423
  misc_feature: MA Experiment ID: 20000307 Result: Up-regulated in Transcription
  misc_feature: MA Experiment 20000307 PARAMETER Experiment Name: At_Germinating_Seeds_Sub_P Parameter: Age (hr) Value: 24 vs. 0
  misc_feature: MA Experiment 20000307 PARAMETER Experiment Name: At_Germinating_Seeds_Sub_P Parameter: Organism Value: A. thaliana
  misc_feature: MA Experiment 20000307 PARAMETER Experiment Name: At_Germinating_Seeds_Sub_P Parameter: Plant Line Value: WS
  misc_feature: MA Experiment 20000307 PARAMETER Experiment Name: At_Germinating_Seeds_Sub_P Parameter: Tissue Value: Germinating Seeds
  misc_feature: MA Experiment ID: 20000314 Result: Up-regulated in Transcription
  misc_feature: MA Experiment 20000314 PARAMETER Experiment Name: At_14day_Shoots-Roots_Sub_P Parameter: Age (day) Value: 14
  misc_feature: MA Experiment 20000314 PARAMETER Experiment Name: At_14day_Shoots-Roots_Sub_P Parameter: Organism Value: A. thaliana
  misc_feature: MA Experiment 20000314 PARAMETER Experiment Name: At_14day_Shoots-Roots_Sub_P Parameter: Plant Line Value: WS
  misc_feature: MA Experiment 20000314 PARAMETER Experiment Name: At_14day_Shoots-Roots_Sub_P Parameter: Tissue Value: Roots vs. Whole Plant
  misc_feature: MA Experiment ID: 20000328 Result: Up-regulated in Transcription
  misc_feature: MA Experiment 20000328 PARAMETER Experiment Name: At_42deg_Heat_Sub_P Parameter: Age (day) Value: 14
  misc_feature: MA Experiment 20000328 PARAMETER Experiment Name: At_42deg_Heat_Sub_P Parameter: Organism Value: A. thaliana
  misc_feature: MA Experiment 20000328 PARAMETER Experiment Name: At_42deg_Heat_Sub_P Parameter: Plant Line Value: WS
  misc_feature: MA Experiment 20000328 PARAMETER Experiment Name: At_42deg_Heat_Sub_P Parameter: Temperature (deg C) Value: 42 vs. 22
  misc_feature: MA Experiment 20000328 PARAMETER Experiment Name: At_42deg_Heat_Sub_P Parameter: Timepoint (hr) Value: 6
  misc_feature: MA Experiment 20000328 PARAMETER Experiment Name: At_42deg_Heat_Sub_P Parameter: Tissue Value: Aerial
  misc_feature: MA Experiment ID: 20000352 Result: Down-regulated in Transcription
  misc_feature: MA Experiment 20000352 PARAMETER Experiment Name: At_Drought_Sub_P Parameter: Age (day) Value: 7
  misc_feature: MA Experiment 20000352 PARAMETER Experiment Name: At_Drought_Sub_P Parameter: Organism Value: A. thaliana
  misc_feature: MA Experiment 20000352 PARAMETER Experiment Name: At_Drought_Sub_P Parameter: Plant Line Value: WS
  misc_feature: MA Experiment 20000352 PARAMETER Experiment Name: At_Drought_Sub_P Parameter: Timepoint (hr) Value: 6
  misc_feature: MA Experiment 20000352 PARAMETER Experiment Name: At_Drought_Sub_P Parameter: Tissue Value: Whole Plant
  misc_feature: MA Experiment 20000352 PARAMETER Experiment Name: At_Drought_Sub_P Parameter: Treatment Value: Drought vs. No Drought
atggcacgtcttactctgtttctgtcttttctttctctagctttagtctctgttgtaaactgtcgtgttttaagttctgtgtctgaagataacaactcctccatcttggtctccgatggagtccaagacagatccagcaacgactttctcagtcttaatccgccaaatctttccgagagtgcttgtgttcatgtctacgggtttcttccatgtgcagacaatattgaaggatatgtcttccaagttttctcctttggttgtctattgataatcggtgaatactttttgtctaaaggaaggtctaagctctttgtcatcttcgaggtcggtttctttggcggaattatcttccctctacttacaatgttcccaagaattgcccttattctatccactggactgataggaagccgtgaaatagcaaactcgatgacgggtaataatgttgcagttactgttggatactctgtctttgctttgacaatgcaatggggagcttgtgttgtctttggcttgtctggtttgagatcagatgatcagtccataacttgtgacataagtagtccaagaagacaagttaagaagagcattaatctattgaagaacctagctggagctagcattagagcagatcctaagaacaagaaagcggcagggattatgctcctgactttattgcctttcgtcttagtcacattttcagagacatttcacataaaatcttgggatgacaatatggttttggtcacactcatattctctggttctgcaactgttctctactttgtttatttgtattttgataaagcggaccaagtgaagagcctagaatacgcgaagtttgagctcatgtcagaagttcataagcacttgcagaatttttcgcctcaaagccttataagaaatggacaactatgtcaagagagcttgaaaagtttgttcaaaaagtttgatgtcaacaaagacggaaagatccaagtatcagagttaaaagatctgacagtggactttggggtattagggagagtgaagtgtgatataaatgagcttgccactactttgcttgctgatttcgacagtaatagagatggtgagatagatgagactgaattcgccattggtatcgaaaaatggctgaaacagtacaaatttagcttcaatggcaccgagtcacaaggagaggacatagccgaggatgatggagttttgaaggtggaacaattactaaagggatgtctttttactaagttgcttacaaagagaaccttgaaagctgtcattgaagtcattatagggattactattgtcagctttcttgcaatgcctttcatgatgaatatcgaacttttgtcggtatcagctggagtgccttccttctatgttgtctttgcagtgatccctttggcaagaaacctaaagaacgctttgtctgctcacttctgtcgcaagaaagagaaagcaaaaattacatctgacacattttctgagatttatagagatgttacattgaacaatctgctggggataacaattatattggcgattgtgtacatcagaggattgacttgggattattcaacagaagttctcattattgtgatcgttggtctcataataggtgtaccggcctatgtgagatcgacttatccattttggatatgtgtcttggcctttgctctctacttcttctctcttatcctaatctatctccattccaagtctacctttaatgaataa

SEQ ID NO: 69906 - protein, 578 aa, Arabidopsis thaliana
  peptide (1)..(578): Ceres Seq. ID no. 2041424
  misc_feature (435)..(568): Pfam Name: Sodium/calcium exchanger protein Pfam Description: Sodium/calcium exchanger protein
  misc_feature (1)..(545): Homolog of NCBI NO: 15218787 NR Description: unknown protein; protein id: At1g29020.1 thaliana] >gi|10764849|gb|AAF24539.2|AC007508_2 F1K23.2
  misc_feature (266)..(574): Homolog of NCBI NO: 15218787 NR Description: unknown protein; protein id: At1g29020.1 thaliana] >gi|10764849|gb|AAF24539.2|AC007508_2 F1K23.2
  misc_feature (4)..(200): Homolog of NCBI NO: 15218787 NR Description: unknown protein; protein id: At1g29020.1 thaliana] >gi|10764849|gb|AAF24539.2|AC007508_2 F1K23.2
  misc_feature (202)..(244): Homolog of NCBI NO: 15218787 NR Description: unknown protein; protein id: At1g29020.1 thaliana] >gi|10764849|gb|AAF24539.2|AC007508_2 F1K23.2
  misc_feature (5)..(571): Homolog of NCBI NO: 26449859 NR Description: unknown protein [Arabidopsis thaliana]
  misc_feature (266)..(504): Homolog of NCBI NO: 15226193 NR Description: unknown protein; protein id: At2g34030.1
  misc_feature (1)..(178): Homolog of NCBI NO: 15226193 NR Description: unknown protein; protein id: At2g34030.1
  misc_feature (266)..(517): Homolog of NCBI NO: 15226191 NR Description: unknown protein; protein id: At2g34020.1
  misc_feature (5)..(178): Homolog of NCBI NO: 15226191 NR Description: unknown protein; protein id: At2g34020.1
  misc_feature (7)..(570): Homolog of NCBI NO: 30695448 NR Description: expressed protein [Arabidopsis thaliana]
MARLTLFLSFLSLALVSVVNCRVLSSVSEDNNSSILVSDGVQDRSSNDFLSLNPPNLSESACVHVYGFLPCADNIEGYVFQVFSFGCLLIIGEYFLSKGRSKLFVIFEVGFFGGIIFPLLTMFPRIALILSTGLIGSREIANSMTGNNVAVTVGYSVFALTMQWGACVVFGLSGLRSDDQSITCDISSPRRQVKKSINLLKNLAGASIRADPKNKKAAGIMLLTLLPFVLVTFSETFHIKSWDDNMVLVTLIFSGSATVLYFVYLYFDKADQVKSLEYAKFELMSEVHKHLQNFSPQSLIRNGQLCQESLKSLFKKFDVNKDGKIQVSELKDLTVDFGVLGRVKCDINELATTLLADFDSNRDGEIDETEFAIGIEKWLKQYKFSFNGTESQGEDIAEDDGVLKVEQLLKGCLFTKLLTKRTLKAVIEVIIGITIVSFLAMPFMMNIELLSVSAGVPSFYVVFAVIPLARNLKNALSAHFCRKKEKAKITSDTFSEIYRDVTLNNLLGITIILAIVYIRGLTWDYSTEVLIIVIVGLIIGVPAYVRSTYPFWICVLAFALYFFSLILIYLHSKSTFNE

SEQ ID NO: 69907 - protein, 457 aa, Arabidopsis thaliana
  peptide (1)..(457): Ceres Seq. ID no. 2041425
  misc_feature (314)..(447): Pfam Name: Sodium/calcium exchanger protein Pfam Description: Sodium/calcium exchanger protein
  misc_feature (1)..(424): Homolog of NCBI NO: 15218787 NR Description: unknown protein; protein id: At1g29020.1 thaliana] >gi|10764849|gb|AAF24539.2|AC007508_2 F1K23.2
  misc_feature (145)..(453): Homolog of NCBI NO: 15218787 NR Description: unknown protein; protein id: At1g29020.1 thaliana] >gi|10764849|gb|AAF24539.2|AC007508_2 F1K23.2
  misc_feature (1)..(79): Homolog of NCBI NO: 15218787 NR Description: unknown protein; protein id: At1g29020.1 thaliana] >gi|10764849|gb|AAF24539.2|AC007508_2 F1K23.2
  misc_feature (81)..(123): Homolog of NCBI NO: 15218787 NR Description: unknown protein; protein id: At1g29020.1 thaliana] >gi|10764849|gb|AAF24539.2|AC007508_2 F1K23.2
  misc_feature (1)..(450): Homolog of NCBI NO: 26449859 NR Description: unknown protein [Arabidopsis thaliana]
  misc_feature (145)..(383): Homolog of NCBI NO: 15226193 NR Description: unknown protein; protein id: At2g34030.1
  misc_feature (1)..(57): Homolog of NCBI NO: 15226193 NR Description: unknown protein; protein id: At2g34030.1
  misc_feature (145)..(396): Homolog of NCBI NO: 15226191 NR Description: unknown protein; protein id: At2g34020.1
  misc_feature (1)..(57): Homolog of NCBI NO: 15226191 NR Description: unknown protein; protein id: At2g34020.1
  misc_feature (1)..(449): Homolog of NCBI NO: 30695448 NR Description: expressed protein [Arabidopsis thaliana]
MFPRIALILSTGLIGSREIANSMTGNNVAVTVGYSVFALTMQWGACVVFGLSGLRSDDQSITCDISSPRRQVKKSINLLKNLAGASIRADPKNKKAAGIMLLTLLPFVLVTFSETFHIKSWDDNMVLVTLIFSGSATVLYFVYLYFDKADQVKSLEYAKFELMSEVHKHLQNFSPQSLIRNGQLCQESLKSLFKKFDVNKDGKIQVSELKDLTVDFGVLGRVKCDINELATTLLADFDSNRDGEIDETEFAIGIEKWLKQYKFSFNGTESQGEDIAEDDGVLKVEQLLKGCLFTKLLTKRTLKAVIEVIIGITIVSFLAMPFMMNIELLSVSAGVPSFYVVFAVIPLARNLKNALSAHFCRKKEKAKITSDTFSEIYRDVTLNNLLGITIILAIVYIRGLTWDYSTEVLIIVIVGLIIGVPAYVRSTYPFWICVLAFALYFFSLILIYLHSKSTFNE

SEQ ID NO: 69908 - protein, 435 aa, Arabidopsis thaliana
  peptide (1)..(435): Ceres Seq. ID no. 2041426
  misc_feature (292)..(425): Pfam Name: Sodium/calcium exchanger protein Pfam Description: Sodium/calcium exchanger protein
  misc_feature (1)..(402): Homolog of NCBI NO: 15218787 NR Description: unknown protein; protein id: At1g29020.1 thaliana] >gi|10764849|gb|AAF24539.2|AC007508_2 F1K23.2
  misc_feature (123)..(431): Homolog of NCBI NO: 15218787 NR Description: unknown protein; protein id: At1g29020.1 thaliana] >gi|10764849|gb|AAF24539.2|AC007508_2 F1K23.2
  misc_feature (1)..(57): Homolog of NCBI NO: 15218787 NR Description: unknown protein; protein id: At1g29020.1 thaliana] >gi|10764849|gb|AAF24539.2|AC007508_2 F1K23.2
  misc_feature (59)..(101): Homolog of NCBI NO: 15218787 NR Description: unknown protein; protein id: At1g29020.1 thaliana] >gi|10764849|gb|AAF24539.2|AC007508_2 F1K23.2
  misc_feature (1)..(428): Homolog of NCBI NO: 26449859 NR Description: unknown protein [Arabidopsis thaliana]
  misc_feature (123)..(361): Homolog of NCBI NO: 15226193 NR Description: unknown protein; protein id: At2g34030.1
  misc_feature (1)..(35): Homolog of NCBI NO: 15226193 NR Description: unknown protein; protein id: At2g34030.1
  misc_feature (123)..(374): Homolog of NCBI NO: 15226191 NR Description: unknown protein; protein id: At2g34020.1
  misc_feature (1)..(35): Homolog of NCBI NO: 15226191 NR Description: unknown protein; protein id: At2g34020.1
  misc_feature (1)..(427): Homolog of NCBI NO: 30695448 NR Description: expressed protein [Arabidopsis thaliana]
MTGNNVAVTVGYSVFALTMQWGACVVFGLSGLRSDDQSITCDISSPRRQVKKSINLLKNLAGASIRADPKNKKAAGIMLLTLLPFVLVTFSETFHIKSWDDNMVLVTLIFSGSATVLYFVYLYFDKADQVKSLEYAKFELMSEVHKHLQNFSPQSLIRNGQLCQESLKSLFKKFDVNKDGKIQVSELKDLTVDFGVLGRVKCDINELATTLLADFDSNRDGEIDETEFAIGIEKWLKQYKFSFNGTESQGEDIAEDDGVLKVEQLLKGCLFTKLLTKRTLKAVIEVIIGITIVSFLAMPFMMNIELLSVSAGVPSFYVVFAVIPLARNLKNALSAHFCRKKEKAKITSDTFSEIYRDVTLNNLLGITIILAIVYIRGLTWDYSTEVLIIVIVGLIIGVPAYVRSTYPFWICVLAFALYFFSLILIYLHSKSTFNE

SEQ ID NO: 69909 - DNA, 2520 bp, Arabidopsis thaliana
  misc_feature (1)..(2520): Ceres Seq. ID no. 2041497
  misc_feature: MA Experiment ID: 20000179 Result: Down-regulated in Transcription
  misc_feature: MA Experiment 20000179 PARAMETER Experiment Name: At_Germinating_Seeds_P Parameter: Age (hr) Value: 6 vs. 0
  misc_feature: MA Experiment 20000179 PARAMETER Experiment Name: At_Germinating_Seeds_P Parameter: Tissue Value: Germinating Seeds
  misc_feature: MA Experiment ID: 20000180 Result: Down-regulated in Transcription
  misc_feature: MA Experiment 20000180 PARAMETER Experiment Name: At_Germinating_Seeds_P Parameter: Age (hr) Value: 24 vs. 0
  misc_feature: MA Experiment 20000180 PARAMETER Experiment Name: At_Germinating_Seeds_P Parameter: Tissue Value: Germinating Seeds
  misc_feature: MA Experiment ID: 20000286 Result: Down-regulated in Transcription
  misc_feature: MA Experiment 20000286 PARAMETER Experiment Name: At_Open_Flower_P Parameter: Age (day) Value: 21
  misc_feature: MA Experiment 20000286 PARAMETER Experiment Name: At_Open_Flower_P Parameter: Plant Line Value: WS
  misc_feature: MA Experiment 20000286 PARAMETER Experiment Name: At_Open_Flower_P Parameter: Tissue Value: Half Open vs. Whole Plant
  misc_feature: MA Experiment ID: 20001451 Result: Up-regulated in Transcription
  misc_feature: MA Experiment 20001451 PARAMETER Experiment Name: At_Far-red-induction_P Parameter: Age (day) Value: 7
  misc_feature: MA Experiment 20001451 PARAMETER Experiment Name: At_Far-red-induction_P Parameter: Light Value: Far-red vs. White
  misc_feature: MA Experiment 20001451 PARAMETER Experiment Name: At_Far-red-induction_P Parameter: Organism Value: A. thaliana
  misc_feature: MA Experiment 20001451 PARAMETER Experiment Name: At_Far-red-induction_P Parameter: Plant Line Value: Columbia
  misc_feature: MA Experiment 20001451 PARAMETER Experiment Name: At_Far-red-induction_P Parameter: Timepoint (hr) Value: 24
  misc_feature: MA Experiment 20001451 PARAMETER Experiment Name: At_Far-red-induction_P Parameter: Tissue Value: Whole Plant
atgccactttgcaataatttctccggcaatctcgtcgtcgccgttgctctcttctttgccggcgccctatatatcttcaactaccaaaactatgtcaacactctgagaacaacacagtatccggtagatgagctagaggcggccttgtatacggcagccgccggaaacaacaagacggtgataataacgatggtgaacaaagcgtacgtgaaggaggttggaagagggagtacgatgcttgatctgtttttggagagtttttgggaaggagaagggactctaccacttttggaccatctaatggtggtggcagtggatcaaacggcctatgatcgctgccgtttcaagaggcttcactgctacaagatggagactgaagatggggttgacttagagggagagaaagtattcatgtcaaaagatttcattgagatgatgtggagaaggactcgcttgatcctagacgttcttcgtcgtggctacaatgttattttcacggacacggacgtgatgtggctaaggagtccattgtctcggttaaacatgagcttggatatgcaaataagcgtggacagaattaacgtgggaggacagttgatcaacacgggattctaccacgtccggtctaacaacaagaccatctcactcttccaaaaatggtacgacatgaggctaaactcgacggggatgaaggaacaagacgttctcaagaatctcctagactccggcttcttcaaccagttaggtctcaacgttggcttccttagtaccaccgaattcagcggtttttgccaagacagtcctcacatgggcgttgtcactaccgtccatgctaactgctgcctccacatccctgccaaagtctttgatctcactcgtgttcttcgtgattggaaacgctacaaagcgtcacatgtcaacagcaaatggagccctcatcttaagtctaatgtaagcatgagaatcttcagattcacgtcaatctcaccgcggattttgccgtcgaatcattactcaacattcccgttgaaacaaaacgtgtcttctctctcaccggcgaaatacattgcgggagctttacaagaacatatcaattctccggccccaaaagctggtaagaagatacacgcagatatcatcaaaactgggtttcaaccagatttgaatatatccatcaaactactcattcttcatttaaaatgcggttgcttgagttatgcacgccaagtgttcgacgaattacccaagccaacattatcggcttacaactacatgattagtgggtacttgaagcatggattggtaaaggaattacttcttctagttcaacggatgtcatactctggggaaaaggcagatgggtacacgctttccatggttctaaaggcttctaatagtcgtggctcgactatgatactgccgcgtagcttatgtaggttggtccatgcccggattataaaatgtgatgttgagctagatgatgtgttgattactgcacttgttgatacttatgtgaagagtgggaagttggagtctgcaaggactgtgtttgaaacaatgaaagatgagaatgttgtgtgttgtacatcaatgatctcaggttacatgaatcaaggttttgtagaggatgcggaagagattttcaatactaccaaagtgaaggatattgtagtttacaatgctatggtggaaggtttcagcagatcaggtgaaactgctaagagatcagttgacatgtatatttcgatgcaacgagctggtttccatccgaatatttcaactttcgctagcgtgattggagcgtgttcggttttgacgtcccatgaagttggtcagcaagtgcacgctcagattatgaagagtggagtttacacgcatatcaaaatggggagctctttgttagacatgtatgccaaatgcggagggatcaatgatgcaagaagagtctttgaccaaatgcaagagaaaaacgtattttcgtggacttcgatgattgatggatatggaaagaatggaaaccctgaggaagcactcgaactcttcactaggatgaaggaattccgtatagaacccaattatgtaacctttcttggtgctctctctgcttgttcacattctggtttagtcgataaaggttatgagatctttgagagcatgcagagagattattccatgaaaccaaagatggaacactatgcttgcatagttgatctcatgggacgagctggagatttgaataaagctttcgaatttgctagggcgatgccggaaaggcctgactcagatatttgggcagctcttctcagttcttgtaatttgcatggtaatgttgaactcgcaagcatagctgcgagtgagcttttcaaactgaatgctgataaaagacctggagcttatttagctttatccaatgtctacgcttctaatgataaatgggacaatgtgagcaagatccgagaagtgatgaaaagaagaaggatatctaaaactattggtcgtagttggaccagcgaagattga

SEQ ID NO: 69910 - protein, 839 aa, Arabidopsis thaliana
  peptide (1)..(839): Ceres Seq. ID no. 2041498
  misc_feature (659)..(693): Pfam Name: PPR repeat Pfam Description: PPR repeat
  misc_feature (370)..(445): Homolog of NCBI NO: 15218760 NR Description: hypothetical protein; protein id: At1g28690.1
  misc_feature (5)..(321): Homolog of NCBI NO: 25372968 NR Description: protein F1K23.10 [imported] - Arabidopsis >gi|10764853|gb|AAG22833.1|AC007508_6 F1K23.10 [Arabidopsis
  misc_feature (350)..(839): Homolog of NCBI NO: 34896270 NR Description: hypothetical protein [Oryza sativa]
  misc_feature (1)..(315): Homolog of NCBI NO: 18396892 NR Description: expressed protein; protein id: At1g28710.1, by cDNA: gi_15027990, supported by cDNA: gi_20259204 [Arabidopsis >gi|10764852|gb|AAG22832.1|AC007508_5 F1K23.9 [Arabidopsis
  misc_feature (5)..(152): Homolog of NCBI NO: 15218762 NR Description: hypothetical protein common family; protein id:
  misc_feature (167)..(321): Homolog of NCBI NO: 15218762 NR Description: hypothetical protein common family; protein id:
  misc_feature (524)..(835): Homolog of NCBI NO: 38423978 NR Description: PPR-repeat protein-like [Oryza sativa (japonica
  misc_feature (339)..(552): Homolog of NCBI NO: 38423978 NR Description: PPR-repeat protein-like [Oryza sativa (japonica
  misc_feature (357)..(835): Homolog of NCBI NO: 21740490 NR Description: OSJNBa0006B20.5 [Oryza sativa (japonica
  misc_feature (529)..(835): Homolog of NCBI NO: 34897084 NR Description: hypothetical protein [Oryza sativa (japonica group)] >gi|12957718|gb|AAK09236.1| hypothetical protein [Oryza
MPLCNNFSGNLVVAVALFFAGALYIFNYQNYVNTLRTTQYPVDELEAALYTAAAGNNKTVIITMVNKAYVKEVGRGSTMLDLFLESFWEGEGTLPLLDHLMVVAVDQTAYDRCRFKRLHCYKMETEDGVDLEGEKVFMSKDFIEMMWRRTRLILDVLRRGYNVIFTDTDVMWLRSPLSRLNMSLDMQISVDRINVGGQLINTGFYHVRSNNKTISLFQKWYDMRLNSTGMKEQDVLKNLLDSGFFNQLGLNVGFLSTTEFSGFCQDSPHMGVVTTVHANCCLHIPAKVFDLTRVLRDWKRYKASHVNSKWSPHLKSNVSMRIFRFTSISPRILPSNHYSTFPLKQNVSSLSPAKYIAGALQEHINSPAPKAGKKIHADIIKTGFQPDLNISIKLLILHLKCGCLSYARQVFDELPKPTLSAYNYMISGYLKHGLVKELLLLVQRMSYSGEKADGYTLSMVLKASNSRGSTMILPRSLCRLVHARIIKCDVELDDVLITALVDTYVKSGKLESARTVFETMKDENVVCCTSMISGYMNQGFVEDAEEIFNTTKVKDIVVYNAMVEGFSRSGETAKRSVDMYISMQRAGFHPNISTFASVIGACSVLTSHEVGQQVHAQIMKSGVYTHIKMGSSLLDMYAKCGGINDARRVFDQMQEKNVFSWTSMIDGYGKNGNPEEALELFTRMKEFRIEPNYVTFLGALSACSHSGLVDKGYEIFESMQRDYSMKPKMEHYACIVDLMGRAGDLNKAFEFARAMPERPDSDIWAALLSSCNLHGNVELASIAASELFKLNADKRPGAYLALSNVYASNDKWDNVSKIREVMKRRRISKTIGRSWTSED

SEQ ID NO: 69911 - protein, 776 aa, Arabidopsis thaliana
  peptide (1)..(776): Ceres Seq. ID no. 2041499
  misc_feature (596)..(630): Pfam Name: PPR repeat Pfam Description: PPR repeat
  misc_feature (307)..(382): Homolog of NCBI NO: 15218760 NR Description: hypothetical protein; protein id: At1g28690.1
  misc_feature (1)..(258): Homolog of NCBI NO: 25372968 NR Description: protein F1K23.10 [imported] - Arabidopsis >gi|10764853|gb|AAG22833.1|AC007508_6 F1K23.10 [Arabidopsis
  misc_feature (287)..(776): Homolog of NCBI NO: 34896270 NR Description: hypothetical protein [Oryza sativa]
  misc_feature (1)..(252): Homolog of NCBI NO: 18396892 NR Description: expressed protein; protein id: At1g28710.1, by cDNA: gi_15027990, supported by cDNA: gi_20259204 [Arabidopsis >gi|10764852|gb|AAG22832.1|AC007508_5 F1K23.9 [Arabidopsis
  misc_feature (1)..(89): Homolog of NCBI NO: 15218762 NR Description: hypothetical protein common family; protein id:
  misc_feature (104)..(258): Homolog of NCBI NO: 15218762 NR Description: hypothetical protein common family; protein id:
  misc_feature (461)..(772): Homolog of NCBI NO: 38423978 NR Description: PPR-repeat protein-like [Oryza sativa (japonica
  misc_feature (276)..(489): Homolog of NCBI NO: 38423978 NR Description: PPR-repeat protein-like [Oryza sativa (japonica
  misc_feature (294)..(772): Homolog of NCBI NO: 21740490 NR Description: OSJNBa0006B20.5 [Oryza sativa (japonica
  misc_feature (466)..(772): Homolog of NCBI NO: 34897084 NR Description: hypothetical protein [Oryza sativa (japonica group)] >gi|12957718|gb|AAK09236.1| hypothetical protein [Oryza
MVNKAYVKEVGRGSTMLDLFLESFWEGEGTLPLLDHLMVVAVDQTAYDRCRFKRLHCYKMETEDGVDLEGEKVFMSKDFIEMMWRRTRLILDVLRRGYNVIFTDTDVMWLRSPLSRLNMSLDMQISVDRINVGGQLINTGFYHVRSNNKTISLFQKWYDMRLNSTGMKEQDVLKNLLDSGFFNQLGLNVGFLSTTEFSGFCQDSPHMGVVTTVHANCCLHIPAKVFDLTRVLRDWKRYKASHVNSKWSPHLKSNVSMRIFRFTSISPRILPSNHYSTFPLKQNVSSLSPAKYIAGALQEHINSPAPKAGKKIHADIIKTGFQPDLNISIKLLILHLKCGCLSYARQVFDELPKPTLSAYNYMISGYLKHGLVKELLLLVQRMSYSGEKADGYTLSMVLKASNSRGSTMILPRSLCRLVHARIIKCDVELDDVLITALVDTYVKSGKLESARTVFETMKDENVVCCTSMISGYMNQGFVEDAEEIFNTTKVKDIVVYNAMVEGFSRSGETAKRSVDMYISMQRAGFHPNISTFASVIGACSVLTSHEVGQQVHAQIMKSGVYTHIKMGSSLLDMYAKCGGINDARRVFDQMQEKNVFSWTSMIDGYGKNGNPEEALELFTRMKEFRIEPNYVTFLGALSACSHSGLVDKGYEIFESMQRDYSMKPKMEHYACIVDLMGRAGDLNKAFEFARAMPERPDSDIWAALLSSCNLHGNVELASIAASELFKLNADKRPGAYLALSNVYASNDKWDNVSKIREVMKRRRISKTIGRSWTSED

SEQ ID NO: 69912 - protein, 761 aa, Arabidopsis thaliana
  peptide (1)..(761): Ceres Seq. ID no. 2041500
  misc_feature (581)..(615): Pfam Name: PPR repeat Pfam Description: PPR repeat
  misc_feature (292)..(367): Homolog of NCBI NO: 15218760 NR Description: hypothetical protein; protein id: At1g28690.1
  misc_feature (1)..(243): Homolog of NCBI NO: 25372968 NR Description: protein F1K23.10 [imported] - Arabidopsis >gi|10764853|gb|AAG22833.1|AC007508_6 F1K23.10 [Arabidopsis
  misc_feature (272)..(761): Homolog of NCBI NO: 34896270 NR Description: hypothetical protein [Oryza sativa]
  misc_feature (1)..(237): Homolog of NCBI NO: 18396892 NR Description: expressed protein; protein id: At1g28710.1, by cDNA: gi_15027990, supported by cDNA: gi_20259204 [Arabidopsis >gi|10764852|gb|AAG22832.1|AC007508_5 F1K23.9 [Arabidopsis
  misc_feature (1)..(74): Homolog of NCBI NO: 15218762 NR Description: hypothetical protein common family; protein id:
  misc_feature (89)..(243): Homolog of NCBI NO: 15218762 NR Description: hypothetical protein common family; protein id:
  misc_feature (446)..(757): Homolog of NCBI NO: 38423978 NR Description: PPR-repeat protein-like [Oryza sativa (japonica
  misc_feature (261)..(474): Homolog of NCBI NO: 38423978 NR Description: PPR-repeat protein-like [Oryza sativa (japonica
  misc_feature (279)..(757): Homolog of NCBI NO: 21740490 NR Description: OSJNBa0006B20.5 [Oryza sativa (japonica
  misc_feature (451)..(757): Homolog of NCBI NO: 34897084 NR Description: hypothetical protein [Oryza sativa (japonica group)] >gi|12957718|gb|AAK09236.1| hypothetical protein [Oryza
MLDLFLESFWEGEGTLPLLDHLMVVAVDQTAYDRCRFKRLHCYKMETEDGVDLEGEKVFMSKDFIEMMWRRTRLILDVLRRGYNVIFTDTDVMWLRSPLSRLNMSLDMQISVDRINVGGQLINTGFYHVRSNNKTISLFQKWYDMRLNSTGMKEQDVLKNLLDSGFFNQLGLNVGFLSTTEFSGFCQDSPHMGVVTTVHANCCLHIPAKVFDLTRVLRDWKRYKASHVNSKWSPHLKSNVSMRIFRFTSISPRILPSNHYSTFPLKQNVSSLSPAKYIAGALQEHINSPAPKAGKKIHADIIKTGFQPDLNISIKLLILHLKCGCLSYARQVFDELPKPTLSAYNYMISGYLKHGLVKELLLLVQRMSYSGEKADGYTLSMVLKASNSRGSTMILPRSLCRLVHARIIKCDVELDDVLITALVDTYVKSGKLESARTVFETMKDENVVCCTSMISGYMNQGFVEDAEEIFNTTKVKDIVVYNAMVEGFSRSGETAKRSVDMYISMQRAGFHPNISTFASVIGACSVLTSHEVGQQVHAQIMKSGVYTHIKMGSSLLDMYAKCGGINDARRVFDQMQEKNVFSWTSMIDGYGKNGNPEEALELFTRMKEFRIEPNYVTFLGALSACSHSGLVDKGYEIFESMQRDYSMKPKMEHYACIVDLMGRAGDLNKAFEFARAMPERPDSDIWAALLSSCNLHGNVELASIAASELFKLNADKRPGAYLALSNVYASNDKWDNVSKIREVMKRRRISKTIGRSWTSED

SEQ ID NO: 69913 - DNA, 2493 bp, Arabidopsis thaliana
  misc_feature (1)..(2493): Ceres Seq. ID no. 2044245
  misc_feature: MA Experiment ID: 20000328 Result: Down-regulated in Transcription
  misc_feature: MA Experiment 20000328 PARAMETER Experiment Name: At_42deg_Heat_Sub_P Parameter: Age (day) Value: 14
  misc_feature: MA Experiment 20000328 PARAMETER Experiment Name: At_42deg_Heat_Sub_P Parameter: Organism Value: A. thaliana
  misc_feature: MA Experiment 20000328 PARAMETER Experiment Name: At_42deg_Heat_Sub_P Parameter: Plant Line Value: WS
  misc_feature: MA Experiment 20000328 PARAMETER Experiment Name: At_42deg_Heat_Sub_P Parameter: Temperature (deg C) Value: 42 vs. 22
  misc_feature: MA Experiment 20000328 PARAMETER Experiment Name: At_42deg_Heat_Sub_P Parameter: Timepoint (hr) Value: 6
  misc_feature: MA Experiment 20000328 PARAMETER Experiment Name: At_42deg_Heat_Sub_P Parameter: Tissue Value: Aerial
atgacaacggcgatgatgatattcgcggttttggttacagtggtggaggtggaagcacagactgagtgcgtgagcaagatagttccctgcttcaggttcttgaacacgacaacaaagccgtcgacggattgttgcaactcgatcaaggaagcgatggagaaagattttagctgtctctgcaccatctacaacactcctggtttactcgctcagttcaacatcactacagatcaagctctcggtctcaaccttcgatgtggagtcaacactgatctatccgcttgttccggttctggtgctccaccaccaccacctgatctatttcctccaccttcagctcaaatgctccctccacctccagcaaaaggtgcttgtaagagtcgtaactttagtttgggcagttttcaacagtcacaacatttagtttggtcagatatgtacttaagatcagtatcttcgtcacctgcacctccatcgccaccttcttcatcccgaccacgtccattgccacgtccatcaatgtcaaggagctttacgatagaaaacaaatgccaatacaccatatggcctgcaacctacggctataggagatcactagaaacaaccggttttgttcttgagaaaggagagacgcgtaccatcaaagcgccgtcatcatggataggtcgtttctggggtaggacactctgctccaccaactcaacagggggtttctcatgtgccacgggagactgcacctccggaaaaatcaagtgcctcggtatccccatagatccaacaacagtggtcgagtttaacctcgcttcttacggtgtcgactattatgtcgtcaacgtcttcaatggttacaacctccctttgcttgtgacccccgagaacaaaaactgcagaagcattgaatgcgttattgacatgaacgagacatgtccctcggagctaatggtgaacagtagtggccttggatcgcaccatccaatagcctgcatgaccacttgtcagagataccagttgccagagctttgctgtatcggactctcttctggggtggtcgtaccaccgggaatatgcaagcggacgatctactcgcggacattcaataacgtgtgcccaagcgcttatagttacgcctacgacgttgataacagcagtttcacttgtccaaacttctccaactttgtcatcacgttttgtccgtctagctcaacggtcccagaggcaggaaacatcaatagctcaacggtcccagaggcaggaaacatcaaaactggaacagaagcaaaaggaaatattccattgaggttaaaactcatacttggagtttcatcagtattggctacaatgatcattattgtgattgtgggaaaggttagagcaaataatatgagaaagagtgatttgaatgagaagaacatggaagcagtggtaatgttgaaacgatttagttatgtacaagtcaagaagatgacaaaatcatttgagaatgttcttgggaaagggggatttggaactgtctataaagggaagttacctgatggcagccgagatgttgcagtgaagatcttgaaggagtcaaacgaggatggagaagacttcatcaatgaaatagctagcatgagtaggacatctcatgctaatatcgtttctctacttggattctgttatgaagggaggaagaaagctataatttacgagttgatgccgaatggatccctcgacaagttcatctccaagaatatgtcggcgaagatggaatggaaaacgttatacaacattgcggtaggtgtgtctcatggcctagaatacttgcatagccattgtgtatcaaggattgtacatttcgatataaagccacagaacatactcatagatggagacttatgccctaagatttcggatttcggtcttgctaagctttgcaaaaataatgaaagcatcatttcaatgctacatgcaagaggcaccatagggtacattgctccagaagtgttctcccagaattttggaggagtttctcataagtctgatgtgtatagttatggaatggtggttcttgagatgattggagcaaggaacataggaagagctcaaaatgctggatccagtaatacttcaatgtactttccagattggatttataaagatcttgagaaaggagaaatcatgagttttttggcagatcaaataaccgaagaagaagatgagaagatagtaaagaaaatggtattggtgggtctgtggtgtattcagaccaatccatatgatcgtccaccaatgagcaaagttgttgaaatgttagagggaagtctagaggctctccagattccacctaagcctcttttatgtttacccgcaataacagctccaataacagttgatgaagacattcaagagacttcaagcttcttgaaaccaagtcaagatacttcatattattccgaacaaatagttcaagatattgtagaagagaatcaagatagctcaagatcttcctaa

SEQ ID NO: 69914 - protein, 830 aa, Arabidopsis thaliana
  peptide (1)..(830): Ceres Seq. ID no. 2044246
  misc_feature (182)..(398): Pfam Name: Thaumatin family Pfam Description: Thaumatin family
  misc_feature (174)..(830): Homolog of NCBI NO: 15240873 NR Description: receptor serine/threonine kinase PR5K; protein At5g38280.1, supported by cDNA: gi_1235679 [Arabidopsis thaliana]
  misc_feature (174)..(817): Homolog of NCBI NO: 1235680 NR Description: receptor serine/threonine kinase PR5K
  misc_feature (179)..(799): Homolog of NCBI NO: 30684346 NR Description: receptor serine/threonine kinase-related protein
  misc_feature (342)..(799): Homolog of NCBI NO: 7488208 NR Description: probable serine/threonine-specific protein kinase
  misc_feature (173)..(400): Homolog of NCBI NO: 7488208 NR Description: probable serine/threonine-specific protein kinase
  misc_feature (437)..(813): Homolog of NCBI NO: 15219781 NR Description: receptor serine/threonine kinase PR5K, putative; id: At1g66910.1 [Arabidopsis thaliana] >gi|25404649|pir||H96692
  misc_feature (442)..(813): Homolog of NCBI NO: 15219803 NR Description: kinase, putative; protein id: At1g66980.1
  misc_feature (442)..(813): Homolog of NCBI NO: 25404657 NR Description: hypothetical protein F1O19.6 [imported] - thaliana >gi|9755449|gb|AAF98210.1|AC007152_6 Unknown protein
  misc_feature (422)..(813): Homolog of NCBI NO: 10177799 NR Description: receptor serine/threonine kinase-like protein
  misc_feature (438)..(816): Homolog of NCBI NO: 15240865 NR Description: receptor serine/threonine protein kinase - like; id: At5g38260.1 [Arabidopsis thaliana]
MTTAMMIFAVLVTVVEVEAQTECVSKIVPCFRFLNTTTKPSTDCCNSIKEAMEKDFSCLCTIYNTPGLLAQFNITTDQALGLNLRCGVNTDLSACSGSGAPPPPPDLFPPPSAQMLPPPPAKGACKSRNFSLGSFQQSQHLVWSDMYLRSVSSSPAPPSPPSSSRPRPLPRPSMSRSFTIENKCQYTIWPATYGYRRSLETTGFVLEKGETRTIKAPSSWIGRFWGRTLCSTNSTGGFSCATGDCTSGKIKCLGIPIDPTTVVEFNLASYGVDYYVVNVFNGYNLPLLVTPENKNCRSIECVIDMNETCPSELMVNSSGLGSHHPIACMTTCQRYQLPELCCIGLSSGVVVPPGICKRTIYSRTFNNVCPSAYSYAYDVDNSSFTCPNFSNFVITFCPSSSTVPEAGNINSSTVPEAGNIKTGTEAKGNIPLRLKLILGVSSVLATMIIIVIVGKVRANNMRKSDLNEKNMEAVVMLKRFSYVQVKKMTKSFENVLGKGGFGTVYKGKLPDGSRDVAVKILKESNEDGEDFINEIASMSRTSHANIVSLLGFCYEGRKKAIIYELMPNGSLDKFISKNMSAKMEWKTLYNIAVGVSHGLEYLHSHCVSRIVHFDIKPQNILIDGDLCPKISDFGLAKLCKNNESIISMLHARGTIGYIAPEVFSQNFGGVSHKSDVYSYGMVVLEMIGARNIGRAQNAGSSNTSMYFPDWIYKDLEKGEIMSFLADQITEEEDEKIVKKMVLVGLWCIQTNPYDRPPMSKVVEMLEGSLEALQIPPKPLLCLPAITAPITVDEDIQETSSFLKPSQDTSYYSEQIVQDIVEENQDSSRSS

SEQ ID NO: 69915 - protein, 826 aa, Arabidopsis thaliana
  peptide (1)..(826): Ceres Seq. ID no. 2044247
  misc_feature (178)..(394): Pfam Name: Thaumatin family Pfam Description: Thaumatin family
  misc_feature (170)..(826): Homolog of NCBI NO: 15240873 NR Description: receptor serine/threonine kinase PR5K; protein At5g38280.1, supported by cDNA: gi_1235679 [Arabidopsis thaliana]
  misc_feature (170)..(813): Homolog of NCBI NO: 1235680 NR Description: receptor serine/threonine kinase PR5K
  misc_feature (175)..(795): Homolog of NCBI NO: 30684346 NR Description: receptor serine/threonine kinase-related protein
  misc_feature (338)..(795): Homolog of NCBI NO: 7488208 NR Description: probable serine/threonine-specific protein kinase
  misc_feature (169)..(396): Homolog of NCBI NO: 7488208 NR Description: probable serine/threonine-specific protein kinase
  misc_feature (433)..(809): Homolog of NCBI NO: 15219781 NR Description: receptor serine/threonine kinase PR5K, putative; id: At1g66910.1 [Arabidopsis thaliana] >gi|25404649|pir||H96692
  misc_feature (438)..(809): Homolog of NCBI NO: 15219803 NR Description: kinase, putative; protein id: At1g66980.1
  misc_feature (438)..(809): Homolog of NCBI NO: 25404657 NR Description: hypothetical protein F1O19.6 [imported] - thaliana >gi|9755449|gb|AAF98210.1|AC007152_6 Unknown protein
  misc_feature (418)..(809): Homolog of NCBI NO: 10177799 NR Description: receptor serine/threonine kinase-like protein
  misc_feature (434)..(812): Homolog of NCBI NO: 15240865 NR Description: receptor serine/threonine protein kinase - like; id: At5g38260.1 [Arabidopsis thaliana]
MMIFAVLVTVVEVEAQTECVSKIVPCFRFLNTTTKPSTDCCNSIKEAMEKDFSCLCTIYNTPGLLAQFNITTDQALGLNLRCGVNTDLSACSGSGAPPPPPDLFPPPSAQMLPPPPAKGACKSRNFSLGSFQQSQHLVWSDMYLRSVSSSPAPPSPPSSSRPRPLPRPSMSRSFTIENKCQYTIWPATYGYRRSLETTGFVLEKGETRTIKAPSSWIGRFWGRTLCSTNSTGGFSCATGDCTSGKIKCLGIPIDPTTVVEFNLASYGVDYYVVNVFNGYNLPLLVTPENKNCRSIECVIDMNETCPSELMVNSSGLGSHHPIACMTTCQRYQLPELCCIGLSSGVVVPPGICKRTIYSRTFNNVCPSAYSYAYDVDNSSFTCPNFSNFVITFCPSSSTVPEAGNINSSTVPEAGNIKTGTEAKGNIPLRLKLILGVSSVLATMIIIVIVGKVRANNMRKSDLNEKNMEAVVMLKRFSYVQVKKMTKSFENVLGKGGFGTVYKGKLPDGSRDVAVKILKESNEDGEDFINEIASMSRTSHANIVSLLGFCYEGRKKAIIYELMPNGSLDKFISKNMSAKMEWKTLYNIAVGVSHGLEYLHSHCVSRIVHFDIKPQNILIDGDLCPKISDFGLAKLCKNNESIISMLHARGTIGYIAPEVFSQNFGGVSHKSDVYSYGMVVLEMIGARNIGRAQNAGSSNTSMYFPDWIYKDLEKGEIMSFLADQITEEEDEKIVKKMVLVGLWCIQTNPYDRPPMSKVVEMLEGSLEALQIPPKPLLCLPAITAPITVDEDIQETSSFLKPSQDTSYYSEQIVQDIVEENQDSSRSS

SEQ ID NO: 69916 - protein, 825 aa, Arabidopsis thaliana
  peptide (1)..(825): Ceres Seq. ID no. 2044248
  misc_feature (177)..(393): Pfam Name: Thaumatin family Pfam Description: Thaumatin family
  misc_feature (169)..(825): Homolog of NCBI NO: 15240873 NR Description: receptor serine/threonine kinase PR5K; protein At5g38280.1, supported by cDNA: gi_1235679 [Arabidopsis thaliana]
  misc_feature (169)..(812): Homolog of NCBI NO: 1235680 NR Description: receptor serine/threonine kinase PR5K
  misc_feature (174)..(794): Homolog of NCBI NO: 30684346 NR Description: receptor serine/threonine kinase-related protein
  misc_feature (337)..(794): Homolog of NCBI NO: 7488208 NR Description: probable serine/threonine-specific protein kinase
  misc_feature (168)..(395): Homolog of NCBI NO: 7488208 NR Description: probable serine/threonine-specific protein kinase
  misc_feature (432)..(808): Homolog of NCBI NO: 15219781 NR Description: receptor serine/threonine kinase PR5K, putative; id: At1g66910.1 [Arabidopsis thaliana] >gi|25404649|pir||H96692
  misc_feature (437)..(808): Homolog of NCBI NO: 15219803 NR Description: kinase, putative; protein id: At1g66980.1
  misc_feature (437)..(808): Homolog of NCBI NO: 25404657 NR Description: hypothetical protein F1O19.6 [imported] - thaliana >gi|9755449|gb|AAF98210.1|AC007152_6 Unknown protein
  misc_feature (417)..(808): Homolog of NCBI NO: 10177799 NR Description: receptor serine/threonine kinase-like protein
  misc_feature (433)..(811): Homolog of NCBI NO: 15240865 NR Description: receptor serine/threonine protein kinase - like; id: At5g38260.1 [Arabidopsis thaliana]
MIFAVLVTVVEVEAQTECVSKIVPCFRFLNTTTKPSTDCCNSIKEAMEKDFSCLCTIYNTPGLLAQFNITTDQALGLNLRCGVNTDLSACSGSGAPPPPPDLFPPPSAQMLPPPPAKGACKSRNFSLGSFQQSQHLVWSDMYLRSVSSSPAPPSPPSSSRPRPLPRPSMSRSFTIENKCQYTIWPATYGYRRSLETTGFVLEKGETRTIKAPSSWIGRFWGRTLCSTNSTGGFSCATGDCTSGKIKCLGIPIDPTTVVEFNLASYGVDYYVVNVFNGYNLPLLVTPENKNCRSIECVIDMNETCPSELMVNSSGLGSHHPIACMTTCQRYQLPELCCIGLSSGVVVPPGICKRTIYSRTFNNVCPSAYSYAYDVDNSSFTCPNFSNFVITFCPSSSTVPEAGNINSSTVPEAGNIKTGTEAKGNIPLRLKLILGVSSVLATMIIIVIVGKVRANNMRKSDLNEKNMEAVVMLKRFSYVQVKKMTKSFENVLGKGGFGTVYKGKLPDGSRDVAVKILKESNEDGEDFINEIASMSRTSHANIVSLLGFCYEGRKKAIIYELMPNGSLDKFISKNMSAKMEWKTLYNIAVGVSHGLEYLHSHCVSRIVHFDIKPQNILIDGDLCPKISDFGLAKLCKNNESIISMLHARGTIGYIAPEVFSQNFGGVSHKSDVYSYGMVVLEMIGARNIGRAQNAGSSNTSMYFPDWIYKDLEKGEIMSFLADQITEEEDEKIVKKMVLVGLWCIQTNPYDRPPMSKVVEMLEGSLEALQIPPKPLLCLPAITAPITVDEDIQETSSFLKPSQDTSYYSEQIVQDIVEENQDSSRSS

SEQ ID NO: 69917 - DNA, 957 bp, Arabidopsis thaliana
  misc_feature (1)..(957): Ceres Seq. ID no. 2044354
  misc_feature: MA Experiment ID: 20000180 Result: Down-regulated in Transcription
  misc_feature: MA Experiment 20000180 PARAMETER Experiment Name: At_Germinating_Seeds_P Parameter: Age (hr) Value: 24 vs. 0
  misc_feature: MA Experiment 20000180 PARAMETER Experiment Name: At_Germinating_Seeds_P Parameter: Tissue Value: Germinating Seeds
  misc_feature: MA Experiment ID: 20000437 Result: Up-regulated in Transcription
  misc_feature: MA Experiment 20000437 PARAMETER Experiment Name: At_Drought_P Parameter: Age (day) Value: 8
  misc_feature: MA Experiment 20000437 PARAMETER Experiment Name: At_Drought_P Parameter: Organism Value: A. thaliana
  misc_feature: MA Experiment 20000437 PARAMETER Experiment Name: At_Drought_P Parameter: Plant Line Value: WS
  misc_feature: MA Experiment 20000437 PARAMETER Experiment Name: At_Drought_P Parameter: Timepoint (hr) Value: 24
  misc_feature: MA Experiment 20000437 PARAMETER Experiment Name: At_Drought_P Parameter: Tissue Value: Whole Plant
  misc_feature: MA Experiment 20000437 PARAMETER Experiment Name: At_Drought_P Parameter: Treatment Value: Drought vs. No Drought
  misc_feature: MA Experiment ID: 20000439 Result: Up-regulated in Transcription
  misc_feature: MA Experiment 20000439 PARAMETER Experiment Name: At_Roots__P Parameter: Age (day) Value: 14 vs. 21
  misc_feature: MA Experiment 20000439 PARAMETER Experiment Name: At_Roots__P Parameter: Organism Value: A. thaliana
  misc_feature: MA Experiment 20000439 PARAMETER Experiment Name: At_Roots__P Parameter: Tissue Value: Roots vs. Whole Plant
  misc_feature: MA Experiment ID: 20001555 Result: Up-regulated in Transcription
  misc_feature: MA Experiment 20001555 PARAMETER Experiment Name: At_Drought_Soil_Dry_P Parameter: Age (day) Value: 24
  misc_feature: MA Experiment 20001555 PARAMETER Experiment Name: At_Drought_Soil_Dry_P Parameter: Organism Value: A. thaliana
  misc_feature: MA Experiment 20001555 PARAMETER Experiment Name: At_Drought_Soil_Dry_P Parameter: Plant Line Value: WS
  misc_feature: MA Experiment 20001555 PARAMETER Experiment Name: At_Drought_Soil_Dry_P Parameter: Post Timepoint (hr) Value: None
  misc_feature: MA Experiment 20001555 PARAMETER Experiment Name: At_Drought_Soil_Dry_P Parameter: Post-Treatment Value: None
  misc_feature: MA Experiment 20001555 PARAMETER Experiment Name: At_Drought_Soil_Dry_P Parameter: Timepoint (day) Value: 10
  misc_feature: MA Experiment 20001555 PARAMETER Experiment Name: At_Drought_Soil_Dry_P Parameter: Treatment Value: Drought vs. No Drought
  misc_feature: MA Experiment ID: 20001905 Result: Up-regulated in Transcription
  misc_feature: MA Experiment 20001905 PARAMETER Experiment Name: At_Drought_Reproduction_P Parameter: Age (day) Value: 40
  misc_feature: MA Experiment 20001905 PARAMETER Experiment Name: At_Drought_Reproduction_P Parameter: Organism Value: A. thaliana
  misc_feature: MA Experiment 20001905 PARAMETER Experiment Name: At_Drought_Reproduction_P Parameter: Plant Line Value: WS
  misc_feature: MA Experiment 20001905 PARAMETER Experiment Name: At_Drought_Reproduction_P Parameter: Timepoint (day) Value: 10
  misc_feature: MA Experiment 20001905 PARAMETER Experiment Name: At_Drought_Reproduction_P Parameter: Tissue Value: Rosettes
  misc_feature: MA Experiment 20001905 PARAMETER Experiment Name: At_Drought_Reproduction_P Parameter: Treatment Value: Drought vs. No Drought
atggaaacaagcgacagaattagccctggtggtggtataggagcagaagttccatcagcgtatcatatggctccgagaccttcagatagccctgctaaccagtttatggggttgtctctccctcccatggaagccccaatgccttcttcaggggaagcctcagggaagaagaggagaggcagacctcgtaaatatgaagctaatggtgctcctttgccttcttcatcagttcctcttgtgaagaaacgagtaagaggcaagctcaatggttttgatatgaagaagatgcataagaccattgggttccattcttctggtgaaaggtttggtgttggtggtggtgttggtggtggtgttggatcaaatttcacgccgcatgtaatcacagtgaacactggtgaggatattactatgagaatcatctccttttcacaacaaggaccacgagctatttgtatcttatcagcaaatggagtgatatcaaacgttactcttcgccaacccgattcttgcggtggtactctcacctacgagggtcggtttgagatactgtctctgtctggttcattcatggaaacagagaatcaaggttcaaaaggtcggtctggtggcatgagtgtatctttggccggtcctgatggtcgtgttgtcggtggcggtgtcgctggcctgctcattgccgccactcctattcaggttgttgttggcagttttataacgagtgatcaacaagatcatcagaaaccgaggaagcaaagagtcgagcatgcccctgcagcagtcatgtcagtgcctcctcctccttctcctcctcctccggcggcttctgttttctcaccgacaaacccggacagagagcagccgccatcttcattcggtatctccagctggaccaacggacaggacatgccgagaaactcagccactgacatcaacatatctttaccagtcgactga

SEQ ID NO: 69918 - protein, 318 aa, Arabidopsis thaliana
  peptide (1)..(318): Ceres Seq. ID no. 2044355
  misc_feature (135)..(318): Homolog of NCBI NO: 15236743 NR Description: putative transcription factor; protein id:
  misc_feature (1)..(149): Homolog of NCBI NO: 15236743 NR Description: putative transcription factor; protein id:
  misc_feature (18)..(315): Homolog of NCBI NO: 22328578 NR Description: putative DNA-binding protein; protein id: supported by cDNA: gi_17979484 [Arabidopsis thaliana] AT4g12080/F16J13_150 [Arabidopsis thaliana]
  misc_feature (41)..(315): Homolog of NCBI NO: 15235790 NR Description: putative DNA binding protein; protein id: supported by cDNA: 12041. [Arabidopsis thaliana]
  misc_feature (17)..(253): Homolog of NCBI NO: 15235023 NR Description: putative protein; protein id: At4g25320.1, by cDNA: gi_20466212 [Arabidopsis thaliana]
  misc_feature (71)..(315): Homolog of NCBI NO: 7485570 NR Description: hypothetical protein F16J13.150 - Arabidopsis
  misc_feature (27)..(293): Homolog of NCBI NO: 8809639 NR Description: contains similarity to DNA-binding [Arabidopsis thaliana] >gi|26451694|dbj|BAC42942.1| unknown [Arabidopsis thaliana] >gi|28973553|gb|AAO64101.1| unknown
  misc_feature (114)..(293): Homolog of NCBI NO: 15241763 NR Description: putative protein; protein id: At5g62260.1
  misc_feature (26)..(309): Homolog of NCBI NO: 14326504 NR Description: At2g33620/F4P9.39 [Arabidopsis thaliana]
  misc_feature (26)..(309): Homolog of NCBI NO: 2598227 NR Description: AT-hook protein 1 [Arabidopsis thaliana]
METSDRISPGGGIGAEVPSAYHMAPRPSDSPANQFMGLSLPPMEAPMPSSGEASGKKRRGRPRKYEANGAPLPSSSVPLVKKRVRGKLNGFDMKKMHKTIGFHSSGERFGVGGGVGGGVGSNFTPHVITVNTGEDITMRIISFSQQGPRAICILSANGVISNVTLRQPDSCGGTLTYEGRFEILSLSGSFMETENQGSKGRSGGMSVSLAGPDGRVVGGGVAGLLIAATPIQVVVGSFITSDQQDHQKPRKQRVEHAPAAVMSVPPPPSPPPPAASVFSPTNPDREQPPSSFGISSWTNGQDMPRNSATDINISLPVD

SEQ ID NO: 69919 - protein, 296 aa, Arabidopsis thaliana
  peptide (1)..(296): Ceres Seq. ID no. 2044356
  misc_feature (19)..(293): Homolog of NCBI NO: 15235790 NR Description: putative DNA binding protein; protein id: supported by cDNA: 12041. [Arabidopsis thaliana]
  misc_feature (1)..(231): Homolog of NCBI NO: 15235023 NR Description: putative protein; protein id: At4g25320.1, by cDNA: gi_20466212 [Arabidopsis thaliana]
  misc_feature (49)..(293): Homolog of NCBI NO: 7485570 NR Description: hypothetical protein F16J13.150 - Arabidopsis
  misc_feature (5)..(271): Homolog of NCBI NO: 8809639 NR Description: contains similarity to DNA-binding [Arabidopsis thaliana] >gi|26451694|dbj|BAC42942.1| unknown [Arabidopsis thaliana] >gi|28973553|gb|AAO64101.1| unknown
  misc_feature (92)..(271): Homolog of NCBI NO: 15241763 NR Description: putative protein; protein id: At5g62260.1
  misc_feature (4)..(287): Homolog of NCBI NO: 14326504 NR Description: At2g33620/F4P9.39 [Arabidopsis thaliana]
  misc_feature (4)..(287): Homolog of NCBI NO: 2598227 NR Description: AT-hook protein 1 [Arabidopsis thaliana]
  misc_feature (113)..(296): Homolog of NCBI NO: 15236743 NR Description: putative transcription factor; protein id:
  misc_feature (1)..(127): Homolog of NCBI NO: 15236743 NR Description: putative transcription factor; protein id:
  misc_feature (1)..(293): Homolog of NCBI NO: 22328578 NR Description: putative DNA-binding protein; protein id: supported by cDNA: gi_17979484 [Arabidopsis thaliana] AT4g12080/F16J13_150 [Arabidopsis thaliana]
MAPRPSDSPANQFMGLSLPPMEAPMPSSGEASGKKRRGRPRKYEANGAPLPSSSVPLVKKRVRGKLNGFDMKKMHKTIGFHSSGERFGVGGGVGGGVGSNFTPHVITVNTGEDITMRIISFSQQGPRAICILSANGVISNVTLRQPDSCGGTLTYEGRFEILSLSGSFMETENQGSKGRSGGMSVSLAGPDGRVVGGGVAGLLIAATPIQVVVGSFITSDQQDHQKPRKQRVEHAPAAVMSVPPPPSPPPPAASVFSPTNPDREQPPSSFGISSWTNGQDMPRNSATDINISLPVD

SEQ ID NO: 69920 - protein, 283 aa, Arabidopsis thaliana
  peptide (1)..(283): Ceres Seq. ID no. 2044357
  misc_feature (100)..(283): Homolog of NCBI NO: 15236743 NR Description: putative transcription factor; protein id:
  misc_feature (1)..(114): Homolog of NCBI NO: 15236743 NR Description: putative transcription factor; protein id:
  misc_feature (1)..(280): Homolog of NCBI NO: 22328578 NR Description: putative DNA-binding protein; protein id: supported by cDNA: gi_17979484 [Arabidopsis thaliana] AT4g12080/F16J13_150 [Arabidopsis thaliana]
  misc_feature (6)..(280): Homolog of NCBI NO: 15235790 NR Description: putative DNA binding protein; protein id: supported by cDNA: 12041. [Arabidopsis thaliana]
  misc_feature (1)..(218): Homolog of NCBI NO: 15235023 NR Description: putative protein; protein id: At4g25320.1, by cDNA: gi_20466212 [Arabidopsis thaliana]
  misc_feature (36)..(280): Homolog of NCBI NO: 7485570 NR Description: hypothetical protein F16J13.150 - Arabidopsis
  misc_feature (1)..(258): Homolog of NCBI NO: 8809639 NR Description: contains similarity to DNA-binding [Arabidopsis thaliana] >gi|26451694|dbj|BAC42942.1| unknown [Arabidopsis thaliana] >gi|28973553|gb|AAO64101.1| unknown
  misc_feature (79)..(258): Homolog of NCBI NO: 15241763 NR Description: putative protein; protein id: At5g62260.1
  misc_feature (1)..(274): Homolog of NCBI NO: 14326504 NR Description: At2g33620/F4P9.39 [Arabidopsis thaliana]
  misc_feature (1)..(274): Homolog of NCBI NO: 2598227 NR Description: AT-hook protein 1 [Arabidopsis thaliana]
MGLSLPPMEAPMPSSGEASGKKRRGRPRKYEANGAPLPSSSVPLVKKRVRGKLNGFDMKKMHKTIGFHSSGERFGVGGGVGGGVGSNFTPHVITVNTGEDITMRIISFSQQGPRAICILSANGVISNVTLRQPDSCGGTLTYEGRFEILSLSGSFMETENQGSKGRSGGMSVSLAGPDGRVVGGGVAGLLIAATPIQVVVGSFITSDQQDHQKPRKQRVEHAPAAVMSVPPPPSPPPPAASVFSPTNPDREQPPSSFGISSWTNGQDMPRNSATDINISLPVD

SEQ ID NO: 69921 - DNA, 909 bp, Arabidopsis thaliana
  misc_feature (1)..(909): Ceres Seq. ID no. 2047346
  misc_feature: MA Experiment ID: 20000171 Result: Up-regulated in Transcription
  misc_feature: MA Experiment 20000171 PARAMETER Experiment Name: At_42deg_Heat_P Parameter: Age (day) Value: 14
  misc_feature: MA Experiment 20000171 PARAMETER Experiment Name: At_42deg_Heat_P Parameter: Organism Value: A. thaliana
  misc_feature: MA Experiment 20000171 PARAMETER Experiment Name: At_42deg_Heat_P Parameter: Plant Line Value: WS
  misc_feature: MA Experiment 20000171 PARAMETER Experiment Name: At_42deg_Heat_P Parameter: Temperature (deg C) Value: 42 vs. 22
  misc_feature: MA Experiment 20000171 PARAMETER Experiment Name: At_42deg_Heat_P Parameter: Timepoint (hr) Value: 1
  misc_feature: MA Experiment 20000171 PARAMETER Experiment Name: At_42deg_Heat_P Parameter: Tissue Value: Aerial
  misc_feature: MA Experiment ID: 20000185 Result: Up-regulated in Transcription
  misc_feature: MA Experiment 20000185 PARAMETER Experiment Name: At_Roots__P Parameter: Age (day) Value: 7 vs. 21
  misc_feature: MA Experiment 20000185 PARAMETER Experiment Name: At_Roots__P Parameter: Organism Value: A. thaliana
  misc_feature: MA Experiment 20000185 PARAMETER Experiment Name: At_Roots__P Parameter: Tissue Value: Roots vs. Whole Plant
  misc_feature: MA Experiment ID: 20000227 Result: Up-regulated in Transcription
  misc_feature: MA Experiment 20000227 PARAMETER Experiment Name: At_Root-Tips-vs-Tops_P Parameter: Tissue Value: Root Tips vs. Root Tops
atgttgtctttattctctgttgtttttacttttctagctctttttctcatccctggtctcttcatctctcggcgactaaatgttcctttgtcgttgacaaatatcctcagattcatcaaaatcatagcttctaaatacgatgatgaggaagaaaggaacgagaaacgtggtacaatgggagagaaacagaaacgagggagaaatataatgccaaagcatgtggcggttatattggacggaaacagacgttgggctgaaaaacgaggactcgggacatcggaaggccacgaggccggagcgagaaggctcatggagaatgctaaggattgtttcgctatggggacaaacactatctcactctttgctttctccaccgaaaattgggaaagaccagaggatgaagttaagtgcttgatggccttgtttgagaaatacttagcgtctgatatgccttacctccgaagtgataagatcaagatctcggttatcgggaaccgtacaaaactccccgagtcgcttctaggtttgatagaagaggtagaggaagctacaaagagttacgaagggaagaatctcattatagcaatagactatagtggaagatatgatatcttacaagcatgcaaaagtcttgcaaataaagtgaaagacgggctgattcaagtggaggacattaacgagaaggcgatggagaaagagttgttgacaaagtgtagcgaattcccaaaccctgacctgttgatcagaacaagcggagagcaaaggatcagtaacttctttttatggcaatctgcttacactgagctttactttccaactgttttgtggcctgattttggcgaagctgagtatcttgaggccttgacttggtatcagcaaaggcagaggcgattcggtcgacgagtttaa

SEQ ID NO: 69922 - protein, 302 aa, Arabidopsis thaliana
  peptide (1)..(302): Ceres Seq. ID no. 2047347
  misc_feature (77)..(300): Pfam Name: Putative undecaprenyl diphosphate synthase Pfam Description: Putative undecaprenyl diphosphate synthase
  misc_feature (1)..(302): Homolog of NCBI NO: 8843800 NR Description: cis-prenyltransferase homolog-like; undecaprenyl
  misc_feature (59)..(302): Homolog of NCBI NO: 18424148 NR Description: dehydrodolichyl diphosphate synthase (DEDOL-PP
  misc_feature (1)..(302): Homolog of NCBI NO: 18424144 NR Description: dehydrodolichyl diphosphate synthase (DEDOL-PP putative; protein id: At5g58780.1, supported by cDNA: gi_19699276 thaliana] >gi|19699277|gb|AAL91250.1| AT5g58780/mzn1_230
  misc_feature (1)..(302): Homolog of NCBI NO: 18400264 NR Description: dehydrodolichyl diphosphate synthase (DEDOL-PP protein id: At2g23410.1, supported by cDNA: gi_6651293
  misc_feature (1)..(302): Homolog of NCBI NO: 18424146 NR Description: dehydrodolichyl diphosphate synthase (DEDOL-PP putative; protein id: At5g58782.1, supported by cDNA: 11295.
  misc_feature (1)..(302): Homolog of NCBI NO: 21618322 NR Description: undecaprenyl pyrophosphate synthetase-like
  misc_feature (26)..(302): Homolog of NCBI NO: 7447521 NR Description: hypothetical protein At2g23410 [imported] -
  misc_feature (78)..(302): Homolog of NCBI NO: 8843798 NR Description: undecaprenyl pyrophosphate synthetase-like
  misc_feature (70)..(302): Homolog of NCBI NO: 8843799 NR Description: undecaprenyl pyrophosphate synthetase-like
  misc_feature (43)..(301): Homolog of NCBI NO: 15237748 NR Description: dehydrodolichyl diphosphate synthase (DEDOL-PP putative; protein id: At5g58770.1 [Arabidopsis thaliana] contains similarity to unknown
MLSLFSVVFTFLALFLIPGLFISRRLNVPLSLTNILRFIKIIASKYDDEEERNEKRGTMGEKQKRGRNIMPKHVAVILDGNRRWAEKRGLGTSEGHEAGARRLMENAKDCFAMGTNTISLFAFSTENWERPEDEVKCLMALFEKYLASDMPYLRSDKIKISVIGNRTKLPESLLGLIEEVEEATKSYEGKNLIIAIDYSGRYDILQACKSLANKVKDGLIQVEDINEKAMEKELLTKCSEFPNPDLLIRTSGEQRISNFFLWQSAYTELYFPTVLWPDFGEAEYLEALTWYQQRQRRFGRRV

SEQ ID NO: 69923 - protein, 244 aa, Arabidopsis thaliana
  peptide (1)..(244): Ceres Seq. ID no. 2047348
  misc_feature (19)..(242): Pfam Name: Putative undecaprenyl diphosphate synthase Pfam Description: Putative undecaprenyl diphosphate synthase
  misc_feature (1)..(244): Homolog of NCBI NO: 8843800 NR Description: cis-prenyltransferase homolog-like; undecaprenyl
  misc_feature (1)..(244): Homolog of NCBI NO: 18424148 NR Description: dehydrodolichyl diphosphate synthase (DEDOL-PP
  misc_feature (1)..(244): Homolog of NCBI NO: 18424144 NR Description: dehydrodolichyl diphosphate synthase (DEDOL-PP putative; protein id: At5g58780.1, supported by cDNA: gi_19699276 thaliana] >gi|19699277|gb|AAL91250.1| AT5g58780/mzn1_230
  misc_feature (1)..(244): Homolog of NCBI NO: 18400264 NR Description: dehydrodolichyl diphosphate synthase (DEDOL-PP protein id: At2g23410.1, supported by cDNA: gi_6651293
  misc_feature (1)..(244): Homolog of NCBI NO: 18424146 NR Description: dehydrodolichyl diphosphate synthase (DEDOL-PP putative; protein id: At5g58782.1, supported by cDNA: 11295.
  misc_feature (1)..(244): Homolog of NCBI NO: 21618322 NR Description: undecaprenyl pyrophosphate synthetase-like
  misc_feature (1)..(244): Homolog of NCBI NO: 7447521 NR Description: hypothetical protein At2g23410 [imported] -
  misc_feature (20)..(244): Homolog of NCBI NO: 8843798 NR Description: undecaprenyl pyrophosphate synthetase-like
  misc_feature (12)..(244): Homolog of NCBI NO: 8843799 NR Description: undecaprenyl pyrophosphate synthetase-like
  misc_feature (1)..(243): Homolog of NCBI NO: 15237748 NR Description: dehydrodolichyl diphosphate synthase (DEDOL-PP putative; protein id: At5g58770.1 [Arabidopsis thaliana] contains similarity to unknown
MGEKQKRGRNIMPKHVAVILDGNRRWAEKRGLGTSEGHEAGARRLMENAKDCFAMGTNTISLFAFSTENWERPEDEVKCLMALFEKYLASDMPYLRSDKIKISVIGNRTKLPESLLGLIEEVEEATKSYEGKNLIIAIDYSGRYDILQACKSLANKVKDGLIQVEDINEKAMEKELLTKCSEFPNPDLLIRTSGEQRISNFFLWQSAYTELYFPTVLWPDFGEAEYLEALTWYQQRQRRFGRRV

SEQ ID NO: 69924 - protein, 233 aa, Arabidopsis thaliana
  peptide (1)..(233): Ceres Seq. ID no. 2047349
  misc_feature (8)..(231): Pfam Name: Putative undecaprenyl diphosphate synthase Pfam Description: Putative undecaprenyl diphosphate synthase
  misc_feature (1)..(233): Homolog of NCBI NO: 8843800 NR Description: cis-prenyltransferase homolog-like; undecaprenyl
  misc_feature (1)..(233): Homolog of NCBI NO: 18424148 NR Description: dehydrodolichyl diphosphate synthase (DEDOL-PP
  misc_feature (1)..(233): Homolog of NCBI NO: 18424144 NR Description: dehydrodolichyl diphosphate synthase (DEDOL-PP putative; protein id: At5g58780.1, supported by cDNA: gi_19699276 thaliana] >gi|19699277|gb|AAL91250.1| AT5g58780/mzn1_230
  misc_feature (1)..(233): Homolog of NCBI NO: 18400264 NR Description: dehydrodolichyl diphosphate synthase (DEDOL-PP protein id: At2g23410.1, supported by cDNA: gi_6651293
  misc_feature (1)..(233): Homolog of NCBI NO: 18424146 NR Description: dehydrodolichyl diphosphate synthase (DEDOL-PP putative; protein id: At5g58782.1, supported by cDNA: 11295.
  misc_feature (1)..(233): Homolog of NCBI NO: 21618322 NR Description: undecaprenyl pyrophosphate synthetase-like
  misc_feature (1)..(233): Homolog of NCBI NO: 7447521 NR Description: hypothetical protein At2g23410 [imported] -
  misc_feature (9)..(233): Homolog of NCBI NO: 8843798 NR Description: undecaprenyl pyrophosphate synthetase-like
  misc_feature (1)..(233): Homolog of NCBI NO: 8843799 NR Description: undecaprenyl pyrophosphate synthetase-like
  misc_feature (1)..(232): Homolog of NCBI NO: 15237748 NR Description: dehydrodolichyl diphosphate synthase (DEDOL-PP putative; protein id: At5g58770.1 [Arabidopsis thaliana] contains similarity to unknown
MPKHVAVILDGNRRWAEKRGLGTSEGHEAGARRLMENAKDCFAMGTNTISLFAFSTENWERPEDEVKCLMALFEKYLASDMPYLRSDKIKISVIGNRTKLPESLLGLIEEVEEATKSYEGKNLIIAIDYSGRYDILQACKSLANKVKDGLIQVEDINEKAMEKELLTKCSEFPNPDLLIRTSGEQRISNFFLWQSAYTELYFPTVLWPDFGEAEYLEALTWYQQRQRRFGRRV

SEQ ID NO: 69925 - DNA, 1944 bp, Arabidopsis thaliana
  misc_feature (1)..(1944): Ceres Seq. ID no. 2047670
  misc_feature: MA Experiment ID: 20000327 Result: Down-regulated in Transcription
  misc_feature: MA Experiment 20000327 PARAMETER Experiment Name: At_42deg_Heat_Sub_P Parameter: Age (day) Value: 14
  misc_feature: MA Experiment 20000327 PARAMETER Experiment Name: At_42deg_Heat_Sub_P Parameter: Organism Value: A. thaliana
  misc_feature: MA Experiment 20000327 PARAMETER Experiment Name: At_42deg_Heat_Sub_P Parameter: Plant Line Value: WS
  misc_feature: MA Experiment 20000327 PARAMETER Experiment Name: At_42deg_Heat_Sub_P Parameter: Temperature (deg C) Value: 42 vs. 22
  misc_feature: MA Experiment 20000327 PARAMETER Experiment Name: At_42deg_Heat_Sub_P Parameter: Timepoint (hr) Value: 1
  misc_feature: MA Experiment 20000327 PARAMETER Experiment Name: At_42deg_Heat_Sub_P Parameter: Tissue Value: Aerial
  misc_feature: MA Experiment ID: 20000347 Result: Down-regulated in Transcription
  misc_feature: MA Experiment 20000347 PARAMETER Experiment Name: At_2mM_SA_Sub_P Parameter: Age (day) Value: 14
  misc_feature: MA Experiment 20000347 PARAMETER Experiment Name: At_2mM_SA_Sub_P Parameter: Organism Value: A. thaliana
  misc_feature: MA Experiment 20000347 PARAMETER Experiment Name: At_2mM_SA_Sub_P Parameter: Plant Line Value: WS
  misc_feature: MA Experiment 20000347 PARAMETER Experiment Name: At_2mM_SA_Sub_P Parameter: Timepoint (hr) Value: 6
  misc_feature: MA Experiment 20000347 PARAMETER Experiment Name: At_2mM_SA_Sub_P Parameter: Tissue Value: Aerial
  misc_feature: MA Experiment 20000347 PARAMETER Experiment Name: At_2mM_SA_Sub_P Parameter: Treatment Value: 2mM SA vs. No Treatment
  misc_feature: MA Experiment ID: 20000355 Result: Up-regulated in Transcription
  misc_feature: MA Experiment 20000355 PARAMETER Experiment Name: At_Siliques_Sub_P Parameter: Age (day) Value: 21
  misc_feature: MA Experiment 20000355 PARAMETER Experiment Name: At_Siliques_Sub_P Parameter: Organism Value: A. thaliana
  misc_feature: MA Experiment 20000355 PARAMETER Experiment Name: At_Siliques_Sub_P Parameter: Plant Line Value: WS
  misc_feature: MA Experiment 20000355 PARAMETER Experiment Name: At_Siliques_Sub_P Parameter: Tissue Value: Less Than 5mm Siliques vs. Whole Plant
atgccttctttagatgttatcactccacaagcttatcttactccactggggtctcagagtatcaaccatgctaaatttttacaaatcccatggagacaatttgtcttcacaaagcctttaggtctctctaaatcaaccaaactcgacgaagccgtgacattgatagagaattcatcatcctcgccgtccaatctctccactcccgaagcttacacagaccttcttcatgcttgtatctccgctaaatcactccaccatggtataaaaatatgttctttgattctcaacaatcctagtctccgtcacaaccccaaattgctaagcaagctcattaccctattctcggtttgtcgccgattggatcttgctcggaaaatctttgacgatgtaactgattcgagtctacttactgagaaagtctgggcagctatggcgattgggtattctagaaacgggtcaccaagagacgctttgatcgtctatgtggatatgttgtgtagcttcattgagcctgggaatttttcgatatccgtggcgttgaaagcgtgcgtggatttgaaagatcttcgggttggtagaggaatccatgcccagattgtgaaacgaaaggagaaggttgaccaagtagtgtataatgtgctcttgaagctttatatggaaagtggcttatttgatgatgcacgtaaggtgttcgatggaatgtctgagagaaatgttgttacttggaattctttaatttcggtactcagtaagaaagttcgggttcatgagatgtttaatctgttcaggaagatgcaggaagagatgatcgggtttagttgggcgacgttgacgacaatattacccgcttgttcacgtgtcgctgctcttctcaccgggaaagagattcatgcacagattctgaaatcgaaagagaaacctgatgttccattgcttaattcattgatggatatgtatgggaaatgtggagaggttgagtattctcggagagtctttgatgtgatgttaactaaggatttggcttcatggaacataatgctaaactgttatgcaatcaacggaaatattgaagaagtgataaatctgtttgaatggatgatagagtcaggcgttgcaccagatgggattacctttgttgctttgttatctgggtgtagcgatacagggcttacggaatatggtctaagtttgtttgaacgcatgaaaacggagttcagagtttcaccggctttggagcattatgcttgtttggttgacatcttggggcgagctggtaagatcaaagaagcagtgaaggtgatagaaacaatgccatttaagccaagtgcgtccatttggggatcactgctcaactcttgcaggcttcatgggaatgtttcagtgggagagattgcagcaaaagagttgtttgttcttgaacctcataatccagggaactacgttatggtttctaacatatatgctgatgcaaagatgtgggacaatgtggataagattcgagagatgatgaaacaaagaggggtcaaaaaggaagctggttgcagttgggtacaggttaaagacaagattcaaatctttgttgcaggaggtggttatgagtttcgtaattctgatgagtataagaaagtatggacagaactacaagaagcaattgaaaaatccggttattcgcctaatacgagtgtggtgcttcatgatgttgatgaagaaaccaaagcaaattgggtttgtggacacagcgagagactcgcgacaacctactccctaatccacacaggtgaaggggttccaattaggattaccaagaatctcagagtatgtgcagactgtcattcatggatgaagattgtgtcacaagtaactaggagagtcatagtcctcagagacacaaaacgattccaccatttcgtcgacggaatctgctcatgtaaagactactggtga

SEQ ID NO: 69926 - protein, 647 aa, Arabidopsis thaliana
  peptide (1)..(647): Ceres Seq. ID no. 2047671
  misc_feature (341)..(375): Pfam Name: PPR repeat Pfam Description: PPR repeat
  misc_feature (7)..(647): Homolog of NCBI NO: 15232648 NR Description: putative protein; protein id: At3g46790.1
  misc_feature (68)..(647): Homolog of NCBI NO: 11281371 NR Description: hypothetical protein T8H10.30 - Arabidopsis >gi|6706414|emb|CAB66100.1| putative protein [Arabidopsis
  misc_feature (68)..(647): Homolog of NCBI NO: 30694644 NR Description: pentatricopeptide (PPR) repeat-containing protein
  misc_feature (68)..(647): Homolog of NCBI NO: 30794008 NR Description: unknown protein [Arabidopsis thaliana]
  misc_feature (23)..(647): Homolog of NCBI NO: 15231358 NR Description: hypothetical protein; protein id: At3g13770.1
  misc_feature (30)..(647): Homolog of NCBI NO: 11994419 NR Description: selenium-binding protein-like [Arabidopsis
  misc_feature (102)..(647): Homolog of NCBI NO: 18394615 NR Description: hypothetical protein; protein id: At1g18485.1
  misc_feature (30)..(646): Homolog of NCBI NO: 15230593 NR Description: unknown protein; protein id: At3g12770.1
  misc_feature (105)..(647): Homolog of NCBI NO: 15234006 NR Description: putative protein; protein id: At4g18750.1
  misc_feature (41)..(647): Homolog of NCBI NO: 18418348 NR Description: putative protein; protein id: At4g33990.1
MPSLDVITPQAYLTPLGSQSINHAKFLQIPWRQFVFTKPLGLSKSTKLDEAVTLIENSSSSPSNLSTPEAYTDLLHACISAKSLHHGIKICSLILNNPSLRHNPKLLSKLITLFSVCRRLDLARKIFDDVTDSSLLTEKVWAAMAIGYSRNGSPRDALIVYVDMLCSFIEPGNFSISVALKACVDLKDLRVGRGIHAQIVKRKEKVDQVVYNVLLKLYMESGLFDDARKVFDGMSERNVVTWNSLISVLSKKVRVHEMFNLFRKMQEEMIGFSWATLTTILPACSRVAALLTGKEIHAQILKSKEKPDVPLLNSLMDMYGKCGEVEYSRRVFDVMLTKDLASWNIMLNCYAINGNIEEVINLFEWMIESGVAPDGITFVALLSGCSDTGLTEYGLSLFERMKTEFRVSPALEHYACLVDILGRAGKIKEAVKVIETMPFKPSASIWGSLLNSCRLHGNVSVGEIAAKELFVLEPHNPGNYVMVSNIYADAKMWDNVDKIREMMKQRGVKKEAGCSWVQVKDKIQIFVAGGGYEFRNSDEYKKVWTELQEAIEKSGYSPNTSVVLHDVDEETKANWVCGHSERLATTYSLIHTGEGVPIRITKNLRVCADCHSWMKIVSQVTRRVIVLRDTKRFHHFVDGICSCKDYW

SEQ ID NO: 69927 - protein, 504 aa, Arabidopsis thaliana
  peptide (1)..(504): Ceres Seq. ID no. 2047672
  misc_feature (198)..(232): Pfam Name: PPR repeat Pfam Description: PPR repeat
  misc_feature (1)..(504): Homolog of NCBI NO: 15232648 NR Description: putative protein; protein id: At3g46790.1
  misc_feature (1)..(504): Homolog of NCBI NO: 11281371 NR Description: hypothetical protein T8H10.30 - Arabidopsis >gi|6706414|emb|CAB66100.1| putative protein [Arabidopsis
  misc_feature (1)..(504): Homolog of NCBI NO: 30794008 NR Description: unknown protein [Arabidopsis thaliana]
  misc_feature (1)..(504): Homolog of NCBI NO: 30694644 NR Description: pentatricopeptide (PPR) repeat-containing protein
  misc_feature (1)..(504): Homolog of NCBI NO: 15231358 NR Description: hypothetical protein; protein id: At3g13770.1
  misc_feature (1)..(504): Homolog of NCBI NO: 11994419 NR Description: selenium-binding protein-like [Arabidopsis
  misc_feature (1)..(504): Homolog of NCBI NO: 18394615 NR Description: hypothetical protein; protein id: At1g18485.1
  misc_feature (1)..(503): Homolog of NCBI NO: 15230593 NR Description: unknown protein; protein id: At3g12770.1
  misc_feature (1)..(504): Homolog of NCBI NO: 15234006 NR Description: putative protein; protein id: At4g18750.1
  misc_feature (1)..(504): Homolog of NCBI NO: 18418348 NR Description: putative protein; protein id: At4g33990.1
MAIGYSRNGSPRDALIVYVDMLCSFIEPGNFSISVALKACVDLKDLRVGRGIHAQIVKRKEKVDQVVYNVLLKLYMESGLFDDARKVFDGMSERNVVTWNSLISVLSKKVRVHEMFNLFRKMQEEMIGFSWATLTTILPACSRVAALLTGKEIHAQILKSKEKPDVPLLNSLMDMYGKCGEVEYSRRVFDVMLTKDLASWNIMLNCYAINGNIEEVINLFEWMIESGVAPDGITFVALLSGCSDTGLTEYGLSLFERMKTEFRVSPALEHYACLVDILGRAGKIKEAVKVIETMPFKPSASIWGSLLNSCRLHGNVSVGEIAAKELFVLEPHNPGNYVMVSNIYADAKMWDNVDKIREMMKQRGVKKEAGCSWVQVKDKIQIFVAGGGYEFRNSDEYKKVWTELQEAIEKSGYSPNTSVVLHDVDEETKANWVCGHSERLATTYSLIHTGEGVPIRITKNLRVCADCHSWMKIVSQVTRRVIVLRDTKRFHHFVDGICSCKDYW

SEQ ID NO: 69928 - protein, 484 aa, Arabidopsis thaliana
  peptide (1)..(484): Ceres Seq. ID no. 2047673
  misc_feature (178)..(212): Pfam Name: PPR repeat Pfam Description: PPR repeat
  misc_feature (1)..(484): Homolog of NCBI NO: 15232648 NR Description: putative protein; protein id: At3g46790.1
  misc_feature (1)..(484): Homolog of NCBI NO: 11281371 NR Description: hypothetical protein T8H10.30 - Arabidopsis >gi|6706414|emb|CAB66100.1| putative protein [Arabidopsis
  misc_feature (1)..(484): Homolog of NCBI NO: 30794008 NR Description: unknown protein [Arabidopsis thaliana]
  misc_feature (1)..(484): Homolog of NCBI NO: 30694644 NR Description: pentatricopeptide (PPR) repeat-containing protein
  misc_feature (1)..(484): Homolog of NCBI NO: 15231358 NR Description: hypothetical protein; protein id: At3g13770.1
  misc_feature (1)..(484): Homolog of NCBI NO: 11994419 NR Description: selenium-binding protein-like [Arabidopsis
  misc_feature (1)..(484): Homolog of NCBI NO: 18394615 NR Description: hypothetical protein; protein id: At1g18485.1
  misc_feature (1)..(483): Homolog of NCBI NO: 15230593 NR Description: unknown protein; protein id: At3g12770.1
  misc_feature (1)..(484): Homolog of NCBI NO: 15234006 NR Description: putative protein; protein id: At4g18750.1
  misc_feature (1)..(484): Homolog of NCBI NO: 18418348 NR Description: putative protein; protein id: At4g33990.1
MLCSFIEPGNFSISVALKACVDLKDLRVGRGIHAQIVKRKEKVDQVVYNVLLKLYMESGLFDDARKVFDGMSERNVVTWNSLISVLSKKVRVHEMFNLFRKMQEEMIGFSWATLTTILPACSRVAALLTGKEIHAQILKSKEKPDVPLLNSLMDMYGKCGEVEYSRRVFDVMLTKDLASWNIMLNCYAINGNIEEVINLFEWMIESGVAPDGITFVALLSGCSDTGLTEYGLSLFERMKTEFRVSPALEHYACLVDILGRAGKIKEAVKVIETMPFKPSASIWGSLLNSCRLHGNVSVGEIAAKELFVLEPHNPGNYVMVSNIYADAKMWDNVDKIREMMKQRGVKKEAGCSWVQVKDKIQIFVAGGGYEFRNSDEYKKVWTELQEAIEKSGYSPNTSVVLHDVDEETKANWVCGHSERLATTYSLIHTGEGVPIRITKNLRVCADCHSWMKIVSQVTRRVIVLRDTKRFHHFVDGICSCKDYW

SEQ ID NO: 69929 - DNA, 1065 bp, Arabidopsis thaliana
  misc_feature (1)..(1065): Ceres Seq. ID no. 2048171
  misc_feature: MA Experiment ID: 20000180 Result: Up-regulated in Transcription
  misc_feature: MA Experiment 20000180 PARAMETER Experiment Name: At_Germinating_Seeds_P Parameter: Age (hr) Value: 24 vs. 0
  misc_feature: MA Experiment 20000180 PARAMETER Experiment Name: At_Germinating_Seeds_P Parameter: Tissue Value: Germinating Seeds
  misc_feature: MA Experiment ID: 20000265 Result: Up-regulated in Transcription
  misc_feature: MA Experiment 20000265 PARAMETER Experiment Name: At_Open_Flower_P Parameter: Age (day) Value: 21
  misc_feature: MA Experiment 20000265 PARAMETER Experiment Name: At_Open_Flower_P Parameter: Plant Line Value: WS
  misc_feature: MA Experiment 20000265 PARAMETER Experiment Name: At_Open_Flower_P Parameter: Tissue Value: Closed Flower vs. Whole Plant
  misc_feature: MA Experiment ID: 20000286 Result: Up-regulated in Transcription
  misc_feature: MA Experiment 20000286 PARAMETER Experiment Name: At_Open_Flower_P Parameter: Age (day) Value: 21
  misc_feature: MA Experiment 20000286 PARAMETER Experiment Name: At_Open_Flower_P Parameter: Plant Line Value: WS
  misc_feature: MA Experiment 20000286 PARAMETER Experiment Name: At_Open_Flower_P Parameter: Tissue Value: Half Open vs. Whole Plant
  misc_feature: MA Experiment ID: 20000437 Result: Down-regulated in Transcription
  misc_feature: MA Experiment 20000437 PARAMETER Experiment Name: At_Drought_P Parameter: Age (day) Value: 8
  misc_feature: MA Experiment 20000437 PARAMETER Experiment Name: At_Drought_P Parameter: Organism Value: A. thaliana
  misc_feature: MA Experiment 20000437 PARAMETER Experiment Name: At_Drought_P Parameter: Plant Line Value: WS
  misc_feature: MA Experiment 20000437 PARAMETER Experiment Name: At_Drought_P Parameter: Timepoint (hr) Value: 24
  misc_feature: MA Experiment 20000437 PARAMETER Experiment Name: At_Drought_P Parameter: Tissue Value: Whole Plant
  misc_feature: MA Experiment 20000437 PARAMETER Experiment Name: At_Drought_P Parameter: Treatment Value: Drought vs. No Drought
atggtgagtgaaacaccattgagagttactaatcgatctggagatggatcaaatggatcaaaggaagtatcgatcgcgagagagaagaatggtgaaaacgcagagatattcatcagcccgagattcaaatcagcggcggctatggcgggttgggacgaagaagatctgataatcgctagctttgtggtagatgatactcctgaaagaagttcttcaaagcgaaggagacgttccaatttgttgtttaaatcaaccccaccttctggttcttcaagaaggaatcagcgtgttaagcaaagtcttgttccgttacctgttattgatcttgataaagtaatcagacatgaagaagaaaaatctgcagagaagaagaaaaagaagagagagatggaaacagaaacaaaagaagagaagaaaatagataaagatgagaagagtttgtcagatcatgttgtgcttccttgcatagataagcttcgagatgaattgtcttgcgcgatttgtcttgagatttgctttgaacctagtactacaacttgtggacacagcttctgcaaaaagtgtttgcgatctgcggcggataagtgtggaaggaaatgccctaaatgcaggcaactaataggaaatggaagatattgtactgtcaatacggttctttggaacacaatccagcttttgttccctaaagaagtcgaagcacagagagctgcttctgctaacttgaaaggcaaggagacaccgagtcctagaaatccgaatcaaaggctaagaagcagaaacagggaaactgcattgtttcaagagaggttacaaagagaggatatttcgagattgcttgtatctgaagagagaagtgagaggagcgaaagaaggaggagaagtacaagtatgaggttggatcaaaatagggatgcagcattagcgatgcggttacagcgacaggagttcgcatcagcttttggcgcaacgacggctgaaacttcttcttcatcggtttctactctgtcgcgagcaagagctaacctgcaagctatggcgtcaagagctgttcgcaggcaaggatga

SEQ ID NO: 69930 - protein, 354 aa, Arabidopsis thaliana
  peptide (1)..(354): Ceres Seq. ID no. 2048172
  misc_feature (165)..(203): Pfam Name: Zinc finger, C3HC4 type (RING finger) Pfam Description: Zinc finger, C3HC4 type (RING finger)
  misc_feature (1)..(354): Homolog of NCBI NO: 11994635 NR Description: gene_id:K1G2.4~ref|NP_008959.1~similar to unknown
  misc_feature (1)..(354): Homolog of NCBI NO: 15232143 NR Description: hypothetical protein; protein id: At3g27330.1
  misc_feature (162)..(289): Homolog of NCBI NO: 26343717 NR Description: unnamed protein product [Mus musculus]
  misc_feature (162)..(289): Homolog of NCBI NO: 26379538 NR Description: unnamed protein product [Mus musculus]
  misc_feature (161)..(241): Homolog of NCBI NO: 21554128 NR Description: unknown [Arabidopsis thaliana]
  misc_feature (161)..(241): Homolog of NCBI NO: 18394639 NR Description: expressed protein; protein id: At1g18660.1, by cDNA: 205719. [Arabidopsis thaliana]
  misc_feature (103)..(263): Homolog of NCBI NO: 22775495 NR Description: similar to A. thaliana AT4g08590 [Arabis
  misc_feature (162)..(318): Homolog of NCBI NO: 16549336 NR Description: unnamed protein product [Homo sapiens]
  misc_feature (162)..(318): Homolog of NCBI NO: 31377566 NR Description: hypothetical protein FLJ35794 [Homo sapiens]
  misc_feature (160)..(334): Homolog of NCBI NO: 31419000 NR Description: Unknown (protein for MGC:64185) [Danio rerio]
MVSETPLRVTNRSGDGSNGSKEVSIAREKNGENAEIFISPRFKSAAAMAGWDEEDLIIASFVVDDTPERSSSKRRRRSNLLFKSTPPSGSSRRNQRVKQSLVPLPVIDLDKVIRHEEEKSAEKKKKKREMETETKEEKKIDKDEKSLSDHVVLPCIDKLRDELSCAICLEICFEPSTTTCGHSFCKKCLRSAADKCGRKCPKCRQLIGNGRYCTVNTVLWNTIQLLFPKEVEAQRAASANLKGKETPSPRNPNQRLRSRNRETALFQERLQREDISRLLVSEERSERSERRRRSTSMRLDQNRDAALAMRLQRQEFASAFGATTAETSSSSVSTLSRARANLQAMASRAVRRQG

SEQ ID NO: 69931 - protein, 307 aa, Arabidopsis thaliana
  peptide (1)..(307): Ceres Seq. ID no. 2048173
  misc_feature (118)..(156): Pfam Name: Zinc finger, C3HC4 type (RING finger) Pfam Description: Zinc finger, C3HC4 type (RING finger)
  misc_feature (1)..(307): Homolog of NCBI NO: 11994635 NR Description: gene_id:K1G2.4~ref|NP_008959.1~similar to unknown
  misc_feature (1)..(307): Homolog of NCBI NO: 15232143 NR Description: hypothetical protein; protein id: At3g27330.1
  misc_feature (115)..(242): Homolog of NCBI NO: 26343717 NR Description: unnamed protein product [Mus musculus]
  misc_feature (115)..(242): Homolog of NCBI NO: 26379538 NR Description: unnamed protein product [Mus musculus]
  misc_feature (114)..(194): Homolog of NCBI NO: 21554128 NR Description: unknown [Arabidopsis thaliana]
  misc_feature (114)..(194): Homolog of NCBI NO: 18394639 NR Description: expressed protein; protein id: At1g18660.1, by cDNA: 205719. [Arabidopsis thaliana]
  misc_feature (56)..(216): Homolog of NCBI NO: 22775495 NR Description: similar to A. thaliana AT4g08590 [Arabis
  misc_feature (115)..(271): Homolog of NCBI NO: 16549336 NR Description: unnamed protein product [Homo sapiens]
  misc_feature (115)..(271): Homolog of NCBI NO: 31377566 NR Description: hypothetical protein FLJ35794 [Homo sapiens]
  misc_feature (113)..(287): Homolog of NCBI NO: 31419000 NR Description: Unknown (protein for MGC:64185) [Danio rerio]
MAGWDEEDLIIASFVVDDTPERSSSKRRRRSNLLFKSTPPSGSSRRNQRVKQSLVPLPVIDLDKVIRHEEEKSAEKKKKKREMETETKEEKKIDKDEKSLSDHVVLPCIDKLRDELSCAICLEICFEPSTTTCGHSFCKKCLRSAADKCGRKCPKCRQLIGNGRYCTVNTVLWNTIQLLFPKEVEAQRAASANLKGKETPSPRNPNQRLRSRNRETALFQERLQREDISRLLVSEERSERSERRRRSTSMRLDQNRDAALAMRLQRQEFASAFGATTAETSSSSVSTLSRARANLQAMASRAVRRQG

SEQ ID NO: 69932 - protein, 225 aa, Arabidopsis thaliana
  peptide (1)..(225): Ceres Seq. ID no. 2048174
  misc_feature (36)..(74): Pfam Name: Zinc finger, C3HC4 type (RING finger) Pfam Description: Zinc finger, C3HC4 type (RING finger)
  misc_feature (1)..(225): Homolog of NCBI NO: 11994635 NR Description: gene_id:K1G2.4~ref|NP_008959.1~similar to unknown
  misc_feature (1)..(225): Homolog of NCBI NO: 15232143 NR Description: hypothetical protein; protein id: At3g27330.1
  misc_feature (33)..(160): Homolog of NCBI NO: 26343717 NR Description: unnamed protein product [Mus musculus]
  misc_feature (33)..(160): Homolog of NCBI NO: 26379538 NR Description: unnamed protein product [Mus musculus]
  misc_feature (32)..(112): Homolog of NCBI NO: 21554128 NR Description: unknown [Arabidopsis thaliana]
  misc_feature (32)..(112): Homolog of NCBI NO: 18394639 NR Description: expressed protein; protein id: At1g18660.1, by cDNA: 205719. [Arabidopsis thaliana]
  misc_feature (1)..(134): Homolog of NCBI NO: 22775495 NR Description: similar to A. thaliana AT4g08590 [Arabis
  misc_feature (33)..(189): Homolog of NCBI NO: 16549336 NR Description: unnamed protein product [Homo sapiens]
  misc_feature (33)..(189): Homolog of NCBI NO: 31377566 NR Description: hypothetical protein FLJ35794 [Homo sapiens]
  misc_feature (31)..(205): Homolog of NCBI NO: 31419000 NR Description: Unknown (protein for MGC:64185) [Danio rerio]
METETKEEKKIDKDEKSLSDHVVLPCIDKLRDELSCAICLEICFEPSTTTCGHSFCKKCLRSAADKCGRKCPKCRQLIGNGRYCTVNTVLWNTIQLLFPKEVEAQRAASANLKGKETPSPRNPNQRLRSRNRETALFQERLQREDISRLLVSEERSERSERRRRSTSMRLDQNRDAALAMRLQRQEFASAFGATTAETSSSSVSTLSRARANLQAMASRAVRRQG

SEQ ID NO: 69933 - DNA, 387 bp, Arabidopsis thaliana
  misc_feature (1)..(387): Ceres Seq. ID no. 2048175
  misc_feature: MA Experiment ID: 20000355 Result: Up-regulated in Transcription
  misc_feature: MA Experiment 20000355 PARAMETER Experiment Name: At_Siliques_Sub_P Parameter: Age (day) Value: 21
  misc_feature: MA Experiment 20000355 PARAMETER Experiment Name: At_Siliques_Sub_P Parameter: Organism Value: A. thaliana
  misc_feature: MA Experiment 20000355 PARAMETER Experiment Name: At_Siliques_Sub_P Parameter: Plant Line Value: WS
  misc_feature: MA Experiment 20000355 PARAMETER Experiment Name: At_Siliques_Sub_P Parameter: Tissue Value: Less Than 5mm Siliques vs. Whole Plant
atggtgaaaagcatttgcatgctagaccatgtatcaggcggcggaatcaggatctcgaacgaactcaaaaacaagaaacttctttggatgcggtgttattccaaagatgacgtattaggtccaaagataataccaatcggacaacattatgaaaatctttttgatattaacttttggcatacaacgcgttttatgtgtactttgagacaaggtcctaactttagacactatcagaactttacagcattcaagcttttcgctatggcagatgaaggaggtctatgggattggagagcaagagaaaatgggatctatttaaagaaagaagctggcgagaaagttttaaacccaatttggatgcataaagagtatgcttggatttattaa

SEQ ID NO: 69934 - protein, 128 aa, Arabidopsis thaliana
  peptide (1)..(128): Ceres Seq. ID no. 2048176
  misc_feature (15)..(127): Pfam Name: Plant self-incompatibility protein S1 Pfam Description: Plant self-incompatibility protein S1
  misc_feature (2)..(127): Homolog of NCBI NO: 15232231 NR Description: hypothetical protein; protein id: At3g27680.1 thaliana] >gi|9294473|dbj|BAB02692.1|
  misc_feature (7)..(122): Homolog of NCBI NO: 18400665 NR Description: unknown protein; protein id: At2g24870.1 thaliana] >gi|20197878|gb|AAD23025.2| unknown protein
  misc_feature (7)..(122): Homolog of NCBI NO: 25412258 NR Description: hypothetical protein At2g24870 [imported] -
  misc_feature (2)..(127): Homolog of NCBI NO: 9279785 NR Description: gb|AAC28191.1~gene_id:F21A17.7~similar to unknown
  misc_feature (2)..(128): Homolog of NCBI NO: 25405865 NR Description: protein F9C16.21 [imported] - Arabidopsis >gi|8778659|gb|AAF79667.1|AC022314_8 F9C16.21 [Arabidopsis
  misc_feature (1)..(116): Homolog of NCBI NO: 15231635 NR Description: putative self-incompatibility protein; protein At3g26860.1 [Arabidopsis thaliana] >gi|9279676|dbj|BAB01233.1| similarity to Drosophila pumilio protein~gene_id:MDJ14.20
  misc_feature (4)..(127): Homolog of NCBI NO: 15231636 NR Description: putative self-incompatibility protein; protein At3g26870.1 [Arabidopsis thaliana] >gi|9279677|dbj|BAB01234.1| similarity to Drosophila pumilio protein~gene_id:MDJ14.21
  misc_feature (2)..(86): Homolog of NCBI NO: 15236527 NR Description: putative self-incompatability RNA-binding protein id: At4g08560.1 [Arabidopsis thaliana]
  misc_feature (2)..(92): Homolog of NCBI NO: 18400667 NR Description: unknown protein; protein id: At2g24880.1 thaliana] >gi|20197877|gb|AAD23024.2| unknown protein
  misc_feature (2)..(85): Homolog of NCBI NO: 25412260 NR Description: hypothetical protein At2g24880 [imported] -
MVKSICMLDHVSGGGIRISNELKNKKLLWMRCYSKDDVLGPKIIPIGQHYENLFDINFWHTTRFMCTLRQGPNFRHYQNFTAFKLFAMADEGGLWDWRARENGIYLKKEAGEKVLNPIWMHKEYAWIY

SEQ ID NO: 69935 - protein, 122 aa, Arabidopsis thaliana
  peptide (1)..(122): Ceres Seq. ID no. 2048177
  misc_feature (9)..(121): Pfam Name: Plant self-incompatibility protein S1 Pfam Description: Plant self-incompatibility protein S1
  misc_feature (1)..(122): Homolog of NCBI NO: 25405865 NR Description: protein F9C16.21 [imported] - Arabidopsis >gi|8778659|gb|AAF79667.1|AC022314_8 F9C16.21 [Arabidopsis
  misc_feature (1)..(110): Homolog of NCBI NO: 15231635 NR Description: putative self-incompatibility protein; protein At3g26860.1 [Arabidopsis thaliana] >gi|9279676|dbj|BAB01233.1| similarity to Drosophila pumilio protein~gene_id:MDJ14.20
  misc_feature (1)..(121): Homolog of NCBI NO: 15232231 NR Description: hypothetical protein; protein id: At3g27680.1 thaliana] >gi|9294473|dbj|BAB02692.1|
  misc_feature (1)..(116): Homolog of NCBI NO: 18400665 NR Description: unknown protein; protein id: At2g24870.1 thaliana] >gi|20197878|gb|AAD23025.2| unknown protein
  misc_feature (1)..(116): Homolog of NCBI NO: 25412258 NR Description: hypothetical protein At2g24870 [imported] -
  misc_feature (1)..(121): Homolog of NCBI NO: 9279785 NR Description: gb|AAC28191.1~gene_id:F21A17.7~similar to unknown
  misc_feature (1)..(121): Homolog of NCBI NO: 15231636 NR Description: putative self-incompatibility protein; protein At3g26870.1 [Arabidopsis thaliana] >gi|9279677|dbj|BAB01234.1| similarity to Drosophila pumilio protein~gene_id:MDJ14.21
  misc_feature (1)..(80): Homolog of NCBI NO: 15236527 NR Description: putative self-incompatability RNA-binding protein id: At4g08560.1 [Arabidopsis thaliana]
  misc_feature (1)..(86): Homolog of NCBI NO: 18400667 NR Description: unknown protein; protein id: At2g24880.1 thaliana] >gi|20197877|gb|AAD23024.2| unknown protein
  misc_feature (1)..(79): Homolog of NCBI NO: 25412260 NR Description: hypothetical protein At2g24880 [imported] -
MLDHVSGGGIRISNELKNKKLLWMRCYSKDDVLGPKIIPIGQHYENLFDINFWHTTRFMCTLRQGPNFRHYQNFTAFKLFAMADEGGLWDWRARENGIYLKKEAGEKVLNPIWMHKEYAWIY

SEQ ID NO: 69936 - protein, 99 aa, Arabidopsis thaliana
  peptide (1)..(99): Ceres Seq. ID no. 2048178
  misc_feature (1)..(98): Pfam Name: Plant self-incompatibility protein S1 Pfam Description: Plant self-incompatibility protein S1
  misc_feature (1)..(99): Homolog of NCBI NO: 25405865 NR Description: protein F9C16.21 [imported] - Arabidopsis >gi|8778659|gb|AAF79667.1|AC022314_8 F9C16.21 [Arabidopsis
  misc_feature (1)..(87): Homolog of NCBI NO: 15231635 NR Description: putative self-incompatibility protein; protein At3g26860.1 [Arabidopsis thaliana] >gi|9279676|dbj|BAB01233.1| similarity to Drosophila pumilio protein~gene_id:MDJ14.20
  misc_feature (1)..(98): Homolog of NCBI NO: 15232231 NR Description: hypothetical protein; protein id: At3g27680.1 thaliana] >gi|9294473|dbj|BAB02692.1|
  misc_feature (1)..(93): Homolog of NCBI NO: 18400665 NR Description: unknown protein; protein id: At2g24870.1 thaliana] >gi|20197878|gb|AAD23025.2| unknown protein
  misc_feature (1)..(93): Homolog of NCBI NO: 25412258 NR Description: hypothetical protein At2g24870 [imported] -
  misc_feature (1)..(98): Homolog of NCBI NO: 9279785 NR Description: gb|AAC28191.1~gene_id:F21A17.7~similar to unknown
  misc_feature (1)..(98): Homolog of NCBI NO: 15231636 NR Description: putative self-incompatibility protein; protein At3g26870.1 [Arabidopsis thaliana] >gi|9279677|dbj|BAB01234.1| similarity to Drosophila pumilio protein~gene_id:MDJ14.21
  misc_feature (1)..(57): Homolog of NCBI NO: 15236527 NR Description: putative self-incompatability RNA-binding protein id: At4g08560.1 [Arabidopsis thaliana]
  misc_feature (1)..(63): Homolog of NCBI NO: 18400667 NR Description: unknown protein; protein id: At2g24880.1 thaliana] >gi|20197877|gb|AAD23024.2| unknown protein
  misc_feature (1)..(56): Homolog of NCBI NO: 25412260 NR Description: hypothetical protein At2g24880 [imported] -
MRCYSKDDVLGPKIIPIGQHYENLFDINFWHTTRFMCTLRQGPNFRHYQNFTAFKLFAMADEGGLWDWRARENGIYLKKEAGEKVLNPIWMHKEYAWIY

SEQ ID NO: 69937 - DNA, 1467 bp, Arabidopsis thaliana
  misc_feature (1)..(1467): Ceres Seq. ID no. 2048304
  misc_feature: MA Experiment ID: 20000185 Result: Up-regulated in Transcription
  misc_feature: MA Experiment 20000185 PARAMETER Experiment Name: At_Roots__P Parameter: Age (day) Value: 7 vs. 21
  misc_feature: MA Experiment 20000185 PARAMETER Experiment Name: At_Roots__P Parameter: Organism Value: A. thaliana
  misc_feature: MA Experiment 20000185 PARAMETER Experiment Name: At_Roots__P Parameter: Tissue Value: Roots vs. Whole Plant
  misc_feature: MA Experiment ID: 20000234 Result: Up-regulated in Transcription
  misc_feature: MA Experiment 20000234 PARAMETER Experiment Name: At_Siliques_P Parameter: Age (day) Value: 21
  misc_feature: MA Experiment 20000234 PARAMETER Experiment Name: At_Siliques_P Parameter: Organism Value: A. thaliana
  misc_feature: MA Experiment 20000234 PARAMETER Experiment Name: At_Siliques_P Parameter: Plant Line Value: WS
  misc_feature: MA Experiment 20000234 PARAMETER Experiment Name: At_Siliques_P Parameter: Tissue Value: Less Than 5mm Siliques vs. Whole Plant
  misc_feature: MA Experiment ID: 20000264 Result: Up-regulated in Transcription
  misc_feature: MA Experiment 20000264 PARAMETER Experiment Name: At_Open_Flower_P Parameter: Age (day) Value: 21
  misc_feature: MA Experiment 20000264 PARAMETER Experiment Name: At_Open_Flower_P Parameter: Plant Line Value: WS
  misc_feature: MA Experiment 20000264 PARAMETER Experiment Name: At_Open_Flower_P Parameter: Tissue Value: Open Flower vs. Whole Plant
  misc_feature: MA Experiment ID: 20000527 Result: Down-regulated in Transcription
  misc_feature: MA Experiment 20000527 PARAMETER Experiment Name: At_10percent_PEG_P Parameter: Age (day) Value: 20
  misc_feature: MA Experiment 20000527 PARAMETER Experiment Name: At_10percent_PEG_P Parameter: Organism Value: A. thaliana
  misc_feature: MA Experiment 20000527 PARAMETER Experiment Name: At_10percent_PEG_P Parameter: Plant Line Value: WS
  misc_feature: MA Experiment 20000527 PARAMETER Experiment Name: At_10percent_PEG_P Parameter: Timepoint (day) Value: 20
  misc_feature: MA Experiment 20000527 PARAMETER Experiment Name: At_10percent_PEG_P Parameter: Tissue Value: Whole Plant
  misc_feature: MA Experiment 20000527 PARAMETER Experiment Name: At_10percent_PEG_P Parameter: Treatment Value: 10percent PEG vs. No Treatment
  misc_feature: MA Experiment ID: 20001906 Result: Down-regulated in Transcription
  misc_feature: MA Experiment 20001906 PARAMETER Experiment Name: At_Drought_Reproduction_P Parameter: Age (day) Value: 35
  misc_feature: MA Experiment 20001906 PARAMETER Experiment Name: At_Drought_Reproduction_P Parameter: Organism Value: A. thaliana
  misc_feature: MA Experiment 20001906 PARAMETER Experiment Name: At_Drought_Reproduction_P Parameter: Plant Line Value: WS
  misc_feature: MA Experiment 20001906 PARAMETER Experiment Name: At_Drought_Reproduction_P Parameter: Timepoint (day) Value: 5
  misc_feature: MA Experiment 20001906 PARAMETER Experiment Name: At_Drought_Reproduction_P Parameter: Tissue Value: Siliques
  misc_feature: MA Experiment 20001906 PARAMETER Experiment Name: At_Drought_Reproduction_P Parameter: Treatment Value: Drought vs. No Drought
atgggagacgaaccacttcttcagaaagtcaagattcaagaagacattgaatccgtaccacttcttcagaaagtcaagattcaagaagacattgaatccgttaaaggaattcgtgtaaataatgacggcgaagaggacggtcccgttactttaattctactcttcacaaccttcactgctctctgcggcaccttctcctatggcactgccgccggctttacatcaccagctcaaaccgggattatggcaggactgaacctttctttggctgagttctcattctttggggctgtcttaacaattggtggacttgtgggagccgcgatgtcgggaaaacttgctgatgtctttggtcgaagaggcgctttgggggtttcaaactcgttttgcatggccggctggcttatgattgccttctctcaggcgacttggtcccttgatatcggaagactttttctcggggtcgcagctggcgtagcttcttatgtggtaccagtctatattgttgaaatcgctcccaaaaaagttcgtggcacattctctgcgattaactcgcttgtgatgtgtgctagcgtcgccgtcacatacctccttggatcagtcatttcatggcaaaaattagctctcataagtacggttccttgtgtttttgaattcgtcggtttattcttcataccggagtctcctaggtggctgtctagaaacggtagggtgaaagaatcggaagtttcactccaacgcctacgaggaaacaacactgatatcactaaagaggctgcagaaatcaaaaaatatatggataatcttcaagaattcaaagaagatggttttttcgatctcttcaacccacgatattctcgtgtcgttactgttggaattggattgctagtactacaacaactgggaggtctcagtggctatacattttaccttagctcgatattcaaaaaatcggggtttcctaacaacgtaggagtaatgatggcgagcgtggtgcagtctgtgacaagcgttttaggaatagtaatcgtggataaatatggaagacgatcccttttaacggttgcgacgatcatgatgtgtttgggctcattaattacaggactatcgtttttgtttcagagctatggtttacttgaacattacaccccaatttcaacatttatgggagtgttggtttttctaacttcgattacaatcggaataggaggtattccatgggttatgatatctgagatgacaccgatcaatataaaaggatcagcagggacgctatgcaatttaactagctggtccagcaattggttcgtctcttacacattcaacttcctcttccagtggagctcttctggtgtgtttttcatatatacaatgatatcgggtgtgggcatcctgtttgtgatgaagatggtacccgagactcgaggtcgttcgctcgaagaaattcaagctgccattacccgataa

SEQ ID NO: 69938 - protein, 488 aa, Arabidopsis thaliana
  peptide (1)..(488): Ceres Seq. ID no. 2048305
  misc_feature (55)..(459): Pfam Name: Sugar (and other) transporter Pfam Description: Sugar (and other) transporter
  misc_feature (1)..(488): Homolog of NCBI NO: 15231145 NR Description: sugar transporter, putative; protein id:
  misc_feature (1)..(459): Homolog of NCBI NO: 9294566 NR Description: sugar transporter-like protein [Arabidopsis
  misc_feature (27)..(487): Homolog of NCBI NO: 18397141 NR Description: Expressed protein; protein id: At3g05165.1
  misc_feature (37)..(487): Homolog of NCBI NO: 18397139 NR Description: putative sugar transporter; protein id: supported by cDNA: gi_16604315 [Arabidopsis thaliana] AT3g05160/T12H1_13 [Arabidopsis thaliana]
  misc_feature (39)..(486): Homolog of NCBI NO: 30695810 NR Description: sugar transporter, putative [Arabidopsis thaliana]
  misc_feature (37)..(487): Homolog of NCBI NO: 18390957 NR Description: putative sugar transport protein, ERD6; protein At1g08920.1, supported by cDNA: gi_14194108 [Arabidopsis >gi|14194109|gb|AAK56249.1|AF367260_1 At1g08920/F7G19_20
  misc_feature (12)..(486): Homolog of NCBI NO: 23504385 NR Description: putative sugar transporter [Lycopersicon
  misc_feature (37)..(487): Homolog of NCBI NO: 30680865 NR Description: sugar transporter, putative [Arabidopsis thaliana]
  misc_feature (37)..(487): Homolog of NCBI NO: 6686827 NR Description: putative sugar transporter [Arabidopsis thaliana]
  misc_feature (52)..(486): Homolog of NCBI NO: 18407508 NR Description: putative sugar transporter; protein id: supported by cDNA: 114959. [Arabidopsis thaliana]
MGDEPLLQKVKIQEDIESVPLLQKVKIQEDIESVKGIRVNNDGEEDGPVTLILLFTTFTALCGTFSYGTAAGFTSPAQTGIMAGLNLSLAEFSFFGAVLTIGGLVGAAMSGKLADVFGRRGALGVSNSFCMAGWLMIAFSQATWSLDIGRLFLGVAAGVASYVVPVYIVEIAPKKVRGTFSAINSLVMCASVAVTYLLGSVISWQKLALISTVPCVFEFVGLFFIPESPRWLSRNGRVKESEVSLQRLRGNNTDITKEAAEIKKYMDNLQEFKEDGFFDLFNPRYSRVVTVGIGLLVLQQLGGLSGYTFYLSSIFKKSGFPNNVGVMMASVVQSVTSVLGIVIVDKYGRRSLLTVATIMMCLGSLITGLSFLFQSYGLLEHYTPISTFMGVLVFLTSITIGIGGIPWVMISEMTPINIKGSAGTLCNLTSWSSNWFVSYTFNFLFQWSSSGVFFIYTMISGVGILFVMKMVPETRGRSLEEIQAAITR

SEQ ID NO: 69939 - protein, 407 aa, Arabidopsis thaliana
  peptide (1)..(407): Ceres Seq. ID no. 2048306
  misc_feature (1)..(378): Pfam Name: Sugar (and other) transporter Pfam Description: Sugar (and other) transporter
  misc_feature (1)..(407): Homolog of NCBI NO: 15231145 NR Description: sugar transporter, putative; protein id:
  misc_feature (1)..(378): Homolog of NCBI NO: 9294566 NR Description: sugar transporter-like protein [Arabidopsis
  misc_feature (1)..(406): Homolog of NCBI NO: 18397141 NR Description: Expressed protein; protein id: At3g05165.1
  misc_feature (1)..(406): Homolog of NCBI NO: 18397139 NR Description: putative sugar transporter; protein id: supported by cDNA: gi_16604315 [Arabidopsis thaliana] AT3g05160/T12H1_13 [Arabidopsis thaliana]
  misc_feature (1)..(405): Homolog of NCBI NO: 30695810 NR Description: sugar transporter, putative [Arabidopsis thaliana]
  misc_feature (1)..(406): Homolog of NCBI NO: 18390957 NR Description: putative sugar transport protein, ERD6; protein At1g08920.1, supported by cDNA: gi_14194108 [Arabidopsis >gi|14194109|gb|AAK56249.1|AF367260_1 At1g08920/F7G19_20
  misc_feature (1)..(405): Homolog of NCBI NO: 23504385 NR Description: putative sugar transporter [Lycopersicon
  misc_feature (1)..(406): Homolog of NCBI NO: 30680865 NR Description: sugar transporter, putative [Arabidopsis thaliana]
  misc_feature (1)..(406): Homolog of NCBI NO: 6686827 NR Description: putative sugar transporter [Arabidopsis thaliana]
  misc_feature (1)..(405): Homolog of NCBI NO: 18407508 NR Description: putative sugar transporter; protein id: supported by cDNA: 114959. [Arabidopsis thaliana]
MAGLNLSLAEFSFFGAVLTIGGLVGAAMSGKLADVFGRRGALGVSNSFCMAGWLMIAFSQATWSLDIGRLFLGVAAGVASYVVPVYIVEIAPKKVRGTFSAINSLVMCASVAVTYLLGSVISWQKLALISTVPCVFEFVGLFFIPESPRWLSRNGRVKESEVSLQRLRGNNTDITKEAAEIKKYMDNLQEFKEDGFFDLFNPRYSRVVTVGIGLLVLQQLGGLSGYTFYLSSIFKKSGFPNNVGVMMASVVQSVTSVLGIVIVDKYGRRSLLTVATIMMCLGSLITGLSFLFQSYGLLEHYTPISTFMGVLVFLTSITIGIGGIPWVMISEMTPINIKGSAGTLCNLTSWSSNWFVSYTFNFLFQWSSSGVFFIYTMISGVGILFVMKMVPETRGRSLEEIQAAITR

SEQ ID NO: 69940 - protein, 380 aa, Arabidopsis thaliana
  peptide (1)..(380): Ceres Seq. ID no. 2048307
  misc_feature (1)..(351): Pfam Name: Sugar (and other) transporter Pfam Description: Sugar (and other) transporter
  misc_feature (1)..(380): Homolog of NCBI NO: 15231145 NR Description: sugar transporter, putative; protein id:
  misc_feature (1)..(351): Homolog of NCBI NO: 9294566 NR Description: sugar transporter-like protein [Arabidopsis
  misc_feature (1)..(379): Homolog of NCBI NO: 18397141 NR Description: Expressed protein; protein id: At3g05165.1
  misc_feature (1)..(379): Homolog of NCBI NO: 18397139 NR Description: putative sugar transporter; protein id: supported by cDNA: gi_16604315 [Arabidopsis thaliana] AT3g05160/T12H1_13 [Arabidopsis thaliana]
  misc_feature (1)..(378): Homolog of NCBI NO: 30695810 NR Description: sugar transporter, putative [Arabidopsis thaliana]
  misc_feature (1)..(379): Homolog of NCBI NO: 18390957 NR Description: putative sugar transport protein, ERD6; protein At1g08920.1, supported by cDNA: gi_14194108 [Arabidopsis >gi|14194109|gb|AAK56249.1|AF367260_1 At1g08920/F7G19_20
  misc_feature (1)..(378): Homolog of NCBI NO: 23504385 NR Description: putative sugar transporter [Lycopersicon
  misc_feature (1)..(379): Homolog of NCBI NO: 30680865 NR Description: sugar transporter, putative [Arabidopsis thaliana]
  misc_feature (1)..(379): Homolog of NCBI NO: 6686827 NR Description: putative sugar transporter [Arabidopsis thaliana]
  misc_feature (1)..(378): Homolog of NCBI NO: 18407508 NR Description: putative sugar transporter; protein id: supported by cDNA: 114959. [Arabidopsis thaliana]
MSGKLADVFGRRGALGVSNSFCMAGWLMIAFSQATWSLDIGRLFLGVAAGVASYVVPVYIVEIAPKKVRGTFSAINSLVMCASVAVTYLLGSVISWQKLALISTVPCVFEFVGLFFIPESPRWLSRNGRVKESEVSLQRLRGNNTDITKEAAEIKKYMDNLQEFKEDGFFDLFNPRYSRVVTVGIGLLVLQQLGGLSGYTFYLSSIFKKSGFPNNVGVMMASVVQSVTSVLGIVIVDKYGRRSLLTVATIMMCLGSLITGLSFLFQSYGLLEHYTPISTFMGVLVFLTSITIGIGGIPWVMISEMTPINIKGSAGTLCNLTSWSSNWFVSYTFNFLFQWSSSGVFFIYTMISGVGILFVMKMVPETRGRSLEEIQAAITR

SEQ ID NO: 69941 - DNA, 2541 bp, Arabidopsis thaliana
  misc_feature (1)..(2541): Ceres Seq. ID no. 2049879
  misc_feature: MA Experiment ID: 20001247 Result: Up-regulated in Transcription
  misc_feature: MA Experiment 20001247 PARAMETER Experiment Name: At_Far-red-induction_P Parameter: Age (day) Value: 7
  misc_feature: MA Experiment 20001247 PARAMETER Experiment Name: At_Far-red-induction_P Parameter: Light Value: Far-red vs. White
  misc_feature: MA Experiment 20001247 PARAMETER Experiment Name: At_Far-red-induction_P Parameter: Organism Value: A. thaliana
  misc_feature: MA Experiment 20001247 PARAMETER Experiment Name: At_Far-red-induction_P Parameter: Plant Line Value: Columbia
  misc_feature: MA Experiment 20001247 PARAMETER Experiment Name: At_Far-red-induction_P Parameter: Timepoint (hr) Value: 1
  misc_feature: MA Experiment 20001247 PARAMETER Experiment Name: At_Far-red-induction_P Parameter: Tissue Value: Whole Plant
atgggttgtacaagttctaagcttgacgatcttccggcggttgctctttgccgtgaacgctgtgctttcttagaagctgctattcatcaacgttacgctttagctgaatcacacgtggcttacactcattcgcttcgagaaatcggtcactctctccatcttttcatcaatcaccaccaccgtttcgtcgcttccggcggcgctaacgtcggtgattctcctcgacttaatcttcctcctcagagaaaaggtgaccttgacgacgaagcaacaaattccccaaaaaaacaaaagcttgcttcttctcaccacaaccacaaccacgctcactcgggttccggttctgattcgggtcatctcgaattcgattcagattccgacgaagatgaagaagacgacgacgacttggatttggattcgttgcatcaccactctcctccccaccaccatctcggcaatttccctattcccgaatcagcaccaatgggcggatacatggaacaacaaccgggttatataaacccgtacccgaatccagatatgatggggcatccttactctggaggaggaagttatatgcacatgaattacatgaagaacaaatccatgcctccttcagttgtctatgagcaaagaccaactagtcctcaacgagtctacataggcgaatcatcatcttcatatccatatcctcctcaaaattcatattttggatactcaaatccagtacccggacccggaccaggatactacggttcttcttctgcttctacaactgctgcagcaacaaaaccgccaccacctccaccgtcgccgcctaggtctaacggttgggattttttgaatccctttgatacttattatcctccgtatactccgagtcgagattcgagagagttaagagaagaagaaggtataccggatttagaagacgatgattcacattacgaagttgttaaagaagtttacggcaaaccaaaattcgccgccggtggtggtcaccaaccaaatcccgccgccgtacacatgatgagggaagagtccccgtctccgccgcttgataaatccggtgctagtactagcggtggaggtgatgtcggagatgcatctgcgtatcagtctagaccaagtgtgtcggtggagaaagaagggatggagtatgaagttcacgttgttgagaagaaggttgttgaagatgaggaacggcggagtaatgccacggcgacacgtggtggtggtggaggaggagggccacgtgcggtgcctgaagttgcgaaagagattgagaatcaattcgtgaaagctgcagagtcaggaagtgagattgctaagttacttgaagttgggaagcatccttatggtcgtaaacatgctgcttcgaagatgttgcacggtgttactccttcgttaccttctacctctggaggaacttcttcgtctgctgctgctgctgttgtgccacctacttatgcagatattgaagaagagcttgcttcgaggtcgaggaatctttcttcgacgttgcacaagctccatctttgggagaagaagctttatcatgaagtcaaggccgaggagaaactgcgtctagctcacgagaaaaagcttaggaagctaaagcgtttggatcaaagaggtgccgaggctatcaaagtagataaaacgcggaaattagtgagagatatgtccacaaaaatacggattgcgattcaggttgtcgacaaaatatccgtgacgattaataagataagagacgaagacctgtggccgcaactgaatgcattgattcaagggcttacaagaatgtggaaaacaatgcttgaatgtcatcaaagtcaatgtcaagctattagggaagcacaaggtttaggcccgataagagcaagcaagaaactaggcgatgaacatctagaagcgacgagtttgcttggacatgaacttattaattggatattgggattctctagctgggttagtgcgcagaagggttatgtaaaagagttgaataaatggctcatgaaatgtcttctgtatgaacctgaggaaacacctgatgggatagttcccttttcacctggtaggattggggctccacctatctttgtcatctgtaaccaatggtctcaagctctggataggatatctgagaaggaagttattgaggcaatgcgtagtttcactacaagtgtgcttcagctttgggaacaagatcggttagatacgatgatgacggggcatggtgattcagagaagaaagtcaggaacatggacagagaagaacagaggatacagagagagattcaagcattggaaaagaaaatgattcttgtggcaccgggtgatggtaacagtctttcgatatccggcaacgttgtttaccaaagcgatactagcagcgatagtttacaaggtagtttgcaacggatttttgaagctatggagagattcactgctgaatcgatgagagcttatgaggatctcttagagcgcaccaatgaagaaactgcaccacgggaacttgaggaagaagaggaggagtaa

SEQ ID NO: 69942 - protein, 846 aa, Arabidopsis thaliana
  peptide (1)..(846): Ceres Seq. ID no. 2049880
  misc_feature (406)..(734): Pfam Name: Protein of unknown function (DUF632) Pfam Description: Protein of unknown function (DUF632)
  misc_feature (1)..(552): Homolog of NCBI NO: 15236929 NR Description: putative protein; protein id: At4g35240.1
  misc_feature (105)..(846): Homolog of NCBI NO: 15236929 NR Description: putative protein; protein id: At4g35240.1
  misc_feature (210)..(552): Homolog of NCBI NO: 25411780 NR Description: hypothetical protein At2g17100 [imported] -
  misc_feature (519)..(844): Homolog of NCBI NO: 25411780 NR Description: hypothetical protein At2g17100 [imported] -
  misc_feature (445)..(844): Homolog of NCBI NO: 18398315 NR Description: expressed protein; protein id: At2g17110.1, by cDNA: gi_15724285 [Arabidopsis thaliana] AT4g35240/F23E12_200 [Arabidopsis thaliana]
  misc_feature (1)..(179): Homolog of NCBI NO: 25411780 NR Description: hypothetical protein At2g17100 [imported] -
  misc_feature (191)..(248): Homolog of NCBI NO: 25411780 NR Description: hypothetical protein At2g17100 [imported] -
  misc_feature (355)..(780): Homolog of NCBI NO: 15219083 NR Description: putative bzip-like transcription factor; protein At1g21740.1 [Arabidopsis thaliana] >gi|25518309|pir||A86351
  misc_feature (1)..(287): Homolog of NCBI NO: 15219083 NR Description: putative bzip-like transcription factor; protein At1g21740.1 [Arabidopsis thaliana] >gi|25518309|pir||A86351
  misc_feature (355)..(825): Homolog of NCBI NO: 15223973 NR Description: unknown protein; protein id: At1g77500.1
MGCTSSKLDDLPAVALCRERCAFLEAAIHQRYALAESHVAYTHSLREIGHSLHLFINHHHRFVASGGANVGDSPRLNLPPQRKGDLDDEATNSPKKQKLASSHHNHNHAHSGSGSDSGHLEFDSDSDEDEEDDDDLDLDSLHHHSPPHHHLGNFPIPESAPMGGYMEQQPGYINPYPNPDMMGHPYSGGGSYMHMNYMKNKSMPPSVVYEQRPTSPQRVYIGESSSSYPYPPQNSYFGYSNPVPGPGPGYYGSSSASTTAAATKPPPPPPSPPRSNGWDFLNPFDTYYPPYTPSRDSRELREEEGIPDLEDDDSHYEVVKEVYGKPKFAAGGGHQPNPAAVHMMREESPSPPLDKSGASTSGGGDVGDASAYQSRPSVSVEKEGMEYEVHVVEKKVVEDEERRSNATATRGGGGGGGPRAVPEVAKEIENQFVKAAESGSEIAKLLEVGKHPYGRKHAASKMLHGVTPSLPSTSGGTSSSAAAAVVPPTYADIEEELASRSRNLSSTLHKLHLWEKKLYHEVKAEEKLRLAHEKKLRKLKRLDQRGAEAIKVDKTRKLVRDMSTKIRIAIQVVDKISVTINKIRDEDLWPQLNALIQGLTRMWKTMLECHQSQCQAIREAQGLGPIRASKKLGDEHLEATSLLGHELINWILGFSSWVSAQKGYVKELNKWLMKCLLYEPEETPDGIVPFSPGRIGAPPIFVICNQWSQALDRISEKEVIEAMRSFTTSVLQLWEQDRLDTMMTGHGDSEKKVRNMDREEQRIQREIQALEKKMILVAPGDGNSLSISGNVVYQSDTSSDSLQGSLQRIFEAMERFTAESMRAYEDLLERTNEETAPRELEEEEEE

SEQ ID NO: 69943 - protein, 685 aa, Arabidopsis thaliana
  peptide (1)..(685): Ceres Seq. ID no. 2049881
  misc_feature (245)..(573): Pfam Name: Protein of unknown function (DUF632) Pfam Description: Protein of unknown function (DUF632)
  misc_feature (1)..(391): Homolog of NCBI NO: 15236929 NR Description: putative protein; protein id: At4g35240.1
  misc_feature (1)..(685): Homolog of NCBI NO: 15236929 NR Description: putative protein; protein id: At4g35240.1
  misc_feature (49)..(391): Homolog of NCBI NO: 25411780 NR Description: hypothetical protein At2g17100 [imported] -
  misc_feature (358)..(683): Homolog of NCBI NO: 25411780 NR Description: hypothetical protein At2g17100 [imported] -
  misc_feature (284)..(683): Homolog of NCBI NO: 18398315 NR Description: expressed protein; protein id: At2g17110.1, by cDNA: gi_15724285 [Arabidopsis thaliana] AT4g35240/F23E12_200 [Arabidopsis thaliana]
  misc_feature (1)..(18): Homolog of NCBI NO: 25411780 NR Description: hypothetical protein At2g17100 [imported] -
  misc_feature (30)..(87): Homolog of NCBI NO: 25411780 NR Description: hypothetical protein At2g17100 [imported] -
  misc_feature (194)..(619): Homolog of NCBI NO: 15219083 NR Description: putative bzip-like transcription factor; protein At1g21740.1 [Arabidopsis thaliana] >gi|25518309|pir||A86351
  misc_feature (1)..(126): Homolog of NCBI NO: 15219083 NR Description: putative bzip-like transcription factor; protein At1g21740.1 [Arabidopsis thaliana] >gi|25518309|pir||A86351
  misc_feature (194)..(664): Homolog of NCBI NO: 15223973 NR Description: unknown protein; protein id: At1g77500.1
MGGYMEQQPGYINPYPNPDMMGHPYSGGGSYMHMNYMKNKSMPPSVVYEQRPTSPQRVYIGESSSSYPYPPQNSYFGYSNPVPGPGPGYYGSSSASTTAAATKPPPPPPSPPRSNGWDFLNPFDTYYPPYTPSRDSRELREEEGIPDLEDDDSHYEVVKEVYGKPKFAAGGGHQPNPAAVHMMREESPSPPLDKSGASTSGGGDVGDASAYQSRPSVSVEKEGMEYEVHVVEKKVVEDEERRSNATATRGGGGGGGPRAVPEVAKEIENQFVKAAESGSEIAKLLEVGKHPYGRKHAASKMLHGVTPSLPSTSGGTSSSAAAAVVPPTYADIEEELASRSRNLSSTLHKLHLWEKKLYHEVKAEEKLRLAHEKKLRKLKRLDQRGAEAIKVDKTRKLVRDMSTKIRIAIQVVDKISVTINKIRDEDLWPQLNALIQGLTRMWKTMLECHQSQCQAIREAQGLGPIRASKKLGDEHLEATSLLGHELINWILGFSSWVSAQKGYVKELNKWLMKCLLYEPEETPDGIVPFSPGRIGAPPIFVICNQWSQALDRISEKEVIEAMRSFTTSVLQLWEQDRLDTMMTGHGDSEKKVRNMDREEQRIQREIQALEKKMILVAPGDGNSLSISGNVVYQSDTSSDSLQGSLQRIFEAMERFTAESMRAYEDLLERTNEETAPRELEEEEEE

SEQ ID NO: 69944 - protein, 681 aa, Arabidopsis thaliana
  peptide (1)..(681): Ceres Seq. ID no. 2049882
  misc_feature (241)..(569): Pfam Name: Protein of unknown function (DUF632) Pfam Description: Protein of unknown function (DUF632)
  misc_feature (1)..(387): Homolog of NCBI NO: 15236929 NR Description: putative protein; protein id: At4g35240.1
  misc_feature (1)..(681): Homolog of NCBI NO: 15236929 NR Description: putative protein; protein id: At4g35240.1
  misc_feature (45)..(387): Homolog of NCBI NO: 25411780 NR Description: hypothetical protein At2g17100 [imported] -
  misc_feature (354)..(679): Homolog of NCBI NO: 25411780 NR Description: hypothetical protein At2g17100 [imported] -
  misc_feature (280)..(679): Homolog of NCBI NO: 18398315 NR Description: expressed protein; protein id: At2g17110.1, by cDNA: gi_15724285 [Arabidopsis thaliana] AT4g35240/F23E12_200 [Arabidopsis thaliana]
  misc_feature (1)..(14): Homolog of NCBI NO: 25411780 NR Description: hypothetical protein At2g17100 [imported] -
  misc_feature (26)..(83): Homolog of NCBI NO: 25411780 NR Description: hypothetical protein At2g17100 [imported] -
  misc_feature (190)..(615): Homolog of NCBI NO: 15219083 NR Description: putative bzip-like transcription factor; protein At1g21740.1 [Arabidopsis thaliana] >gi|25518309|pir||A86351
  misc_feature (1)..(122): Homolog of NCBI NO: 15219083 NR Description: putative bzip-like transcription factor; protein At1g21740.1 [Arabidopsis thaliana] >gi|25518309|pir||A86351
  misc_feature (190)..(660): Homolog of NCBI NO: 15223973 NR Description: unknown protein; protein id: At1g77500.1
MEQQPGYINPYPNPDMMGHPYSGGGSYMHMNYMKNKSMPPSVVYEQRPTSPQRVYIGESSSSYPYPPQNSYFGYSNPVPGPGPGYYGSSSASTTAAATKPPPPPPSPPRSNGWDFLNPFDTYYPPYTPSRDSRELREEEGIPDLEDDDSHYEVVKEVYGKPKFAAGGGHQPNPAAVHMMREESPSPPLDKSGASTSGGGDVGDASAYQSRPSVSVEKEGMEYEVHVVEKKVVEDEERRSNATATRGGGGGGGPRAVPEVAKEIENQFVKAAESGSEIAKLLEVGKHPYGRKHAASKMLHGVTPSLPSTSGGTSSSAAAAVVPPTYADIEEELASRSRNLSSTLHKLHLWEKKLYHEVKAEEKLRLAHEKKLRKLKRLDQRGAEAIKVDKTRKLVRDMSTKIRIAIQVVDKISVTINKIRDEDLWPQLNALIQGLTRMWKTMLECHQSQCQAIREAQGLGPIRASKKLGDEHLEATSLLGHELINWILGFSSWVSAQKGYVKELNKWLMKCLLYEPEETPDGIVPFSPGRIGAPPIFVICNQWSQALDRISEKEVIEAMRSFTTSVLQLWEQDRLDTMMTGHGDSEKKVRNMDREEQRIQREIQALEKKMILVAPGDGNSLSISGNVVYQSDTSSDSLQGSLQRIFEAMERFTAESMRAYEDLLERTNEETAPRELEEEEEE

SEQ ID NO: 69945 - DNA, 897 bp, Arabidopsis thaliana
  misc_feature (1)..(897): Ceres Seq. ID no. 2051110
atgacgtggccggctagatcatcgccgcaaaacacgaggaagccagtttacgtcgtgcatagcccaccgaacacagacgtagacaagatatcgaccggttcaggttttagcccattcgggtcaccccttaacgatcagggtcaggtcagcaactttcaacatcactcggtggccgagtcatcttcgtatccacgatcgtcaggaccattgagaaacgagtacagcagtgtccaagtgcatgatcttgaccgtcgaactcatgaagatgaagattacgatgaaatggacggtccggatgagaagaggagaaggataacgaggttttactcgtgcttgttgtttacgttggtgttggccttcactctcttctgtctcattttgtggggagtttccaaatctttcgcacctattgccactttgaaggaaatggtattggagaacttgaatgtgcagtccgggaacgaccaatcgggagtgctcacagatatgctaactctaaattcaacggtcaggatcttatacagaaaccccgcaactttcttcactgtccacgtcacctccgctcccctccagctcagctattcccagcttatcctcgcatccggtcagatgggagagttctctcaacgaaggaaaagcgagagaatcattgagaccaaagtatttggggatcaaattcctctgtatggaggcgtaccggctctgtttggccaacgagctgaaccggaccaagtcgttttgcctcttaacctgacttttacgttgcgagcacgagcctatgtgctcggacgattggtcaagactacgttccactcgaatatcaaatgcagcatcactttttatggcgataaacttggcaagacacttgatctctccaagtcctgttctgatcattga

SEQ ID NO: 69946 - protein, 298 aa, Arabidopsis thaliana
  peptide (1)..(298): Ceres Seq. ID no. 2051111
  misc_feature (247)..(296): Homolog of NCBI NO: 28416677 NR Description: At5g42860 [Arabidopsis thaliana]
  misc_feature (1)..(141): Homolog of NCBI NO: 15236284 NR Description: putative protein; protein id: At4g35170.1
  misc_feature (5)..(295): Homolog of NCBI NO: 15227481 NR Description: unknown protein; protein id: At2g41990.1
  misc_feature (4)..(295): Homolog of NCBI NO: 38345517 NR Description: OSJNBa0039K24.20 [Oryza sativa (japonica
  misc_feature (4)..(295): Homolog of NCBI NO: 5777621 NR Description: CAA30379.1 protein [Oryza sativa]
  misc_feature (5)..(230): Homolog of NCBI NO: 18401556 NR Description: expressed protein; protein id: At1g45688.1, by cDNA: 8255., supported by cDNA: gi_20466719 [Arabidopsis
  misc_feature (231)..(296): Homolog of NCBI NO: 18401556 NR Description: expressed protein; protein id: At1g45688.1, by cDNA: 8255., supported by cDNA: gi_20466719 [Arabidopsis
  misc_feature (7)..(230): Homolog of NCBI NO: 15239097 NR Description: putative protein; protein id: At5g42860.1 thaliana] >gi|9758574|dbj|BAB09187.1|
  misc_feature (247)..(296): Homolog of NCBI NO: 15239097 NR Description: putative protein; protein id: At5g42860.1 thaliana] >gi|9758574|dbj|BAB09187.1|
  misc_feature (7)..(230): Homolog of NCBI NO: 28416677 NR Description: At5g42860 [Arabidopsis thaliana]
MTWPARSSPQNTRKPVYVVHSPPNTDVDKISTGSGFSPFGSPLNDQGQVSNFQHHSVAESSSYPRSSGPLRNEYSSVQVHDLDRRTHEDEDYDEMDGPDEKRRRITRFYSCLLFTLVLAFTLFCLILWGVSKSFAPIATLKEMVLENLNVQSGNDQSGVLTDMLTLNSTVRILYRNPATFFTVHVTSAPLQLSYSQLILASGQMGEFSQRRKSERIIETKVFGDQIPLYGGVPALFGQRAEPDQVVLPLNLTFTLRARAYVLGRLVKTTFHSNIKCSITFYGDKLGKTLDLSKSCSDH

SEQ ID NO: 69947 - protein, 204 aa, Arabidopsis thaliana
  peptide (1)..(204): Ceres Seq. ID no. 2051112
  misc_feature (1)..(47): Homolog of NCBI NO: 15236284 NR Description: putative protein; protein id: At4g35170.1
  misc_feature (1)..(201): Homolog of NCBI NO: 15227481 NR Description: unknown protein; protein id: At2g41990.1
  misc_feature (1)..(201): Homolog of NCBI NO: 38345517 NR Description: OSJNBa0039K24.20 [Oryza sativa (japonica
  misc_feature (1)..(201): Homolog of NCBI NO: 5777621 NR Description: CAA30379.1 protein [Oryza sativa]
  misc_feature (1)..(136): Homolog of NCBI NO: 18401556 NR Description: expressed protein; protein id: At1g45688.1, by cDNA: 8255., supported by cDNA: gi_20466719 [Arabidopsis
  misc_feature (137)..(202): Homolog of NCBI NO: 18401556 NR Description: expressed protein; protein id: At1g45688.1, by cDNA: 8255., supported by cDNA: gi_20466719 [Arabidopsis
  misc_feature (1)..(136): Homolog of NCBI NO: 15239097 NR Description: putative protein; protein id: At5g42860.1 thaliana] >gi|9758574|dbj|BAB09187.1|
  misc_feature (153)..(202): Homolog of NCBI NO: 15239097 NR Description: putative protein; protein id: At5g42860.1 thaliana] >gi|9758574|dbj|BAB09187.1|
  misc_feature (1)..(136): Homolog of NCBI NO: 28416677 NR Description: At5g42860 [Arabidopsis thaliana]
  misc_feature (153)..(202): Homolog of NCBI NO: 28416677 NR Description: At5g42860 [Arabidopsis thaliana]
MDGPDEKRRRITRFYSCLLFTLVLAFTLFCLILWGVSKSFAPIATLKEMVLENLNVQSGNDQSGVLTDMLTLNSTVRILYRNPATFFTVHVTSAPLQLSYSQLILASGQMGEFSQRRKSERIIETKVFGDQIPLYGGVPALFGQRAEPDQVVLPLNLTFTLRARAYVLGRLVKTTFHSNIKCSITFYGDKLGKTLDLSKSCSDH

SEQ ID NO: 69948 - protein, 156 aa, Arabidopsis thaliana
  peptide (1)..(156): Ceres Seq. ID no. 2051113
  misc_feature (1)..(153): Homolog of NCBI NO: 15227481 NR Description: unknown protein; protein id: At2g41990.1
  misc_feature (1)..(153): Homolog of NCBI NO: 38345517 NR Description: OSJNBa0039K24.20 [Oryza sativa (japonica
  misc_feature (1)..(153): Homolog of NCBI NO: 5777621 NR Description: CAA30379.1 protein [Oryza sativa]
  misc_feature (1)..(88): Homolog of NCBI NO: 18401556 NR Description: expressed protein; protein id: At1g45688.1, by cDNA: 8255., supported by cDNA: gi_20466719 [Arabidopsis
  misc_feature (89)..(154): Homolog of NCBI NO: 18401556 NR Description: expressed protein; protein id: At1g45688.1, by cDNA: 8255., supported by cDNA: gi_20466719 [Arabidopsis
  misc_feature (1)..(88): Homolog of NCBI NO: 15239097 NR Description: putative protein; protein id: At5g42860.1 thaliana] >gi|9758574|dbj|BAB09187.1|
  misc_feature (105)..(154): Homolog of NCBI NO: 15239097 NR Description: putative protein; protein id: At5g42860.1 thaliana] >gi|9758574|dbj|BAB09187.1|
  misc_feature (1)..(88): Homolog of NCBI NO: 28416677 NR Description: At5g42860 [Arabidopsis thaliana]
  misc_feature (105)..(154): Homolog of NCBI NO: 28416677 NR Description: At5g42860 [Arabidopsis thaliana]
  misc_feature (1)..(154): Homolog of NCBI NO: 32488073 NR Description: OSJNBa0084A10.1 [Oryza sativa (japonica
MVLENLNVQSGNDQSGVLTDMLTLNSTVRILYRNPATFFTVHVTSAPLQLSYSQLILASGQMGEFSQRRKSERIIETKVFGDQIPLYGGVPALFGQRAEPDQVVLPLNLTFTLRARAYVLGRLVKTTFHSNIKCSITFYGDKLGKTLDLSKSCSDH

SEQ ID NO: 69949 - DNA, 1665 bp, Arabidopsis thaliana
  misc_feature (1)..(1665): Ceres Seq. ID no. 2051502
  misc_feature: MA Experiment ID: 20000306 Result: Up-regulated in Transcription
  misc_feature: MA Experiment 20000306 PARAMETER Experiment Name: At_Germinating_Seeds_Sub_P Parameter: Age (hr) Value: 6 vs. 0
  misc_feature: MA Experiment 20000306 PARAMETER Experiment Name: At_Germinating_Seeds_Sub_P Parameter: Organism Value: A. thaliana
  misc_feature: MA Experiment 20000306 PARAMETER Experiment Name: At_Germinating_Seeds_Sub_P Parameter: Plant Line Value: WS
  misc_feature: MA Experiment 20000306 PARAMETER Experiment Name: At_Germinating_Seeds_Sub_P Parameter: Tissue Value: Germinating Seeds
  misc_feature: MA Experiment ID: 20000307 Result: Up-regulated in Transcription
  misc_feature: MA Experiment 20000307 PARAMETER Experiment Name: At_Germinating_Seeds_Sub_P Parameter: Age (hr) Value: 24 vs. 0
  misc_feature: MA Experiment 20000307 PARAMETER Experiment Name: At_Germinating_Seeds_Sub_P Parameter: Organism Value: A. thaliana
  misc_feature: MA Experiment 20000307 PARAMETER Experiment Name: At_Germinating_Seeds_Sub_P Parameter: Plant Line Value: WS
  misc_feature: MA Experiment 20000307 PARAMETER Experiment Name: At_Germinating_Seeds_Sub_P Parameter: Tissue Value: Germinating Seeds
  misc_feature: MA Experiment ID: 20000315 Result: Down-regulated in Transcription
  misc_feature: MA Experiment 20000315 PARAMETER Experiment Name: At_14day_Shoots-Roots_Sub_P Parameter: Age (day) Value: 14
  misc_feature: MA Experiment 20000315 PARAMETER Experiment Name: At_14day_Shoots-Roots_Sub_P Parameter: Organism Value: A. thaliana
  misc_feature: MA Experiment 20000315 PARAMETER Experiment Name: At_14day_Shoots-Roots_Sub_P Parameter: Plant Line Value: WS
  misc_feature: MA Experiment 20000315 PARAMETER Experiment Name: At_14day_Shoots-Roots_Sub_P Parameter: Tissue Value: Shoots vs. Whole Plant
  misc_feature: MA Experiment ID: 20000328 Result: Down-regulated in Transcription
  misc_feature: MA Experiment 20000328 PARAMETER Experiment Name: At_42deg_Heat_Sub_P Parameter: Age (day) Value: 14
  misc_feature: MA Experiment 20000328 PARAMETER Experiment Name: At_42deg_Heat_Sub_P Parameter: Organism Value: A. thaliana
  misc_feature: MA Experiment 20000328 PARAMETER Experiment Name: At_42deg_Heat_Sub_P Parameter: Plant Line Value: WS
  misc_feature: MA Experiment 20000328 PARAMETER Experiment Name: At_42deg_Heat_Sub_P Parameter: Temperature (deg C) Value: 42 vs. 22
  misc_feature: MA Experiment 20000328 PARAMETER Experiment Name: At_42deg_Heat_Sub_P Parameter: Timepoint (hr) Value: 6
  misc_feature: MA Experiment 20000328 PARAMETER Experiment Name: At_42deg_Heat_Sub_P Parameter: Tissue Value: Aerial
  misc_feature: MA Experiment ID: 20001807 Result: Down-regulated in Transcription
  misc_feature: MA Experiment 20001807 PARAMETER Experiment Name: At_50mM_NH4NO3_L-to-H_Sub_P Parameter: Timepoint (hr) Value: 6
  misc_feature: MA Experiment 20001807 PARAMETER Experiment Name: At_50mM_NH4NO3_L-to-H_Sub_P Parameter: Tissue Value: Leaf
  misc_feature: MA Experiment 20001807 PARAMETER Experiment Name: At_50mM_NH4NO3_L-to-H_Sub_P Parameter: Treatment Value: 50mM NH4NO3 vs 100mM Mannitol
atggcggatacaatggttgctcatatggaccgacataataagatagatgttgagatctcagaagatgacaagagattaacaaagctttgctctctaaagaagaaggctataaatgcgacgaacaagtttaagcactcaatgaccaagaaaggtcgaaggcatagccgtgtggcgtgtgtctcaatcgtcgatgaaatcgatacagaagagttgcaagcggttgatgctttccgtcaagctcttattttagacgaactacttccctctaagcatgatgatcatcacatgatgcttaggttcttgagggcaagaaagtttgatctcgaaaaggctaagcaaatgtggtctgatatgcttaactggaggaaagaatatggcgcagacacgatcatggaggactttgatttcaaagaaatcgaagaagtggttaagtattatccacaaggatatcatggtgttgacaaggaaggaagacctatctatattgagaggctaggccaagttgatgccacaaagctgatgaaagtgaccacaattgataggtacgtgaagtaccatgtgaaagagttcgagaagactttcaacgtcaaattccctgcttgttccatcgctgcgaaacgacacattgatcagagcacaacgatcttggatgttcaaggcgtggggcttagtaacttcaacaaagctgcaaaagatcttcttcagagtattcagaaaatcgacaacgataactaccctgagacgctgaaccgtatgttcatcatcaatgctggttgtgggtttaggcttttatggaacacagtgaaatctttccttgacccaaagactacagcaaagattcacgttcttggcaacaaataccaaaccaaacttctagaaatcattgacgccaatgaactgcctgagttcttgggtggtaagtgcacctgcgcagacaaaggtggatgtatgcgttcagacaaaggtccatggaacgaccctgagatcttcaagttggttcagaacggtgaaggtagatgcctgcgaaggagcttgtcagggatcgaggaaaagacaatctttgagtataacaacgaaacaaagaagaaatgcgaaccagaagagactcacaagcaatctgctgcggagatggagaagaagttcatcgacacgaatgtggatgctgcagcggctgctgattggcctacaaagcttaacaaggctgaaaaaaaccctaccgaccttaaagatgtgtactcagctgtgaatccgttggagaggaaagggtacttatatggcagcgtcatggcattgctaatggggatagtgggagtgatgaggctaaccaagaacatgccaaggaggctcaccgaggcaaatgtttatagccgtgaaggcagcgccgtctaccaggacggagtgactgttatgtcgaagcaggagtatattgcgatggtgaagaagataacagatcttgaggagaaatgtaagtccatggaagctcaggctgcgttttatatggagagggagaagactctagacgctgcacttcgtcgtattgaccagctcgagcttcagttgtctgaaaccaacaaggcactagacgagacaatgacgaggcaacatgagataatggctttcatcgagaagaaaaagaagaagaagcggaagttcttattattctag

SEQ ID NO: 69950 - protein, 554 aa, Arabidopsis thaliana
  peptide (1)..(554): Ceres Seq. ID no. 2051503
  misc_feature (147)..(328): Pfam Name: CRAL/TRIO domain Pfam Description: CRAL/TRIO domain
  misc_feature (1)..(525): Homolog of NCBI NO: 15234966 NR Description: SEC14 - like protein; protein id: At4g39180.1
  misc_feature (1)..(551): Homolog of NCBI NO: 18399733 NR Description: putative phosphatidylinositol phophatidylcholine protein; protein id: At2g21540.1, supported by cDNA: gi_16209641 thaliana] >gi|16209642|gb|AAL14382.1| At2g21540/F2G1.19
  misc_feature (14)..(549): Homolog of NCBI NO: 15236152 NR Description: putative protein; protein id: At4g34580.1
  misc_feature (1)..(365): Homolog of NCBI NO: 25412048 NR Description: hypothetical protein At2g21540 [imported] - thaliana >gi|4567235|gb|AAD23650.1| putative
  misc_feature (29)..(549): Homolog of NCBI NO: 15224125 NR Description: putative phosphatidylinositol/phophatidylcholine protein; protein id: At2g18180.1 [Arabidopsis thaliana]
  misc_feature (21)..(551): Homolog of NCBI NO: 18419847 NR Description: expressed protein; protein id: At4g36490.1, by cDNA: gi_15215779 [Arabidopsis thaliana] C7A10_870/C7A10_870 [Arabidopsis thaliana]
  misc_feature (15)..(551): Homolog of NCBI NO: 25407729 NR Description: hypothetical protein AT4g36490 [imported] - thaliana >gi|4006913|emb|CAB16843.1| hypothetical protein thaliana] >gi|7270597|emb|CAB80315.1| hypothetical protein
  misc_feature (14)..(554): Homolog of NCBI NO: 18398094 NR Description: putative phosphatidylinositol/phosphatidylcholine protein; protein id: At2g16380.1, supported by cDNA: gi_16612282 thaliana] >gi|16612283|gb|AAL27507.1|AF439836_1
  misc_feature (31)..(551): Homolog of NCBI NO: 14517816 NR Description: phosphatidylinositol transfer-like protein II
  misc_feature (31)..(404): Homolog of NCBI NO: 14486707 NR Description: phosphatidylinositol transfer-like protein IV
MADTMVAHMDRHNKIDVEISEDDKRLTKLCSLKKKAINATNKFKHSMTKKGRRHSRVACVSIVDEIDTEELQAVDAFRQALILDELLPSKHDDHHMMLRFLRARKFDLEKAKQMWSDMLNWRKEYGADTIMEDFDFKEIEEVVKYYPQGYHGVDKEGRPIYIERLGQVDATKLMKVTTIDRYVKYHVKEFEKTFNVKFPACSIAAKRHIDQSTTILDVQGVGLSNFNKAAKDLLQSIQKIDNDNYPETLNRMFIINAGCGFRLLWNTVKSFLDPKTTAKIHVLGNKYQTKLLEIIDANELPEFLGGKCTCADKGGCMRSDKGPWNDPEIFKLVQNGEGRCLRRSLSGIEEKTIFEYNNETKKKCEPEETHKQSAAEMEKKFIDTNVDAAAAADWPTKLNKAEKNPTDLKDVYSAVNPLERKGYLYGSVMALLMGIVGVMRLTKNMPRRLTEANVYSREGSAVYQDGVTVMSKQEYIAMVKKITDLEEKCKSMEAQAAFYMEREKTLDAALRRIDQLELQLSETNKALDETMTRQHEIMAFIEKKKKKKRKFLLF

SEQ ID NO: 69951 - protein, 550 aa, Arabidopsis thaliana
  peptide (1)..(550): Ceres Seq. ID no. 2051504
  misc_feature (143)..(324): Pfam Name: CRAL/TRIO domain Pfam Description: CRAL/TRIO domain
  misc_feature (1)..(521): Homolog of NCBI NO: 15234966 NR Description: SEC14 - like protein; protein id: At4g39180.1
  misc_feature (1)..(547): Homolog of NCBI NO: 18399733 NR Description: putative phosphatidylinositol phophatidylcholine protein; protein id: At2g21540.1, supported by cDNA: gi_16209641 thaliana] >gi|16209642|gb|AAL14382.1| At2g21540/F2G1.19
  misc_feature (10)..(545): Homolog of NCBI NO: 15236152 NR Description: putative protein; protein id: At4g34580.1
  misc_feature (1)..(361): Homolog of NCBI NO: 25412048 NR Description: hypothetical protein At2g21540 [imported] - thaliana >gi|4567235|gb|AAD23650.1| putative
  misc_feature (25)..(545): Homolog of NCBI NO: 15224125 NR Description: putative phosphatidylinositol/phophatidylcholine protein; protein id: At2g18180.1 [Arabidopsis thaliana]
  misc_feature (17)..(547): Homolog of NCBI NO: 18419847 NR Description: expressed protein; protein id: At4g36490.1, by cDNA: gi_15215779 [Arabidopsis thaliana] C7A10_870/C7A10_870 [Arabidopsis thaliana]
  misc_feature (11)..(547): Homolog of NCBI NO: 25407729 NR Description: hypothetical protein AT4g36490 [imported] - thaliana >gi|4006913|emb|CAB16843.1| hypothetical protein thaliana] >gi|7270597|emb|CAB80315.1| hypothetical protein
  misc_feature (10)..(550): Homolog of NCBI NO: 18398094 NR Description: putative phosphatidylinositol/phosphatidylcholine protein; protein id: At2g16380.1, supported by cDNA: gi_16612282 thaliana] >gi|16612283|gb|AAL27507.1|AF439836_1
  misc_feature (27)..(547): Homolog of NCBI NO: 14517816 NR Description: phosphatidylinositol transfer-like protein II
  misc_feature (27)..(400): Homolog of NCBI NO: 14486707 NR Description: phosphatidylinositol transfer-like protein IV
MVAHMDRHNKIDVEISEDDKRLTKLCSLKKKAINATNKFKHSMTKKGRRHSRVACVSIVDEIDTEELQAVDAFRQALILDELLPSKHDDHHMMLRFLRARKFDLEKAKQMWSDMLNWRKEYGADTIMEDFDFKEIEEVVKYYPQGYHGVDKEGRPIYIERLGQVDATKLMKVTTIDRYVKYHVKEFEKTFNVKFPACSIAAKRHIDQSTTILDVQGVGLSNFNKAAKDLLQSIQKIDNDNYPETLNRMFIINAGCGFRLLWNTVKSFLDPKTTAKIHVLGNKYQTKLLEIIDANELPEFLGGKCTCADKGGCMRSDKGPWNDPEIFKLVQNGEGRCLRRSLSGIEEKTIFEYNNETKKKCEPEETHKQSAAEMEKKFIDTNVDAAAAADWPTKLNKAEKNPTDLKDVYSAVNPLERKGYLYGSVMALLMGIVGVMRLTKNMPRRLTEANVYSREGSAVYQDGVTVMSKQEYIAMVKKITDLEEKCKSMEAQAAFYMEREKTLDAALRRIDQLELQLSETNKALDETMTRQHEIMAFIEKKKKKKRKFLLF

SEQ ID NO: 69952 - protein, 546 aa, Arabidopsis thaliana
  peptide (1)..(546): Ceres Seq. ID no. 2051505
  misc_feature (139)..(320): Pfam Name: CRAL/TRIO domain Pfam Description: CRAL/TRIO domain
  misc_feature (1)..(517): Homolog of NCBI NO: 15234966 NR Description: SEC14 - like protein; protein id: At4g39180.1
  misc_feature (1)..(543): Homolog of NCBI NO: 18399733 NR Description: putative phosphatidylinositol phophatidylcholine protein; protein id: At2g21540.1, supported by cDNA: gi_16209641 thaliana] >gi|16209642|gb|AAL14382.1| At2g21540/F2G1.19
  misc_feature (6)..(541): Homolog of NCBI NO: 15236152 NR Description: putative protein; protein id: At4g34580.1
  misc_feature (1)..(357): Homolog of NCBI NO: 25412048 NR Description: hypothetical protein At2g21540 [imported] - thaliana >gi|4567235|gb|AAD23650.1| putative
  misc_feature (21)..(541): Homolog of NCBI NO: 15224125 NR Description: putative phosphatidylinositol/phophatidylcholine protein; protein id: At2g18180.1 [Arabidopsis thaliana]
  misc_feature (13)..(543): Homolog of NCBI NO: 18419847 NR Description: expressed protein; protein id: At4g36490.1, by cDNA: gi_15215779 [Arabidopsis thaliana] C7A10_870/C7A10_870 [Arabidopsis thaliana]
  misc_feature (7)..(543): Homolog of NCBI NO: 25407729 NR Description: hypothetical protein AT4g36490 [imported] - thaliana >gi|4006913|emb|CAB16843.1| hypothetical protein thaliana] >gi|7270597|emb|CAB80315.1| hypothetical protein
  misc_feature (6)..(546): Homolog of NCBI NO: 18398094 NR Description: putative phosphatidylinositol/phosphatidylcholine protein; protein id: At2g16380.1, supported by cDNA: gi_16612282 thaliana] >gi|16612283|gb|AAL27507.1|AF439836_1
  misc_feature (23)..(543): Homolog of NCBI NO: 14517816 NR Description: phosphatidylinositol transfer-like protein II
  misc_feature (23)..(396): Homolog of NCBI NO: 14486707 NR Description: phosphatidylinositol transfer-like protein IV
MDRHNKIDVEISEDDKRLTKLCSLKKKAINATNKFKHSMTKKGRRHSRVACVSIVDEIDTEELQAVDAFRQALILDELLPSKHDDHHMMLRFLRARKFDLEKAKQMWSDMLNWRKEYGADTIMEDFDFKEIEEVVKYYPQGYHGVDKEGRPIYIERLGQVDATKLMKVTTIDRYVKYHVKEFEKTFNVKFPACSIAAKRHIDQSTTILDVQGVGLSNFNKAAKDLLQSIQKIDNDNYPETLNRMFIINAGCGFRLLWNTVKSFLDPKTTAKIHVLGNKYQTKLLEIIDANELPEFLGGKCTCADKGGCMRSDKGPWNDPEIFKLVQNGEGRCLRRSLSGIEEKTIFEYNNETKKKCEPEETHKQSAAEMEKKFIDTNVDAAAAADWPTKLNKAEKNPTDLKDVYSAVNPLERKGYLYGSVMALLMGIVGVMRLTKNMPRRLTEANVYSREGSAVYQDGVTVMSKQEYIAMVKKITDLEEKCKSMEAQAAFYMEREKTLDAALRRIDQLELQLSETNKALDETMTRQHEIMAFIEKKKKKKRKFLLF

SEQ ID NO: 69953 - DNA, 1500 bp, Arabidopsis thaliana
  misc_feature (1)..(1500): Ceres Seq. ID no. 2051898
  misc_feature: MA Experiment ID: 20000355 Result: Up-regulated in Transcription
  misc_feature: MA Experiment 20000355 PARAMETER Experiment Name: At_Siliques_Sub_P Parameter: Age (day) Value: 21
  misc_feature: MA Experiment 20000355 PARAMETER Experiment Name: At_Siliques_Sub_P Parameter: Organism Value: A. thaliana
  misc_feature: MA Experiment 20000355 PARAMETER Experiment Name: At_Siliques_Sub_P Parameter: Plant Line Value: WS
  misc_feature: MA Experiment 20000355 PARAMETER Experiment Name: At_Siliques_Sub_P Parameter: Tissue Value: Less Than 5mm Siliques vs. Whole Plant
  misc_feature: MA Experiment ID: 20000440 Result: Up-regulated in Transcription
  misc_feature: MA Experiment 20000440 PARAMETER Experiment Name: At_Closed-Flower__Sub_P Parameter: Tissue Value: Closed Flower vs. Whole Plant
atgagcactatgtggagagaaacaaggaatgtattcatagttccattgttcaagtgtatagtggttatgtgtttgatcatctcgctcttagttttcgttgagagtgtttacatgaaccttgtagtactctatgtcaagttgtttaaccgaaaaccagagaaagtctacaaatgggaggcaatgcaggaggatatggagcttggtcatcaaaattatccgatggtccttgttcaaatcccaatgtacaacgaacgagaggtctttgaattatctataggtgctgcgtgcagactaacatggccatcggaccgtctaattgttcaagttttagatgattccaccgatccagcaatcatggaactggtgagcatggaatgtacaaaatgggcatcaaaagacataaatataaattatgagaggcgagagaacagaaatggctacaaggctggagctcttaagcacggcatgaggcacagttacgtcaagcagtgccaatatcttgccatctttgatgctgatttccagcccgagcccgattacctccaacgcgctatcccctttcttatccacaaccctgaggtcgctcttgtccaagctcgatggagatttgtaaacgctaacacatgcttaatgacgaggatgcaagagatgtctctgaactaccatttcatggcagagcaacaatctggatccacaagacatgctttctttggctttaatggaactgcgggagtatggagaatggtggcgatggaagaagctggaggatggaaggaccggacgacggtagaggacatggacttggccgttcgtgttggtcttctcggttggaaatttatcttcgtcaatgacctcgaggttaaaagcgagctaccaagccaatttaaggcctttcgattccaacagcatcggtggtcttgtggtccagccaatcttattaggaaaatgacgatggaaattattcacaataagagagtgaagatttggaagaagttttacgtgatctacagcttctttttcctacggaagatcgtagtccacttcttcacttatttcttttactgtgtcattcttcctacaagtgtcttccttcccgaagtaaatataccgaactggtcaactatatatgttccttctgtcatcaccctcttgagtgccattgccactccaagatcattctacctcgtgattttttgggtcttattcgaaaatgtaatggctatgcaccggaccaagggaactttgattggcttatttgaaggaggaagagtcaatgaatgggttgtcacagagaaattaggagatactcttaacactaagctacttccccagaatggacgacttccgaaaagagtaaatttgaaggagatgatgatgggtatatacatattatgttgtgcttgctacgactttgcatttggaaatgcatttttatatttgtatctcttcatgcaagccactgcttttctcatctccggagttggctttgttggaacttaa

SEQ ID NO: 69954 - protein, 499 aa, Arabidopsis thaliana
  peptide (1)..(499): Ceres Seq. ID no. 2051899
  misc_feature (76)..(254): Pfam Name: Glycosyl transferase Pfam Description: Glycosyl transferase
  misc_feature (3)..(499): Homolog of NCBI NO: 15221657 NR Description: glucosyltransferase, putative; protein id:
  misc_feature (3)..(367): Homolog of NCBI NO: 9369401 NR Description: T23E23.23 [Arabidopsis thaliana]
  misc_feature (343)..(499): Homolog of NCBI NO: 9369401 NR Description: T23E23.23 [Arabidopsis thaliana]
  misc_feature (4)..(499): Homolog of NCBI NO: 28393622 NR Description: putative cellulose synthase [Arabidopsis thaliana]
  misc_feature (38)..(286): Homolog of NCBI NO: 15235702 NR Description: putative protein; protein id: At4g13410.1
  misc_feature (324)..(451): Homolog of NCBI NO: 15235702 NR Description: putative protein; protein id: At4g13410.1
  misc_feature (4)..(499): Homolog of NCBI NO: 30688411 NR Description: glycosyltransferase family 2 [Arabidopsis >gi|8778578|gb|AAF79586.1|AC007945_6 F28C11.11 [Arabidopsis >gi|20466606|gb|AAM20620.1| unknown protein [Arabidopsis
  misc_feature (27)..(499): Homolog of NCBI NO: 30688416 NR Description: glycosyltransferase family 2 [Arabidopsis
  misc_feature (5)..(498): Homolog of NCBI NO: 18403914 NR Description: putative glucosyltransferase; protein id: supported by cDNA: 113140., supported by cDNA: gi_16604558 thaliana] >gi|16604559|gb|AAL24081.1| putative
  misc_feature (1)..(499): Homolog of NCBI NO: 15242959 NR Description: glucosyltransferase-like protein; protein id: supported by cDNA: gi_16648763, supported by cDNA: gi_16648964, by cDNA: gi_20259889 [Arabidopsis thaliana]
MSTMWRETRNVFIVPLFKCIVVMCLIISLLVFVESVYMNLVVLYVKLFNRKPEKVYKWEAMQEDMELGHQNYPMVLVQIPMYNEREVFELSIGAACRLTWPSDRLIVQVLDDSTDPAIMELVSMECTKWASKDININYERRENRNGYKAGALKHGMRHSYVKQCQYLAIFDADFQPEPDYLQRAIPFLIHNPEVALVQARWRFVNANTCLMTRMQEMSLNYHFMAEQQSGSTRHAFFGFNGTAGVWRMVAMEEAGGWKDRTTVEDMDLAVRVGLLGWKFIFVNDLEVKSELPSQFKAFRFQQHRWSCGPANLIRKMTMEIIHNKRVKIWKKFYVIYSFFFLRKIVVHFFTYFFYCVILPTSVFLPEVNIPNWSTIYVPSVITLLSAIATPRSFYLVIFWVLFENVMAMHRTKGTLIGLFEGGRVNEWVVTEKLGDTLNTKLLPQNGRLPKRVNLKEMMMGIYILCCACYDFAFGNAFLYLYLFMQATAFLISGVGFVGT

SEQ ID NO: 69955 - protein, 496 aa, Arabidopsis thaliana
  peptide (1)..(496): Ceres Seq. ID no. 2051900
  misc_feature (73)..(251): Pfam Name: Glycosyl transferase Pfam Description: Glycosyl transferase
  misc_feature (1)..(496): Homolog of NCBI NO: 15221657 NR Description: glucosyltransferase, putative; protein id:
  misc_feature (1)..(364): Homolog of NCBI NO: 9369401 NR Description: T23E23.23 [Arabidopsis thaliana]
  misc_feature (340)..(496): Homolog of NCBI NO: 9369401 NR Description: T23E23.23 [Arabidopsis thaliana]
  misc_feature (1)..(496): Homolog of NCBI NO: 28393622 NR Description: putative cellulose synthase [Arabidopsis thaliana]
  misc_feature (35)..(283): Homolog of NCBI NO: 15235702 NR Description: putative protein; protein id: At4g13410.1
  misc_feature (321)..(448): Homolog of NCBI NO: 15235702 NR Description: putative protein; protein id: At4g13410.1
  misc_feature (1)..(496): Homolog of NCBI NO: 30688411 NR Description: glycosyltransferase family 2 [Arabidopsis >gi|8778578|gb|AAF79586.1|AC007945_6 F28C11.11 [Arabidopsis >gi|20466606|gb|AAM20620.1| unknown protein [Arabidopsis
  misc_feature (24)..(496): Homolog of NCBI NO: 30688416 NR Description: glycosyltransferase family 2 [Arabidopsis
  misc_feature (2)..(495): Homolog of NCBI NO: 18403914 NR Description: putative glucosyltransferase; protein id: supported by cDNA: 113140., supported by cDNA: gi_16604558 thaliana] >gi|16604559|gb|AAL24081.1| putative
  misc_feature (1)..(496): Homolog of NCBI NO: 15242959 NR Description: glucosyltransferase-like protein; protein id: supported by cDNA: gi_16648763, supported by cDNA: gi_16648964, by cDNA: gi_20259889 [Arabidopsis thaliana]
MWRETRNVFIVPLFKCIVVMCLIISLLVFVESVYMNLVVLYVKLFNRKPEKVYKWEAMQEDMELGHQNYPMVLVQIPMYNEREVFELSIGAACRLTWPSDRLIVQVLDDSTDPAIMELVSMECTKWASKDININYERRENRNGYKAGALKHGMRHSYVKQCQYLAIFDADFQPEPDYLQRAIPFLIHNPEVALVQARWRFVNANTCLMTRMQEMSLNYHFMAEQQSGSTRHAFFGFNGTAGVWRMVAMEEAGGWKDRTTVEDMDLAVRVGLLGWKFIFVNDLEVKSELPSQFKAFRFQQHRWSCGPANLIRKMTMEIIHNKRVKIWKKFYVIYSFFFLRKIVVHFFTYFFYCVILPTSVFLPEVNIPNWSTIYVPSVITLLSAIATPRSFYLVIFWVLFENVMAMHRTKGTLIGLFEGGRVNEWVVTEKLGDTLNTKLLPQNGRLPKRVNLKEMMMGIYILCCACYDFAFGNAFLYLYLFMQATAFLISGVGFVGT

SEQ ID NO: 69956 - protein, 477 aa, Arabidopsis thaliana
  peptide (1)..(477): Ceres Seq. ID no. 2051901
  misc_feature (54)..(232): Pfam Name: Glycosyl transferase Pfam Description: Glycosyl transferase
  misc_feature (1)..(477): Homolog of NCBI NO: 15221657 NR Description: glucosyltransferase, putative; protein id:
  misc_feature (1)..(345): Homolog of NCBI NO: 9369401 NR Description: T23E23.23 [Arabidopsis thaliana]
  misc_feature (321)..(477): Homolog of NCBI NO: 9369401 NR Description: T23E23.23 [Arabidopsis thaliana]
  misc_feature (1)..(477): Homolog of NCBI NO: 28393622 NR Description: putative cellulose synthase [Arabidopsis thaliana]
  misc_feature (16)..(264): Homolog of NCBI NO: 15235702 NR Description: putative protein; protein id: At4g13410.1
  misc_feature (302)..(429): Homolog of NCBI NO: 15235702 NR Description: putative protein; protein id: At4g13410.1
  misc_feature (1)..(477): Homolog of NCBI NO: 30688411 NR Description: glycosyltransferase family 2 [Arabidopsis >gi|8778578|gb|AAF79586.1|AC007945_6 F28C11.11 [Arabidopsis >gi|20466606|gb|AAM20620.1| unknown protein [Arabidopsis
  misc_feature (5)..(477): Homolog of NCBI NO: 30688416 NR Description: glycosyltransferase family 2 [Arabidopsis
  misc_feature (1)..(476): Homolog of NCBI NO: 18403914 NR Description: putative glucosyltransferase; protein id: supported by cDNA: 113140., supported by cDNA: gi_16604558 thaliana] >gi|16604559|gb|AAL24081.1| putative
  misc_feature (1)..(477): Homolog of NCBI NO: 15242959 NR Description: glucosyltransferase-like protein; protein id: supported by cDNA: gi_16648763, supported by cDNA: gi_16648964, by cDNA: gi_20259889 [Arabidopsis thaliana]
MCLIISLLVFVESVYMNLVVLYVKLFNRKPEKVYKWEAMQEDMELGHQNYPMVLVQIPMYNEREVFELSIGAACRLTWPSDRLIVQVLDDSTDPAIMELVSMECTKWASKDININYERRENRNGYKAGALKHGMRHSYVKQCQYLAIFDADFQPEPDYLQRAIPFLIHNPEVALVQARWRFVNANTCLMTRMQEMSLNYHFMAEQQSGSTRHAFFGFNGTAGVWRMVAMEEAGGWKDRTTVEDMDLAVRVGLLGWKFIFVNDLEVKSELPSQFKAFRFQQHRWSCGPANLIRKMTMEIIHNKRVKIWKKFYVIYSFFFLRKIVVHFFTYFFYCVILPTSVFLPEVNIPNWSTIYVPSVITLLSAIATPRSFYLVIFWVLFENVMAMHRTKGTLIGLFEGGRVNEWVVTEKLGDTLNTKLLPQNGRLPKRVNLKEMMMGIYILCCACYDFAFGNAFLYLYLFMQATAFLISGVGFVGT

SEQ ID NO: 69957 - DNA, 336 bp, Arabidopsis thaliana
  misc_feature (1)..(336): Ceres Seq. ID no. 2052164
  misc_feature: MA Experiment ID: 20000306 Result: Up-regulated in Transcription
  misc_feature: MA Experiment 20000306 PARAMETER Experiment Name: At_Germinating_Seeds_Sub_P Parameter: Age (hr) Value: 6 vs. 0
  misc_feature: MA Experiment 20000306 PARAMETER Experiment Name: At_Germinating_Seeds_Sub_P Parameter: Organism Value: A. thaliana
  misc_feature: MA Experiment 20000306 PARAMETER Experiment Name: At_Germinating_Seeds_Sub_P Parameter: Plant Line Value: WS
  misc_feature: MA Experiment 20000306 PARAMETER Experiment Name: At_Germinating_Seeds_Sub_P Parameter: Tissue Value: Germinating Seeds
  misc_feature: MA Experiment ID: 20000307 Result: Up-regulated in Transcription
  misc_feature: MA Experiment 20000307 PARAMETER Experiment Name: At_Germinating_Seeds_Sub_P Parameter: Age (hr) Value: 24 vs. 0
  misc_feature: MA Experiment 20000307 PARAMETER Experiment Name: At_Germinating_Seeds_Sub_P Parameter: Organism Value: A. thaliana
  misc_feature: MA Experiment 20000307 PARAMETER Experiment Name: At_Germinating_Seeds_Sub_P Parameter: Plant Line Value: WS
  misc_feature: MA Experiment 20000307 PARAMETER Experiment Name: At_Germinating_Seeds_Sub_P Parameter: Tissue Value: Germinating Seeds
atggggctttcatttgcaaagcttttcagcaggcttttcgccaagaaggagatgcgcatccttatggtgggtcttgatgctgctggtaagaccaccattttgtacaagctcaagcttggtgagattgtcaccaccatccccaccattgtactgcttgtgtttgccaacaaacaggatcttccaaacgcaatgaatgctgctgaaataactgataagcttggactccactctctccggcagcgtcactggtacatacagatcacgtgcgccaccaccggtgagggactgtacgaaggcctggactggctctccaacaacattgctaacaaagcttga

SEQ ID NO: 69958 - protein, 111 aa, Arabidopsis thaliana
  peptide (1)..(111): Ceres Seq. ID no. 2052165
  misc_feature (50)..(107): Pfam Name: ADP-ribosylation factor family Pfam Description: ADP-ribosylation factor family
  misc_feature (50)..(111): Homolog of NCBI NO: 25294169 NR Description: ADP-ribosylation factor [imported] - pepper
  misc_feature (50)..(110): Homolog of NCBI NO: 17154685 NR Description: ADP-ribosylation factor [Gossypium hirsutum]
  misc_feature (50)..(110): Homolog of NCBI NO: 29028256 NR Description: ARF1-like GTP-binding protein [Gossypium hirsutum]
  misc_feature (1)..(49): Homolog of NCBI NO: 17154685 NR Description: ADP-ribosylation factor [Gossypium hirsutum]
  misc_feature (1)..(49): Homolog of NCBI NO: 25294169 NR Description: ADP-ribosylation factor [imported] - pepper
  misc_feature (1)..(49): Homolog of NCBI NO: 29028256 NR Description: ARF1-like GTP-binding protein [Gossypium hirsutum]
  misc_feature (50)..(111): Homolog of NCBI NO: 30681825 NR Description: ADP-ribosylation factor, putative [Arabidopsis
  misc_feature (1)..(49): Homolog of NCBI NO: 30681825 NR Description: ADP-ribosylation factor, putative [Arabidopsis
  misc_feature (50)..(111): Homolog of NCBI NO: 15223164 NR Description: putative ADP-ribosylation factor 1; protein id: supported by cDNA: 33126., supported by cDNA: gi_13430503,
  misc_feature (1)..(49): Homolog of NCBI NO: 15223164 NR Description: putative ADP-ribosylation factor 1; protein id: supported by cDNA: 33126., supported by cDNA: gi_13430503,
MGLSFAKLFSRLFAKKEMRILMVGLDAAGKTTILYKLKLGEIVTTIPTIVLLVFANKQDLPNAMNAAEITDKLGLHSLRQRHWYIQITCATTGEGLYEGLDWLSNNIANKA

SEQ ID NO: 69959 - protein, 94 aa, Arabidopsis thaliana
  peptide (1)..(94): Ceres Seq. ID no. 2052166
  misc_feature (33)..(90): Pfam Name: ADP-ribosylation factor family Pfam Description: ADP-ribosylation factor family
  misc_feature (1)..(32): Homolog of NCBI NO: 15223164 NR Description: putative ADP-ribosylation factor 1; protein id: supported by cDNA: 33126., supported by cDNA: gi_13430503,
  misc_feature (33)..(94): Homolog of NCBI NO: 25294169 NR Description: ADP-ribosylation factor [imported] - pepper
  misc_feature (33)..(93): Homolog of NCBI NO: 17154685 NR Description: ADP-ribosylation factor [Gossypium hirsutum]
  misc_feature (33)..(93): Homolog of NCBI NO: 29028256 NR Description: ARF1-like GTP-binding protein [Gossypium hirsutum]
  misc_feature (1)..(32): Homolog of NCBI NO: 17154685 NR Description: ADP-ribosylation factor [Gossypium hirsutum]
  misc_feature (1)..(32): Homolog of NCBI NO: 25294169 NR Description: ADP-ribosylation factor [imported] - pepper
  misc_feature (1)..(32): Homolog of NCBI NO: 29028256 NR Description: ARF1-like GTP-binding protein [Gossypium hirsutum]
  misc_feature (33)..(94): Homolog of NCBI NO: 30681825 NR Description: ADP-ribosylation factor, putative [Arabidopsis
  misc_feature (1)..(32): Homolog of NCBI NO: 30681825 NR Description: ADP-ribosylation factor, putative [Arabidopsis
  misc_feature (33)..(94): Homolog of NCBI NO: 15223164 NR Description: putative ADP-ribosylation factor 1; protein id: supported by cDNA: 33126., supported by cDNA: gi_13430503,
MRILMVGLDAAGKTTILYKLKLGEIVTTIPTIVLLVFANKQDLPNAMNAAEITDKLGLHSLRQRHWYIQITCATTGEGLYEGLDWLSNNIANKA

SEQ ID NO: 69960 - protein, 90 aa, Arabidopsis thaliana
  peptide (1)..(90): Ceres Seq. ID no. 2052167
  misc_feature (29)..(86): Pfam Name: ADP-ribosylation factor family Pfam Description: ADP-ribosylation factor family
  misc_feature (29)..(90): Homolog of NCBI NO: 25294169 NR Description: ADP-ribosylation factor [imported] - pepper
  misc_feature (29)..(89): Homolog of NCBI NO: 17154685 NR Description: ADP-ribosylation factor [Gossypium hirsutum]
  misc_feature (29)..(89): Homolog of NCBI NO: 29028256 NR Description: ARF1-like GTP-binding protein [Gossypium hirsutum]
  misc_feature (1)..(28): Homolog of NCBI NO: 17154685 NR Description: ADP-ribosylation factor [Gossypium hirsutum]
  misc_feature (1)..(28): Homolog of NCBI NO: 25294169 NR Description: ADP-ribosylation factor [imported] - pepper
  misc_feature (1)..(28): Homolog of NCBI NO: 29028256 NR Description: ARF1-like GTP-binding protein [Gossypium hirsutum]
  misc_feature (29)..(90): Homolog of NCBI NO: 30681825 NR Description: ADP-ribosylation factor, putative [Arabidopsis
  misc_feature (1)..(28): Homolog of NCBI NO: 30681825 NR Description: ADP-ribosylation factor, putative [Arabidopsis
  misc_feature (29)..(90): Homolog of NCBI NO: 15223164 NR Description: putative ADP-ribosylation factor 1; protein id: supported by cDNA: 33126., supported by cDNA: gi_13430503,
  misc_feature (1)..(28): Homolog of NCBI NO: 15223164 NR Description: putative ADP-ribosylation factor 1; protein id: supported by cDNA: 33126., supported by cDNA: gi_13430503,
MVGLDAAGKTTILYKLKLGEIVTTIPTIVLLVFANKQDLPNAMNAAEITDKLGLHSLRQRHWYIQITCATTGEGLYEGLDWLSNNIANKA

SEQ ID NO: 69961 - DNA, 2331 bp, Arabidopsis thaliana
  misc_feature (1)..(2331): Ceres Seq. ID no. 2052999
  misc_feature: MA Experiment ID: 20000173 Result: Down-regulated in Transcription
  misc_feature: MA Experiment 20000173 PARAMETER Experiment Name: At_42deg_Heat_P Parameter: Age (day) Value: 14
  misc_feature: MA Experiment 20000173 PARAMETER Experiment Name: At_42deg_Heat_P Parameter: Organism Value: A. thaliana
  misc_feature: MA Experiment 20000173 PARAMETER Experiment Name: At_42deg_Heat_P Parameter: Plant Line Value: WS
  misc_feature: MA Experiment 20000173 PARAMETER Experiment Name: At_42deg_Heat_P Parameter: Temperature (deg C) Value: 42 vs. 22
  misc_feature: MA Experiment 20000173 PARAMETER Experiment Name: At_42deg_Heat_P Parameter: Timepoint (hr) Value: 6
  misc_feature: MA Experiment 20000173 PARAMETER Experiment Name: At_42deg_Heat_P Parameter: Tissue Value: Aerial
  misc_feature: MA Experiment ID: 20000264 Result: Up-regulated in Transcription
  misc_feature: MA Experiment 20000264 PARAMETER Experiment Name: At_Open_Flower_P Parameter: Age (day) Value: 21
  misc_feature: MA Experiment 20000264 PARAMETER Experiment Name: At_Open_Flower_P Parameter: Plant Line Value: WS
  misc_feature: MA Experiment 20000264 PARAMETER Experiment Name: At_Open_Flower_P Parameter: Tissue Value: Open Flower vs. Whole Plant
  misc_feature: MA Experiment ID: 20000286 Result: Up-regulated in Transcription
  misc_feature: MA Experiment 20000286 PARAMETER Experiment Name: At_Open_Flower_P Parameter: Age (day) Value: 21
  misc_feature: MA Experiment 20000286 PARAMETER Experiment Name: At_Open_Flower_P Parameter: Plant Line Value: WS
  misc_feature: MA Experiment 20000286 PARAMETER Experiment Name: At_Open_Flower_P Parameter: Tissue Value: Half Open vs. Whole Plant
  misc_feature: MA Experiment ID: 20001557 Result: Up-regulated in Transcription
  misc_feature: MA Experiment 20001557 PARAMETER Experiment Name: At_Drought_Soil_Dry_P Parameter: Age (day) Value: 27
  misc_feature: MA Experiment 20001557 PARAMETER Experiment Name: At_Drought_Soil_Dry_P Parameter: Organism Value: A. thaliana
  misc_feature: MA Experiment 20001557 PARAMETER Experiment Name: At_Drought_Soil_Dry_P Parameter: Plant Line Value: WS
  misc_feature: MA Experiment 20001557 PARAMETER Experiment Name: At_Drought_Soil_Dry_P Parameter: Post Timepoint (hr) Value: 3
  misc_feature: MA Experiment 20001557 PARAMETER Experiment Name: At_Drought_Soil_Dry_P Parameter: Post-Treatment Value: Re-Water vs. No Drought
  misc_feature: MA Experiment 20001557 PARAMETER Experiment Name: At_Drought_Soil_Dry_P Parameter: Timepoint (day) Value: 13
  misc_feature: MA Experiment 20001557 PARAMETER Experiment Name: At_Drought_Soil_Dry_P Parameter: Treatment Value: Drought vs. No Drought
  misc_feature: MA Experiment ID: 20001558 Result: Up-regulated in Transcription
  misc_feature: MA Experiment 20001558 PARAMETER Experiment Name: At_Drought_Soil_Dry_P Parameter: Age (day) Value: 27
  misc_feature: MA Experiment 20001558 PARAMETER Experiment Name: At_Drought_Soil_Dry_P Parameter: Organism Value: A. thaliana
  misc_feature: MA Experiment 20001558 PARAMETER Experiment Name: At_Drought_Soil_Dry_P Parameter: Plant Line Value: WS
  misc_feature: MA Experiment 20001558 PARAMETER Experiment Name: At_Drought_Soil_Dry_P Parameter: Post Timepoint (hr) Value: 6
  misc_feature: MA Experiment 20001558 PARAMETER Experiment Name: At_Drought_Soil_Dry_P Parameter: Post-Treatment Value: Re-Water vs. No Drought
  misc_feature: MA Experiment 20001558 PARAMETER Experiment Name: At_Drought_Soil_Dry_P Parameter: Timepoint (day) Value: 13
  misc_feature: MA Experiment 20001558 PARAMETER Experiment Name: At_Drought_Soil_Dry_P Parameter: Treatment Value: Drought vs. No Drought
atggctgctaagagatctatctactgtcttcttcttcttcctctgctcttgtctttactgatctggattccttcgatctccttagctgctactaaccctgatgatgttgctgcaattaacggattattcgctgcacttggagcacctgttcttcctggttggattgcttctggtggagacccatgtggtgaagcttggcaaggcattatctgcaatgtttcagatattataagcataactgtaaatgctgcaaatttgcaaggagagcttggtgacaacttagctaagttcacttctatcaggggaatagatttcagcaacaatcgcattggaggaagcataccttctactttgccggttacattgcagcatttttttctttcagctaatcagttcaccggaagcatcccggaatctctaggaacattgagttttctgaatgacatgtctttgaacgataaccttctctctggagagctacccgacgtgtttcaaaaccttgtcgggctgattaatcttgatatatcatctaacaatataagcggcacattgcctccttctatggagaatttattaactcttacaacattacgtgttcagaacaatcagctctcaggaactctggacgttcttcaaggccttcctcttcaagacttaaacatagagaataacctcttctctggacccataccggacaaattactaagcattccgaaattcctacatgaaggaaacccgttcaatgccacaatgatcaattccacctcgactgcaccatcattgtctccgtctctatctccaacaaaaccagctccaacgcgaccattttctggagttccacctcctccaaatgagaggaatcgagggaaagttgctgatggaccttctgattcagaaggatcgagctctgagaattcaaagggaaagaactcttcacatactaaaaagataatccttattgcattcgctggcgtcctcgtcttcataattctggttttggcaatactcttgctgttgccaaaatgtgcaagacgtagagaacatgctaacagagttttcaaaccgcatcaagttggtgctgatagaggaagcagagagaatgctctggaaaacgggactccggtactgccaccacctggtcgatctgaaaaagttcaaagagaacccttcaagaaagctggagaggaaccaaaggtcttacatgaccttgagaggctgcggagacctgcacctatatcaagacaggaaagtcaagatattgacttttcaatgttgatgcctcctcctccaccacctccaccaccaccaccacctcctcctttggatgagaaggtcacggttatgccaatcatatcacccgaaagacccgttaagaaaacttcccctaaacgcttacccttaacttctgtgaagcactattctattgcttctcttcaacaatacacggaaagcttcgctcaggaaaatctcattggctcaggcatgctcggtagtgtttatagggcccggcttcccaatggaaagttgtttgctgtcaagaagttggacaagagggcttctgaacaacaacaggatcacgaatttatcgaactagtgaacaatatagatatgattcgccactccaatatcgttgaacttgtgggttactgtgctgagcacgatcaaagactattggtctacgaatattgcagtaacggtacgttacaagacgggttgcattcagacgatgaattcaagaagaaactttcgtggaatacccgtgtcagtatggcacttggagctgctagagcccttgagtacttgcatgaggtgtgtgaaccacctatcatacacagaaacttcaaatcagccaatgttctactcgacgatgacctgagtgttcttgtctcagattgtggtttggccccactaatatcatcaggctctgtgagtcagttatcagggcaattgctagccgcttacggatatggagctccagagttcgactctggaatctatacatggcagagtgatgtatatagttttggtgttgttatgttagaactattgacgggtagaatgtcctacgatagggaccggagtagaggagagcagttcttggtgaggtgggcaatcccacagcttcatgatatcgatgcattgggcaaaatggttgatccatctcttaatggacaataccctgcaaagtcattgtcacactttgctgatataatatcccggtgtgttcagtctgaaccagaatttagaccactgatgtcagaagttgttcaagatctactagatatgatcagaagagagcgtcatggttcgggtgattctaccgcggactag

SEQ ID NO: 69962 - protein, 776 aa, Arabidopsis thaliana
  peptide (1)..(776): Ceres Seq. ID no. 2053000
  misc_feature (128)..(776): Homolog of NCBI NO: 15236294 NR Description: leucine-rich repeat transmembrane protein kinase, protein id: At4g03390.1 [Arabidopsis thaliana]
  misc_feature (10)..(776): Homolog of NCBI NO: 18399502 NR Description: putative LRR receptor protein kinase; protein id: supported by cDNA: gi_15810274 [Arabidopsis thaliana] putative LRR receptor protein kinase receptor protein kinase
  misc_feature (386)..(776): Homolog of NCBI NO: 25411997 NR Description: probable LRR receptor protein kinase [imported] -
  misc_feature (10)..(313): Homolog of NCBI NO: 25411997 NR Description: probable LRR receptor protein kinase [imported] -
  misc_feature (415)..(765): Homolog of NCBI NO: 15217283 NR Description: Putative leucine-rich repeat transmembrane
  misc_feature (10)..(300): Homolog of NCBI NO: 15217283 NR Description: Putative leucine-rich repeat transmembrane
  misc_feature (29)..(348): Homolog of NCBI NO: 30017524 NR Description: putative leucine-rich repeat transmembrane
  misc_feature (458)..(770): Homolog of NCBI NO: 30017524 NR Description: putative leucine-rich repeat transmembrane
  misc_feature (381)..(765): Homolog of NCBI NO: 29367551 NR Description: putative leucine-rich repeat transmembrane
  misc_feature (29)..(330): Homolog of NCBI NO: 29367551 NR Description: putative leucine-rich repeat transmembrane
MAAKRSIYCLLLLPLLLSLLIWIPSISLAATNPDDVAAINGLFAALGAPVLPGWIASGGDPCGEAWQGIICNVSDIISITVNAANLQGELGDNLAKFTSIRGIDFSNNRIGGSIPSTLPVTLQHFFLSANQFTGSIPESLGTLSFLNDMSLNDNLLSGELPDVFQNLVGLINLDISSNNISGTLPPSMENLLTLTTLRVQNNQLSGTLDVLQGLPLQDLNIENNLFSGPIPDKLLSIPKFLHEGNPFNATMINSTSTAPSLSPSLSPTKPAPTRPFSGVPPPPNERNRGKVADGPSDSEGSSSENSKGKNSSHTKKIILIAFAGVLVFIILVLAILLLLPKCARRREHANRVFKPHQVGADRGSRENALENGTPVLPPPGRSEKVQREPFKKAGEEPKVLHDLERLRRPAPISRQESQDIDFSMLMPPPPPPPPPPPPPPLDEKVTVMPIISPERPVKKTSPKRLPLTSVKHYSIASLQQYTESFAQENLIGSGMLGSVYRARLPNGKLFAVKKLDKRASEQQQDHEFIELVNNIDMIRHSNIVELVGYCAEHDQRLLVYEYCSNGTLQDGLHSDDEFKKKLSWNTRVSMALGAARALEYLHEVCEPPIIHRNFKSANVLLDDDLSVLVSDCGLAPLISSGSVSQLSGQLLAAYGYGAPEFDSGIYTWQSDVYSFGVVMLELLTGRMSYDRDRSRGEQFLVRWAIPQLHDIDALGKMVDPSLNGQYPAKSLSHFADIISRCVQSEPEFRPLMSEVVQDLLDMIRRERHGSGDSTAD

SEQ ID NO: 69963 - protein, 628 aa, Arabidopsis thaliana
  peptide (1)..(628): Ceres Seq. ID no. 2053001
  misc_feature (1)..(628): Homolog of NCBI NO: 15236294 NR Description: leucine-rich repeat transmembrane protein kinase, protein id: At4g03390.1 [Arabidopsis thaliana]
  misc_feature (1)..(628): Homolog of NCBI NO: 18399502 NR Description: putative LRR receptor protein kinase; protein id: supported by cDNA: gi_15810274 [Arabidopsis thaliana] putative LRR receptor protein kinase receptor protein kinase
  misc_feature (238)..(628): Homolog of NCBI NO: 25411997 NR Description: probable LRR receptor protein kinase [imported] -
  misc_feature (1)..(165): Homolog of NCBI NO: 25411997 NR Description: probable LRR receptor protein kinase [imported] -
  misc_feature (267)..(617): Homolog of NCBI NO: 15217283 NR Description: Putative leucine-rich repeat transmembrane
  misc_feature (1)..(152): Homolog of NCBI NO: 15217283 NR Description: Putative leucine-rich repeat transmembrane
  misc_feature (1)..(200): Homolog of NCBI NO: 30017524 NR Description: putative leucine-rich repeat transmembrane
  misc_feature (310)..(622): Homolog of NCBI NO: 30017524 NR Description: putative leucine-rich repeat transmembrane
  misc_feature (233)..(617): Homolog of NCBI NO: 29367551 NR Description: putative leucine-rich repeat transmembrane
  misc_feature (1)..(182): Homolog of NCBI NO: 29367551 NR Description: putative leucine-rich repeat transmembrane
MSLNDNLLSGELPDVFQNLVGLINLDISSNNISGTLPPSMENLLTLTTLRVQNNQLSGTLDVLQGLPLQDLNIENNLFSGPIPDKLLSIPKFLHEGNPFNATMINSTSTAPSLSPSLSPTKPAPTRPFSGVPPPPNERNRGKVADGPSDSEGSSSENSKGKNSSHTKKIILIAFAGVLVFIILVLAILLLLPKCARRREHANRVFKPHQVGADRGSRENALENGTPVLPPPGRSEKVQREPFKKAGEEPKVLHDLERLRRPAPISRQESQDIDFSMLMPPPPPPPPPPPPPPLDEKVTVMPIISPERPVKKTSPKRLPLTSVKHYSIASLQQYTESFAQENLIGSGMLGSVYRARLPNGKLFAVKKLDKRASEQQQDHEFIELVNNIDMIRHSNIVELVGYCAEHDQRLLVYEYCSNGTLQDGLHSDDEFKKKLSWNTRVSMALGAARALEYLHEVCEPPIIHRNFKSANVLLDDDLSVLVSDCGLAPLISSGSVSQLSGQLLAAYGYGAPEFDSGIYTWQSDVYSFGVVMLELLTGRMSYDRDRSRGEQFLVRWAIPQLHDIDALGKMVDPSLNGQYPAKSLSHFADIISRCVQSEPEFRPLMSEVVQDLLDMIRRERHGSGDSTAD

SEQ ID NO: 69964 - protein, 589 aa, Arabidopsis thaliana
  peptide (1)..(589): Ceres Seq. ID no. 2053002
  misc_feature (1)..(589): Homolog of NCBI NO: 15236294 NR Description: leucine-rich repeat transmembrane protein kinase, protein id: At4g03390.1 [Arabidopsis thaliana]
  misc_feature (1)..(589): Homolog of NCBI NO: 18399502 NR Description: putative LRR receptor protein kinase; protein id: supported by cDNA: gi_15810274 [Arabidopsis thaliana] putative LRR receptor protein kinase receptor protein kinase
  misc_feature (199)..(589): Homolog of NCBI NO: 25411997 NR Description: probable LRR receptor protein kinase [imported] -
  misc_feature (1)..(126): Homolog of NCBI NO: 25411997 NR Description: probable LRR receptor protein kinase [imported] -
  misc_feature (228)..(578): Homolog of NCBI NO: 15217283 NR Description: Putative leucine-rich repeat transmembrane
  misc_feature (1)..(113): Homolog of NCBI NO: 15217283 NR Description: Putative leucine-rich repeat transmembrane
  misc_feature (1)..(161): Homolog of NCBI NO: 30017524 NR Description: putative leucine-rich repeat transmembrane
  misc_feature (271)..(583): Homolog of NCBI NO: 30017524 NR Description: putative leucine-rich repeat transmembrane
  misc_feature (194)..(578): Homolog of NCBI NO: 29367551 NR Description: putative leucine-rich repeat transmembrane
  misc_feature (1)..(143): Homolog of NCBI NO: 29367551 NR Description: putative leucine-rich repeat transmembrane
MENLLTLTTLRVQNNQLSGTLDVLQGLPLQDLNIENNLFSGPIPDKLLSIPKFLHEGNPFNATMINSTSTAPSLSPSLSPTKPAPTRPFSGVPPPPNERNRGKVADGPSDSEGSSSENSKGKNSSHTKKIILIAFAGVLVFIILVLAILLLLPKCARRREHANRVFKPHQVGADRGSRENALENGTPVLPPPGRSEKVQREPFKKAGEEPKVLHDLERLRRPAPISRQESQDIDFSMLMPPPPPPPPPPPPPPLDEKVTVMPIISPERPVKKTSPKRLPLTSVKHYSIASLQQYTESFAQENLIGSGMLGSVYRARLPNGKLFAVKKLDKRASEQQQDHEFIELVNNIDMIRHSNIVELVGYCAEHDQRLLVYEYCSNGTLQDGLHSDDEFKKKLSWNTRVSMALGAARALEYLHEVCEPPIIHRNFKSANVLLDDDLSVLVSDCGLAPLISSGSVSQLSGQLLAAYGYGAPEFDSGIYTWQSDVYSFGVVMLELLTGRMSYDRDRSRGEQFLVRWAIPQLHDIDALGKMVDPSLNGQYPAKSLSHFADIISRCVQSEPEFRPLMSEVVQDLLDMIRRERHGSGDSTAD

SEQ ID NO: 69965 - DNA, 1449 bp, Arabidopsis thaliana
  misc_feature (1)..(1449): Ceres Seq. ID no. 2053617
  misc_feature: MA Experiment ID: 20001761 Result: Down-regulated in Transcription
  misc_feature: MA Experiment 20001761 PARAMETER Experiment Name: At_50mM_NH4NO3_L-to-H_P Parameter: Timepoint (hr) Value: 4
  misc_feature: MA Experiment 20001761 PARAMETER Experiment Name: At_50mM_NH4NO3_L-to-H_P Parameter: Tissue Value: Siliques
  misc_feature: MA Experiment 20001761 PARAMETER Experiment Name: At_50mM_NH4NO3_L-to-H_P Parameter: Treatment Value: 50mM NH4NO3 vs 100mM Mannitol
  misc_feature: MA Experiment ID: 20001906 Result: Up-regulated in Transcription
  misc_feature: MA Experiment 20001906 PARAMETER Experiment Name: At_Drought_Reproduction_P Parameter: Age (day) Value: 35
  misc_feature: MA Experiment 20001906 PARAMETER Experiment Name: At_Drought_Reproduction_P Parameter: Organism Value: A. thaliana
  misc_feature: MA Experiment 20001906 PARAMETER Experiment Name: At_Drought_Reproduction_P Parameter: Plant Line Value: WS
  misc_feature: MA Experiment 20001906 PARAMETER Experiment Name: At_Drought_Reproduction_P Parameter: Timepoint (day) Value: 5
  misc_feature: MA Experiment 20001906 PARAMETER Experiment Name: At_Drought_Reproduction_P Parameter: Tissue Value: Siliques
  misc_feature: MA Experiment 20001906 PARAMETER Experiment Name: At_Drought_Reproduction_P Parameter: Treatment Value: Drought vs. No Drought
  misc_feature: Pfam Name: p450 Pfam Description: Cytochrome P450
atggtagaagtttatgagttattaactgtgatggtttcactcattgtggtgaagctatttcattggatatatcagtcgaagaatccgaaacctaatgaaaaactacctccagggtcgatgggttttccgatcattggagagacttttgagttcatgaagcctcatgacgcttttcagtttccaacattcatcaaggagagaatcatcagatatggaccaatttttcggacaagtttatttggagccaaagttataatctcgacggatattgaattaaatatggagatagcaaagacaaaccatgctcctggtctcacaaagagcatagcacaactctttggagaaaacaacttgttttttcagagcaaggagtctcataaacatgtccgaaacttgacattccagttgttaggttcacaaggtttgaaattgagtgtgatgcaagacatcgatctcttgactcgcacacacatggaagaaggagctaggagaggttgtcttgacgtcaaggaaatatcaagcaagattttaattgaatgccttgcaaagaaagttaccggcgacatggaaccagaggcggcgaaagaactcgcactctgttggagatgttttccgagtggctggtttagattccctctcaatcttcctgggactggtgtttataaaatgatgaaagcaagaaagaggatgcttcacttactaaaggagacaatactgaagaagagagcatcaggagaggagttaggggagttcttcaagatcatctttgaaggagcggaaacaatgagcgtagacaatgcgatcgagtacatatacaccttatttctgcttgctaacgaaacaacaccacgtattcttgcagctacaataaagctcataagtgacaaccctaaagtcatgaaggagttgcatagagagcatgagggaattgtccggggtaagactgagaaggagaccagcataacatgggaagagtacaaatctatgacatttacccaaatggtgatcaatgagtcccttaggatcacaagcacggcgccaacagtatttagaatatttgatcatgagttccaagttggttcttataaaattccagctggttggatcttcatgggctatccaaacaatcatttcaatccaaaaacttacgatgaccctttagtattcaatccatggcgttgggagggaaaagacttgggcgcgatcgtctctcggacttacattccctttggtgctggctctagacaatgtgtaggagctgagtttgctaagctgcaaatggccatttttatccatcatttgtctagagacaggtggtcaatgaagataggaaccacaatacttcgaaactttgtactcatgtttccaaatggatgtgaggttcaattcttaaaagacactgaagtggataactcgagtggttcgaatcccgattgctgcaatggataa

SEQ ID NO: 69966 - protein, 482 aa, Arabidopsis thaliana
  peptide (1)..(482): Ceres Seq. ID no. 2053618
  misc_feature: Pfam Name: p450 Pfam Description: Cytochrome P450
  misc_feature (1)..(482): Homolog of NCBI NO: 15218776 NR Description: cytochrome P450, putative; protein id:
  misc_feature (1)..(440): Homolog of NCBI NO: 6686409 NR Description: F1E22.5 [Arabidopsis thaliana]
  misc_feature (11)..(440): Homolog of NCBI NO: 2190554 NR Description: Similar to Arabidopsis cytochrome P450 CYP90
  misc_feature (11)..(256): Homolog of NCBI NO: 15233767 NR Description: steroid 22-alpha-hydroxylase(cytochrome p450), protein id: At4g15300.1 [Arabidopsis thaliana]
  misc_feature (225)..(470): Homolog of NCBI NO: 15233767 NR Description: steroid 22-alpha-hydroxylase(cytochrome p450), protein id: At4g15300.1 [Arabidopsis thaliana]
  misc_feature (1)..(468): Homolog of NCBI NO: 30683237 NR Description: cytochrome P450 -related [Arabidopsis thaliana]
  misc_feature (1)..(474): Homolog of NCBI NO: 9294334 NR Description: cytochrome P450-like protein [Arabidopsis
  misc_feature (33)..(468): Homolog of NCBI NO: 18700149 NR Description: At4g15396 [Arabidopsis thaliana]
  misc_feature (1)..(395): Homolog of NCBI NO: 30683232 NR Description: cytochrome P450 -related [Arabidopsis thaliana] unknown protein [Arabidopsis thaliana]
  misc_feature (75)..(474): Homolog of NCBI NO: 15230741 NR Description: cytochrome P450, putative; protein id:
MVEVYELLTVMVSLIVVKLFHWIYQSKNPKPNEKLPPGSMGFPIIGETFEFMKPHDAFQFPTFIKERIIRYGPIFRTSLFGAKVIISTDIELNMEIAKTNHAPGLTKSIAQLFGENNLFFQSKESHKHVRNLTFQLLGSQGLKLSVMQDIDLLTRTHMEEGARRGCLDVKEISSKILIECLAKKVTGDMEPEAAKELALCWRCFPSGWFRFPLNLPGTGVYKMMKARKRMLHLLKETILKKRASGEELGEFFKIIFEGAETMSVDNAIEYIYTLFLLANETTPRILAATIKLISDNPKVMKELHREHEGIVRGKTEKETSITWEEYKSMTFTQMVINESLRITSTAPTVFRIFDHEFQVGSYKIPAGWIFMGYPNNHFNPKTYDDPLVFNPWRWEGKDLGAIVSRTYIPFGAGSRQCVGAEFAKLQMAIFIHHLSRDRWSMKIGTTILRNFVLMFPNGCEVQFLKDTEVDNSSGSNPDCCNG

SEQ ID NO: 69967 - protein, 472 aa, Arabidopsis thaliana
  peptide (1)..(472): Ceres Seq. ID no. 2053619
  misc_feature: Pfam Name: p450 Pfam Description: Cytochrome P450
  misc_feature (1)..(472): Homolog of NCBI NO: 15218776 NR Description: cytochrome P450, putative; protein id:
  misc_feature (1)..(430): Homolog of NCBI NO: 6686409 NR Description: F1E22.5 [Arabidopsis thaliana]
  misc_feature (1)..(430): Homolog of NCBI NO: 2190554 NR Description: Similar to Arabidopsis cytochrome P450 CYP90
  misc_feature (1)..(246): Homolog of NCBI NO: 15233767 NR Description: steroid 22-alpha-hydroxylase(cytochrome p450), protein id: At4g15300.1 [Arabidopsis thaliana]
  misc_feature (215)..(460): Homolog of NCBI NO: 15233767 NR Description: steroid 22-alpha-hydroxylase(cytochrome p450), protein id: At4g15300.1 [Arabidopsis thaliana]
  misc_feature (1)..(458): Homolog of NCBI NO: 30683237 NR Description: cytochrome P450 -related [Arabidopsis thaliana]
  misc_feature (1)..(464): Homolog of NCBI NO: 9294334 NR Description: cytochrome P450-like protein [Arabidopsis
  misc_feature (23)..(458): Homolog of NCBI NO: 18700149 NR Description: At4g15396 [Arabidopsis thaliana]
  misc_feature (1)..(385): Homolog of NCBI NO: 30683232 NR Description: cytochrome P450 -related [Arabidopsis thaliana] unknown protein [Arabidopsis thaliana]
  misc_feature (65)..(464): Homolog of NCBI NO: 15230741 NR Description: cytochrome P450, putative; protein id:
MVSLIVVKLFHWIYQSKNPKPNEKLPPGSMGFPIIGETFEFMKPHDAFQFPTFIKERIIRYGPIFRTSLFGAKVIISTDIELNMEIAKTNHAPGLTKSIAQLFGENNLFFQSKESHKHVRNLTFQLLGSQGLKLSVMQDIDLLTRTHMEEGARRGCLDVKEISSKILIECLAKKVTGDMEPEAAKELALCWRCFPSGWFRFPLNLPGTGVYKMMKARKRMLHLLKETILKKRASGEELGEFFKIIFEGAETMSVDNAIEYIYTLFLLANETTPRILAATIKLISDNPKVMKELHREHEGIVRGKTEKETSITWEEYKSMTFTQMVINESLRITSTAPTVFRIFDHEFQVGSYKIPAGWIFMGYPNNHFNPKTYDDPLVFNPWRWEGKDLGAIVSRTYIPFGAGSRQCVGAEFAKLQMAIFIHHLSRDRWSMKIGTTILRNFVLMFPNGCEVQFLKDTEVDNSSGSNPDCCNG

SEQ ID NO: 69968 - protein, 443 aa, Arabidopsis thaliana
  peptide (1)..(443): Ceres Seq. ID no. 2053620
  misc_feature: Pfam Name: p450 Pfam Description: Cytochrome P450
  misc_feature (1)..(443): Homolog of NCBI NO: 15218776 NR Description: cytochrome P450, putative; protein id:
  misc_feature (1)..(401): Homolog of NCBI NO: 6686409 NR Description: F1E22.5 [Arabidopsis thaliana]
  misc_feature (1)..(401): Homolog of NCBI NO: 2190554 NR Description: Similar to Arabidopsis cytochrome P450 CYP90
  misc_feature (1)..(217): Homolog of NCBI NO: 15233767 NR Description: steroid 22-alpha-hydroxylase(cytochrome p450), protein id: At4g15300.1 [Arabidopsis thaliana]
  misc_feature (186)..(431): Homolog of NCBI NO: 15233767 NR Description: steroid 22-alpha-hydroxylase(cytochrome p450), protein id: At4g15300.1 [Arabidopsis thaliana]
  misc_feature (1)..(429): Homolog of NCBI NO: 30683237 NR Description: cytochrome P450 -related [Arabidopsis thaliana]
  misc_feature (1)..(435): Homolog of NCBI NO: 9294334 NR Description: cytochrome P450-like protein [Arabidopsis
  misc_feature (1)..(429): Homolog of NCBI NO: 18700149 NR Description: At4g15396 [Arabidopsis thaliana]
  misc_feature (1)..(356): Homolog of NCBI NO: 30683232 NR Description: cytochrome P450 -related [Arabidopsis thaliana] unknown protein [Arabidopsis thaliana]
  misc_feature (36)..(435): Homolog of NCBI NO: 15230741 NR Description: cytochrome P450, putative; protein id:
MGFPIIGETFEFMKPHDAFQFPTFIKERIIRYGPIFRTSLFGAKVIISTDIELNMEIAKTNHAPGLTKSIAQLFGENNLFFQSKESHKHVRNLTFQLLGSQGLKLSVMQDIDLLTRTHMEEGARRGCLDVKEISSKILIECLAKKVTGDMEPEAAKELALCWRCFPSGWFRFPLNLPGTGVYKMMKARKRMLHLLKETILKKRASGEELGEFFKIIFEGAETMSVDNAIEYIYTLFLLANETTPRILAATIKLISDNPKVMKELHREHEGIVRGKTEKETSITWEEYKSMTFTQMVINESLRITSTAPTVFRIFDHEFQVGSYKIPAGWIFMGYPNNHFNPKTYDDPLVFNPWRWEGKDLGAIVSRTYIPFGAGSRQCVGAEFAKLQMAIFIHHLSRDRWSMKIGTTILRNFVLMFPNGCEVQFLKDTEVDNSSGSNPDCCNG

SEQ ID NO: 69969 - DNA, 2199 bp, Arabidopsis thaliana
  misc_feature (1)..(2199): Ceres Seq. ID no. 2053819
  misc_feature: MA Experiment ID: 20000264 Result: Up-regulated in Transcription
  misc_feature: MA Experiment 20000264 PARAMETER Experiment Name: At_Open_Flower_P Parameter: Age (day) Value: 21
  misc_feature: MA Experiment 20000264 PARAMETER Experiment Name: At_Open_Flower_P Parameter: Plant Line Value: WS
  misc_feature: MA Experiment 20000264 PARAMETER Experiment Name: At_Open_Flower_P Parameter: Tissue Value: Open Flower vs. Whole Plant
  misc_feature: MA Experiment ID: 20000265 Result: Up-regulated in Transcription
  misc_feature: MA Experiment 20000265 PARAMETER Experiment Name: At_Open_Flower_P Parameter: Age (day) Value: 21
  misc_feature: MA Experiment 20000265 PARAMETER Experiment Name: At_Open_Flower_P Parameter: Plant Line Value: WS
  misc_feature: MA Experiment 20000265 PARAMETER Experiment Name: At_Open_Flower_P Parameter: Tissue Value: Closed Flower vs. Whole Plant
  misc_feature: MA Experiment ID: 20000286 Result: Up-regulated in Transcription
  misc_feature: MA Experiment 20000286 PARAMETER Experiment Name: At_Open_Flower_P Parameter: Age (day) Value: 21
  misc_feature: MA Experiment 20000286 PARAMETER Experiment Name: At_Open_Flower_P Parameter: Plant Line Value: WS
  misc_feature: MA Experiment 20000286 PARAMETER Experiment Name: At_Open_Flower_P Parameter: Tissue Value: Half Open vs. Whole Plant
  misc_feature: MA Experiment ID: 20000794 Result: Up-regulated in Transcription
  misc_feature: MA Experiment 20000794 PARAMETER Experiment Name: At_Petals_P Parameter: Age (day) Value: 23-25 days
  misc_feature: MA Experiment 20000794 PARAMETER Experiment Name: At_Petals_P Parameter: Plant Line Value: WS
  misc_feature: MA Experiment 20000794 PARAMETER Experiment Name: At_Petals_P Parameter: Tissue Value: Petals vs. Whole plant
  misc_feature: MA Experiment ID: 20001911 Result: Up-regulated in Transcription
  misc_feature: MA Experiment 20001911 PARAMETER Experiment Name: At_Drought_Reproduction_P Parameter: Age (day) Value: 40
  misc_feature: MA Experiment 20001911 PARAMETER Experiment Name: At_Drought_Reproduction_P Parameter: Organism Value: A. thaliana
  misc_feature: MA Experiment 20001911 PARAMETER Experiment Name: At_Drought_Reproduction_P Parameter: Plant Line Value: WS
  misc_feature: MA Experiment 20001911 PARAMETER Experiment Name: At_Drought_Reproduction_P Parameter: Timepoint (day) Value: 10
  misc_feature: MA Experiment 20001911 PARAMETER Experiment Name: At_Drought_Reproduction_P Parameter: Tissue Value: Flowers
  misc_feature: MA Experiment 20001911 PARAMETER Experiment Name: At_Drought_Reproduction_P Parameter: Treatment Value: Drought vs. No Drought
atgtcatatggatacgacgatgaggatgcaaagaggaaaaagagatatgtaattatctctatctcctctgttcttttaatctccatggttgtcgctgttaccataggtgttagcgtcaacaagtccgataacgctggtgacgaagaaatcacaacttctgttaaagccatcaaagatgtttgtgcaccgacggattacaaagagacttgtgaggatacactaaggaaagatgcgaaggacacatcagacccgttggagctggtgaagacagcttttaacgcaacgatgaaacaaataagtgacgtggcaaagaagtcacaaactatgattgagctacaaaaggatccaagggcaaagatggcgttggatcaatgcaaggagctaatggattacgcaatcggtgagcttagtaagtcgtttgaagagttggggaagttcgagtttcataaagttgatgaggccttggttaagttgaggatttggcttagtgcgacgataagccatgagcaaacttgtcttgatgggtttcaagggacacaaggtaatgctggtgagacgataaagaaggcgttgaaaaccgcggtgcagttaacgcataacgggcttgcaatggttaccgaaatgtcgaattacttaggacaaatgcagattccggagatgaatagtagacggttgttgtcccaagagtttccttcgtggatggatgcgcgagcacgtaggctattgaacgctcctatgtccgaggtaaaacccgatatcgtggtggcgcaagacggaagtggtcagtacaagacgattaacgaggcattgaattttgtcccgaagaagaagaacacgactttcgtggttcatattaaggaaggaatctataaagagtatgttcaggtgaataggagcatgacacatctagttttcataggtgatggccccgacaaaactgtcatttctggcagcaaaagttacaaggacggtattactacctacaaaacagccaccgttgcaatcgttggagatcatttcattgccaagaacattgccttcgagaacacagccggggcaataaagcatcaagcggttgctattagggttctagcagatgagtcaatattctacaattgtaaattcgatggttaccaagacactctatatgcacattcccaccgtcagttttaccgtgactgtactatctcgggcacaatcgattttctctttggagacgcagctgcggtattccaaaactgtactttactggtgagaaagccacttctaaaccaagcatgccccattacagcccatggacgtaaagatccgcgagaatccacgggatttgttctccaaggatgtacgattgttggcgaaccggattacttggcagtcaaggaacagagcaaaacttatcttggaagaccatggaaagagtattcaagaactatcatcatgaacacgttcataccagattttgttccgccggaaggatggcaaccgtggctcggcgaattcggtcttaacacacttttctactcggaggtgcagaacactgggccgggtgcagctatcacaaaacgggttacttggccaggaatcaagaagttgagtgatgaagaaatccttaaattcactccagctcaatacatccaaggtgacgcttggattcctggtaaaggtgttccgtacatcctaggtctttttagtggaaacggttccacaaattctaccgtaactggctctagtttgtcttctaacacaacagagtcatcagattcaccttcgacggtagtaactccttcaacttctccaccagctggtcatcttggttctccatcagatacaccttcatcggtagtgtctccttcaacttctctgccagctggtcaacttggtgccccaccggctacaccatcaatggtagtgtctccttcaacttctccaccagctggtcatcttggttccccatcagatacaccttcatcgttagtttctccttcaacttctccaccagctggtcatcttggttctccatcagatacaccttcatcggtagtgactccttcagcttctccttctacttcaccatcagcttctccttctgtttcaccatcagcttttccttctgcttcaccatcagcttcaccatcagcttctccttcagtttctccttctgcttcaccatcagcttctccacaaagctcaatcggttga

SEQ ID NO: 69970 - protein, 732 aa, Arabidopsis thaliana
  peptide (1)..(732): Ceres Seq. ID no. 2053820
  misc_feature (252)..(548): Pfam Name: Pectinesterase Pfam Description: Pectinesterase
  misc_feature (1)..(663): Homolog of NCBI NO: 15230019 NR Description: putative pectinesterase; protein id: At3g05610.1 thaliana] >gi|6714449|gb|AAF26136.1|AC011620_12 putative
  misc_feature (1)..(663): Homolog of NCBI NO: 26451784 NR Description: putative pectinesterase [Arabidopsis thaliana]
  misc_feature (4)..(563): Homolog of NCBI NO: 15239814 NR Description: pectinesterase family; protein id: At5g49180.1, by cDNA: 6699., supported by cDNA: gi_18700150 [Arabidopsis >gi|10177147|dbj|BAB10336.1| pectin methylesterase [Arabidopsis
  misc_feature (9)..(558): Homolog of NCBI NO: 7549630 NR Description: pectin methylesterase, putative [Arabidopsis
  misc_feature (9)..(558): Homolog of NCBI NO: 39104585 NR Description: putative pectin methylesterase [Arabidopsis
  misc_feature (9)..(558): Homolog of NCBI NO: 22330893 NR Description: pectin methylesterase, putative; protein id: [Arabidopsis thaliana] >gi|26451728|dbj|BAC42959.1| putative
  misc_feature (18)..(562): Homolog of NCBI NO: 34394412 NR Description: putative pectin methylesterase [Oryza sativa
  misc_feature (216)..(558): Homolog of NCBI NO: 15234768 NR Description: pectinesterase family; protein id: At4g15980.1
  misc_feature (15)..(224): Homolog of NCBI NO: 15234768 NR Description: pectinesterase family; protein id: At4g15980.1
  misc_feature (18)..(562): Homolog of NCBI NO: 34898180 NR Description: contains EST C73169(E3252)~pectin
MSYGYDDEDAKRKKRYVIISISSVLLISMVVAVTIGVSVNKSDNAGDEEITTSVKAIKDVCAPTDYKETCEDTLRKDAKDTSDPLELVKTAFNATMKQISDVAKKSQTMIELQKDPRAKMALDQCKELMDYAIGELSKSFEELGKFEFHKVDEALVKLRIWLSATISHEQTCLDGFQGTQGNAGETIKKALKTAVQLTHNGLAMVTEMSNYLGQMQIPEMNSRRLLSQEFPSWMDARARRLLNAPMSEVKPDIVVAQDGSGQYKTINEALNFVPKKKNTTFVVHIKEGIYKEYVQVNRSMTHLVFIGDGPDKTVISGSKSYKDGITTYKTATVAIVGDHFIAKNIAFENTAGAIKHQAVAIRVLADESIFYNCKFDGYQDTLYAHSHRQFYRDCTISGTIDFLFGDAAAVFQNCTLLVRKPLLNQACPITAHGRKDPRESTGFVLQGCTIVGEPDYLAVKEQSKTYLGRPWKEYSRTIIMNTFIPDFVPPEGWQPWLGEFGLNTLFYSEVQNTGPGAAITKRVTWPGIKKLSDEEILKFTPAQYIQGDAWIPGKGVPYILGLFSGNGSTNSTVTGSSLSSNTTESSDSPSTVVTPSTSPPAGHLGSPSDTPSSVVSPSTSLPAGQLGAPPATPSMVVSPSTSPPAGHLGSPSDTPSSLVSPSTSPPAGHLGSPSDTPSSVVTPSASPSTSPSASPSVSPSAFPSASPSASPSASPSVSPSASPSASPQSSIG

SEQ ID NO: 69971 - protein, 704 aa, Arabidopsis thaliana
  peptide (1)..(704): Ceres Seq. ID no. 2053821
  misc_feature (224)..(520): Pfam Name: Pectinesterase Pfam Description: Pectinesterase
  misc_feature (1)..(635): Homolog of NCBI NO: 15230019 NR Description: putative pectinesterase; protein id: At3g05610.1 thaliana] >gi|6714449|gb|AAF26136.1|AC011620_12 putative
  misc_feature (1)..(635): Homolog of NCBI NO: 26451784 NR Description: putative pectinesterase [Arabidopsis thaliana]
  misc_feature (1)..(535): Homolog of NCBI NO: 15239814 NR Description: pectinesterase family; protein id: At5g49180.1, by cDNA: 6699., supported by cDNA: gi_18700150 [Arabidopsis >gi|10177147|dbj|BAB10336.1| pectin methylesterase [Arabidopsis
  misc_feature (1)..(530): Homolog of NCBI NO: 7549630 NR Description: pectin methylesterase, putative [Arabidopsis
  misc_feature (1)..(530): Homolog of NCBI NO: 39104585 NR Description: putative pectin methylesterase [Arabidopsis
  misc_feature (1)..(530): Homolog of NCBI NO: 22330893 NR Description: pectin methylesterase, putative; protein id: [Arabidopsis thaliana] >gi|26451728|dbj|BAC42959.1| putative
  misc_feature (1)..(534): Homolog of NCBI NO: 34394412 NR Description: putative pectin methylesterase [Oryza sativa
  misc_feature (188)..(530): Homolog of NCBI NO: 15234768 NR Description: pectinesterase family; protein id: At4g15980.1
  misc_feature (1)..(196): Homolog of NCBI NO: 15234768 NR Description: pectinesterase family; protein id: At4g15980.1
  misc_feature (1)..(534): Homolog of NCBI NO: 34898180 NR Description: contains EST C73169(E3252)~pectin
MVVAVTIGVSVNKSDNAGDEEITTSVKAIKDVCAPTDYKETCEDTLRKDAKDTSDPLELVKTAFNATMKQISDVAKKSQTMIELQKDPRAKMALDQCKELMDYAIGELSKSFEELGKFEFHKVDEALVKLRIWLSATISHEQTCLDGFQGTQGNAGETIKKALKTAVQLTHNGLAMVTEMSNYLGQMQIPEMNSRRLLSQEFPSWMDARARRLLNAPMSEVKPDIVVAQDGSGQYKTINEALNFVPKKKNTTFVVHIKEGIYKEYVQVNRSMTHLVFIGDGPDKTVISGSKSYKDGITTYKTATVAIVGDHFIAKNIAFENTAGAIKHQAVAIRVLADESIFYNCKFDGYQDTLYAHSHRQFYRDCTISGTIDFLFGDAAAVFQNCTLLVRKPLLNQACPITAHGRKDPRESTGFVLQGCTIVGEPDYLAVKEQSKTYLGRPWKEYSRTIIMNTFIPDFVPPEGWQPWLGEFGLNTLFYSEVQNTGPGAAITKRVTWPGIKKLSDEEILKFTPAQYIQGDAWIPGKGVPYILGLFSGNGSTNSTVTGSSLSSNTTESSDSPSTVVTPSTSPPAGHLGSPSDTPSSVVSPSTSLPAGQLGAPPATPSMVVSPSTSPPAGHLGSPSDTPSSLVSPSTSPPAGHLGSPSDTPSSVVTPSASPSTSPSASPSVSPSAFPSASPSASPSASPSVSPSASPSASPQSSIG

SEQ ID NO: 69972 - protein, 637 aa, Arabidopsis thaliana
  peptide (1)..(637): Ceres Seq. ID no. 2053822
  misc_feature (157)..(453): Pfam Name: Pectinesterase Pfam Description: Pectinesterase
  misc_feature (1)..(568): Homolog of NCBI NO: 15230019 NR Description: putative pectinesterase; protein id: At3g05610.1 thaliana] >gi|6714449|gb|AAF26136.1|AC011620_12 putative
  misc_feature (1)..(568): Homolog of NCBI NO: 26451784 NR Description: putative pectinesterase [Arabidopsis thaliana]
  misc_feature (1)..(468): Homolog of NCBI NO: 15239814 NR Description: pectinesterase family; protein id: At5g49180.1, by cDNA: 6699., supported by cDNA: gi_18700150 [Arabidopsis >gi|10177147|dbj|BAB10336.1| pectin methylesterase [Arabidopsis
  misc_feature (1)..(463): Homolog of NCBI NO: 7549630 NR Description: pectin methylesterase, putative [Arabidopsis
  misc_feature (1)..(463): Homolog of NCBI NO: 39104585 NR Description: putative pectin methylesterase [Arabidopsis
  misc_feature (1)..(463): Homolog of NCBI NO: 22330893 NR Description: pectin methylesterase, putative; protein id: [Arabidopsis thaliana] >gi|26451728|dbj|BAC42959.1| putative
  misc_feature (1)..(467): Homolog of NCBI NO: 34394412 NR Description: putative pectin methylesterase [Oryza sativa
  misc_feature (121)..(463): Homolog of NCBI NO: 15234768 NR Description: pectinesterase family; protein id: At4g15980.1
  misc_feature (1)..(129): Homolog of NCBI NO: 15234768 NR Description: pectinesterase family; protein id: At4g15980.1
  misc_feature (1)..(467): Homolog of NCBI NO: 34898180 NR Description: contains EST C73169(E3252)~pectin
MKQISDVAKKSQTMIELQKDPRAKMALDQCKELMDYAIGELSKSFEELGKFEFHKVDEALVKLRIWLSATISHEQTCLDGFQGTQGNAGETIKKALKTAVQLTHNGLAMVTEMSNYLGQMQIPEMNSRRLLSQEFPSWMDARARRLLNAPMSEVKPDIVVAQDGSGQYKTINEALNFVPKKKNTTFVVHIKEGIYKEYVQVNRSMTHLVFIGDGPDKTVISGSKSYKDGITTYKTATVAIVGDHFIAKNIAFENTAGAIKHQAVAIRVLADESIFYNCKFDGYQDTLYAHSHRQFYRDCTISGTIDFLFGDAAAVFQNCTLLVRKPLLNQACPITAHGRKDPRESTGFVLQGCTIVGEPDYLAVKEQSKTYLGRPWKEYSRTIIMNTFIPDFVPPEGWQPWLGEFGLNTLFYSEVQNTGPGAAITKRVTWPGIKKLSDEEILKFTPAQYIQGDAWIPGKGVPYILGLFSGNGSTNSTVTGSSLSSNTTESSDSPSTVVTPSTSPPAGHLGSPSDTPSSVVSPSTSLPAGQLGAPPATPSMVVSPSTSPPAGHLGSPSDTPSSLVSPSTSPPAGHLGSPSDTPSSVVTPSASPSTSPSASPSVSPSAFPSASPSASPSASPSVSPSASPSASPQSSIG

SEQ ID NO: 69973 - DNA, 1107 bp, Arabidopsis thaliana
  misc_feature (1)..(1107): Ceres Seq. ID no. 2122223
  misc_feature: MA Experiment ID: 20000184 Result: Up-regulated in Transcription
  misc_feature: MA Experiment 20000184 PARAMETER Experiment Name: At_Shoots__P Parameter: Age (day) Value: 7
  misc_feature: MA Experiment 20000184 PARAMETER Experiment Name: At_Shoots__P Parameter: Tissue Value: Shoots vs. Whole Plant
  misc_feature: MA Experiment ID: 20000185 Result: Up-regulated in Transcription
  misc_feature: MA Experiment 20000185 PARAMETER Experiment Name: At_Roots__P Parameter: Age (day) Value: 7 vs. 21
  misc_feature: MA Experiment 20000185 PARAMETER Experiment Name: At_Roots__P Parameter: Organism Value: A. thaliana
  misc_feature: MA Experiment 20000185 PARAMETER Experiment Name: At_Roots__P Parameter: Tissue Value: Roots vs. Whole Plant
  misc_feature: MA Experiment ID: 20000227 Result: Down-regulated in Transcription
  misc_feature: MA Experiment 20000227 PARAMETER Experiment Name: At_Root-Tips-vs-Tops_P Parameter: Tissue Value: Root Tips vs. Root Tops
  misc_feature: MA Experiment ID: 20000437 Result: Down-regulated in Transcription
  misc_feature: MA Experiment 20000437 PARAMETER Experiment Name: At_Drought_P Parameter: Age (day) Value: 8
  misc_feature: MA Experiment 20000437 PARAMETER Experiment Name: At_Drought_P Parameter: Organism Value: A. thaliana
  misc_feature: MA Experiment 20000437 PARAMETER Experiment Name: At_Drought_P Parameter: Plant Line Value: WS
  misc_feature: MA Experiment 20000437 PARAMETER Experiment Name: At_Drought_P Parameter: Timepoint (hr) Value: 24
  misc_feature: MA Experiment 20000437 PARAMETER Experiment Name: At_Drought_P Parameter: Tissue Value: Whole Plant
  misc_feature: MA Experiment 20000437 PARAMETER Experiment Name: At_Drought_P Parameter: Treatment Value: Drought vs. No Drought
  misc_feature: MA Experiment ID: 20000439 Result: Up-regulated in Transcription
  misc_feature: MA Experiment 20000439 PARAMETER Experiment Name: At_Roots__P Parameter: Age (day) Value: 14 vs. 21
  misc_feature: MA Experiment 20000439 PARAMETER Experiment Name: At_Roots__P Parameter: Organism Value: A. thaliana
  misc_feature: MA Experiment 20000439 PARAMETER Experiment Name: At_Roots__P Parameter: Tissue Value: Roots vs. Whole Plant
atgaatcgagatgagcatattgcaaagaaagttgaaggatcaatctctagcttctccggggagaccagtacttcctcaaaacaaatctatgttaatcccgtgaccacgaccgggacgaaatcaatggaagacgacgacgtttcactctctcttctatacaatctatctaccttacatgaaaaagtccatcagatccaatctctggtcagcttctacatggtatctactaataacattaaccaatcctcggggtcaacgtctttggccgtggctaacatcggaagtttggttcaagagatcatcacggctgcttcatccatgttatatacttgccaacaactccaaatcggatctaacaacaacaacaacgatatcgataatgatcaaaccgtagatgcaatggttttggagttttcccgacaagaaaccgacccgggtcatgattttgtgcaagagtcgaccaacctttttggtgtccaagaaagagggcagatctcgtttcccgaccagaatcttgattggtacaacaccgaaaccataaaccctaaaaaagataaacatcgttctaaaccaagttccgggagctacgatatactggagctagacgtagcggacctactagcgaaatacacgcattactgccagatttgtgggaaagggtttaagagagacgctaatctaaggatgcacatgagagcgcacggggatgagtacaagacacgtgaggccttgatcagcccaacgagccaagacaagaaaggaggatactcgttaaagaaacattactactcctgtcctcaacacgggtgtagatggaaccagaggcacgagaagtttcaaccgttgaaatctgtgatttgcgccaagaatcattacaagaggagtcattgtcccaaaatgtatatgtgcaggagatgtagtgtgaagcatttctcggttctgtctgatcttaggacacacgagaagcattgtggggatataaagtgggtttgctcttgtgggactaaattttctaggaaagacaagctgatgagccacgtttctttgtttttgggccacgtaccggcacatgggtcgtccaagccgccgacaatcaccctaaagtaa

SEQ ID NO: 69974 - protein, 368 aa, Arabidopsis thaliana
  peptide (1)..(368): Ceres Seq. ID no. 2122224
  misc_feature (329)..(353): Pfam Name: Zinc finger, C2H2 type Pfam Description: Zinc finger, C2H2 type
  misc_feature (1)..(368): Homolog of NCBI NO: 30688719 NR Description: expressed protein [Arabidopsis thaliana]
  misc_feature (134)..(368): Homolog of NCBI NO: 10177236 NR Description: contains similarity to C2H2-type zinc finger [Arabidopsis thaliana] >gi|28466935|gb|AAO44076.1| At5g22890
  misc_feature (194)..(366): Homolog of NCBI NO: 10241636 NR Description: putative zinc finger protein [Oryza sativa
  misc_feature (194)..(366): Homolog of NCBI NO: 38346456 NR Description: OSJNBa0019G23.4 [Oryza sativa (japonica
  misc_feature (194)..(356): Homolog of NCBI NO: 15218606 NR Description: zinc finger protein, putative; protein id: supported by cDNA: 40167. [Arabidopsis thaliana]
  misc_feature (194)..(356): Homolog of NCBI NO: 21593564 NR Description: zinc finger protein, putative [Arabidopsis
  misc_feature (111)..(356): Homolog of NCBI NO: 34908682 NR Description: putative zinc finger protein [Oryza sativa
  misc_feature (150)..(356): Homolog of NCBI NO: 28376689 NR Description: putative zinc finger protein [Oryza sativa
  misc_feature (149)..(346): Homolog of NCBI NO: 11357453 NR Description: hypothetical protein F15A17.180 - Arabidopsis >gi|7413592|emb|CAB86082.1| putative protein [Arabidopsis
  misc_feature (147)..(357): Homolog of NCBI NO: 15222242 NR Description: zinc finger protein, putative; protein id:
MNRDEHIAKKVEGSISSFSGETSTSSKQIYVNPVTTTGTKSMEDDDVSLSLLYNLSTLHEKVHQIQSLVSFYMVSTNNINQSSGSTSLAVANIGSLVQEIITAASSMLYTCQQLQIGSNNNNNDIDNDQTVDAMVLEFSRQETDPGHDFVQESTNLFGVQERGQISFPDQNLDWYNTETINPKKDKHRSKPSSGSYDILELDVADLLAKYTHYCQICGKGFKRDANLRMHMRAHGDEYKTREALISPTSQDKKGGYSLKKHYYSCPQHGCRWNQRHEKFQPLKSVICAKNHYKRSHCPKMYMCRRCSVKHFSVLSDLRTHEKHCGDIKWVCSCGTKFSRKDKLMSHVSLFLGHVPAHGSSKPPTITLK

SEQ ID NO: 69975 - protein, 327 aa, Arabidopsis thaliana
  peptide (1)..(327): Ceres Seq. ID no. 2122225
  misc_feature (288)..(312): Pfam Name: Zinc finger, C2H2 type Pfam Description: Zinc finger, C2H2 type
  misc_feature (153)..(325): Homolog of NCBI NO: 10241636 NR Description: putative zinc finger protein [Oryza sativa
  misc_feature (153)..(325): Homolog of NCBI NO: 38346456 NR Description: OSJNBa0019G23.4 [Oryza sativa (japonica
  misc_feature (153)..(315): Homolog of NCBI NO: 15218606 NR Description: zinc finger protein, putative; protein id: supported by cDNA: 40167. [Arabidopsis thaliana]
  misc_feature (153)..(315): Homolog of NCBI NO: 21593564 NR Description: zinc finger protein, putative [Arabidopsis
  misc_feature (1)..(327): Homolog of NCBI NO: 30688719 NR Description: expressed protein [Arabidopsis thaliana]
  misc_feature (93)..(327): Homolog of NCBI NO: 10177236 NR Description: contains similarity to C2H2-type zinc finger [Arabidopsis thaliana] >gi|28466935|gb|AAO44076.1| At5g22890
  misc_feature (70)..(315): Homolog of NCBI NO: 34908682 NR Description: putative zinc finger protein [Oryza sativa
  misc_feature (109)..(315): Homolog of NCBI NO: 28376689 NR Description: putative zinc finger protein [Oryza sativa
  misc_feature (108)..(305): Homolog of NCBI NO: 11357453 NR Description: hypothetical protein F15A17.180 - Arabidopsis >gi|7413592|emb|CAB86082.1| putative protein [Arabidopsis
  misc_feature (106)..(316): Homolog of NCBI NO: 15222242 NR Description: zinc finger protein, putative; protein id:
MEDDDVSLSLLYNLSTLHEKVHQIQSLVSFYMVSTNNINQSSGSTSLAVANIGSLVQEIITAASSMLYTCQQLQIGSNNNNNDIDNDQTVDAMVLEFSRQETDPGHDFVQESTNLFGVQERGQISFPDQNLDWYNTETINPKKDKHRSKPSSGSYDILELDVADLLAKYTHYCQICGKGFKRDANLRMHMRAHGDEYKTREALISPTSQDKKGGYSLKKHYYSCPQHGCRWNQRHEKFQPLKSVICAKNHYKRSHCPKMYMCRRCSVKHFSVLSDLRTHEKHCGDIKWVCSCGTKFSRKDKLMSHVSLFLGHVPAHGSSKPPTITLK

SEQ ID NO: 69976 - protein, 296 aa, Arabidopsis thaliana
  peptide (1)..(296): Ceres Seq. ID no. 2122226
  misc_feature (257)..(281): Pfam Name: Zinc finger, C2H2 type Pfam Description: Zinc finger, C2H2 type
  misc_feature (1)..(296): Homolog of NCBI NO: 30688719 NR Description: expressed protein [Arabidopsis thaliana]
  misc_feature (62)..(296): Homolog of NCBI NO: 10177236 NR Description: contains similarity to C2H2-type zinc finger [Arabidopsis thaliana] >gi|28466935|gb|AAO44076.1| At5g22890
  misc_feature (122)..(294): Homolog of NCBI NO: 10241636 NR Description: putative zinc finger protein [Oryza sativa
  misc_feature (122)..(294): Homolog of NCBI NO: 38346456 NR Description: OSJNBa0019G23.4 [Oryza sativa (japonica
  misc_feature (122)..(284): Homolog of NCBI NO: 15218606 NR Description: zinc finger protein, putative; protein id: supported by cDNA: 40167. [Arabidopsis thaliana]
  misc_feature (122)..(284): Homolog of NCBI NO: 21593564 NR Description: zinc finger protein, putative [Arabidopsis
  misc_feature (39)..(284): Homolog of NCBI NO: 34908682 NR Description: putative zinc finger protein [Oryza sativa
  misc_feature (78)..(284): Homolog of NCBI NO: 28376689 NR Description: putative zinc finger protein [Oryza sativa
  misc_feature (77)..(274): Homolog of NCBI NO: 11357453 NR Description: hypothetical protein F15A17.180 - Arabidopsis >gi|7413592|emb|CAB86082.1| putative protein [Arabidopsis
  misc_feature (75)..(285): Homolog of NCBI NO: 15222242 NR Description: zinc finger protein, putative; protein id:
MVSTNNINQSSGSTSLAVANIGSLVQEIITAASSMLYTCQQLQIGSNNNNNDIDNDQTVDAMVLEFSRQETDPGHDFVQESTNLFGVQERGQISFPDQNLDWYNTETINPKKDKHRSKPSSGSYDILELDVADLLAKYTHYCQICGKGFKRDANLRMHMRAHGDEYKTREALISPTSQDKKGGYSLKKHYYSCPQHGCRWNQRHEKFQPLKSVICAKNHYKRSHCPKMYMCRRCSVKHFSVLSDLRTHEKHCGDIKWVCSCGTKFSRKDKLMSHVSLFLGHVPAHGSSKPPTITLK

SEQ ID NO: 69977 - DNA, 540 bp, Arabidopsis thaliana
  misc_feature (1)..(540): Ceres Seq. ID no. 2123863
  misc_feature: MA Experiment ID: 20000307 Result: Up-regulated in Transcription
  misc_feature: MA Experiment 20000307 PARAMETER Experiment Name: At_Germinating_Seeds_Sub_P Parameter: Age (hr) Value: 24 vs. 0
  misc_feature: MA Experiment 20000307 PARAMETER Experiment Name: At_Germinating_Seeds_Sub_P Parameter: Organism Value: A. thaliana
  misc_feature: MA Experiment 20000307 PARAMETER Experiment Name: At_Germinating_Seeds_Sub_P Parameter: Plant Line Value: WS
  misc_feature: MA Experiment 20000307 PARAMETER Experiment Name: At_Germinating_Seeds_Sub_P Parameter: Tissue Value: Germinating Seeds
  misc_feature: MA Experiment ID: 20000314 Result: Up-regulated in Transcription
  misc_feature: MA Experiment 20000314 PARAMETER Experiment Name: At_14day_Shoots-Roots_Sub_P Parameter: Age (day) Value: 14
  misc_feature: MA Experiment 20000314 PARAMETER Experiment Name: At_14day_Shoots-Roots_Sub_P Parameter: Organism Value: A. thaliana
  misc_feature: MA Experiment 20000314 PARAMETER Experiment Name: At_14day_Shoots-Roots_Sub_P Parameter: Plant Line Value: WS
  misc_feature: MA Experiment 20000314 PARAMETER Experiment Name: At_14day_Shoots-Roots_Sub_P Parameter: Tissue Value: Roots vs. Whole Plant
  misc_feature: MA Experiment ID: 20000347 Result: Up-regulated in Transcription
  misc_feature: MA Experiment 20000347 PARAMETER Experiment Name: At_2mM_SA_Sub_P Parameter: Age (day) Value: 14
  misc_feature: MA Experiment 20000347 PARAMETER Experiment Name: At_2mM_SA_Sub_P Parameter: Organism Value: A. thaliana
  misc_feature: MA Experiment 20000347 PARAMETER Experiment Name: At_2mM_SA_Sub_P Parameter: Plant Line Value: WS
  misc_feature: MA Experiment 20000347 PARAMETER Experiment Name: At_2mM_SA_Sub_P Parameter: Timepoint (hr) Value: 6
  misc_feature: MA Experiment 20000347 PARAMETER Experiment Name: At_2mM_SA_Sub_P Parameter: Tissue Value: Aerial
  misc_feature: MA Experiment 20000347 PARAMETER Experiment Name: At_2mM_SA_Sub_P Parameter: Treatment Value: 2mM SA vs. No Treatment
  misc_feature: MA Experiment ID: 20000355 Result: Down-regulated in Transcription
  misc_feature: MA Experiment 20000355 PARAMETER Experiment Name: At_Siliques_Sub_P Parameter: Age (day) Value: 21
  misc_feature: MA Experiment 20000355 PARAMETER Experiment Name: At_Siliques_Sub_P Parameter: Organism Value: A. thaliana
  misc_feature: MA Experiment 20000355 PARAMETER Experiment Name: At_Siliques_Sub_P Parameter: Plant Line Value: WS
  misc_feature: MA Experiment 20000355 PARAMETER Experiment Name: At_Siliques_Sub_P Parameter: Tissue Value: Less Than 5mm Siliques vs. Whole Plant
  misc_feature: MA Experiment ID: 20000440 Result: Down-regulated in Transcription
  misc_feature: MA Experiment 20000440 PARAMETER Experiment Name: At_Closed-Flower__Sub_P Parameter: Tissue Value: Closed Flower vs. Whole Plant
atggatgtttcaggaagcttgaattgcgttgttgtggcggtagatggaagcgaggtgagtatggaagctctgaggtgggctctagacaacctcaagctctcttcgtcttcttccgattcatcattcgtcgtgctccacgtccagccgtcgccttctgtagccgccggcgtgagtcccggcaccatacctttcggtggtggtcttgaggttcctgctttcactgctgcaatcgagcaacaccagaagcggatcaccgacaccatcctcgaacacgctagtcaaatttgtgctgaaaaatctgtgagtagagttatttcccttgtgtcccctgtgaatgtgaaaacacaagtggttattggggatcccaagtataaaatctgcgaagctgtagagaatttgcatgctgatcttcttgtcatgggctcccgggcttatggccgcattaagagaatgtttctgggaagtgtaagcaactactgcaccaaccacgcccattgtcctgttgtgataatcaaaccaaaagaggattcttctgcataa

SEQ ID NO: 69978 - protein, 179 aa, Arabidopsis thaliana
  peptide (1)..(179): Ceres Seq. ID no. 2123864
  misc_feature (6)..(172): Pfam Name: Universal stress protein family Pfam Description: Universal stress protein family
  misc_feature (1)..(179): Homolog of NCBI NO: 25402571 NR Description: hypothetical protein [imported] - Arabidopsis >gi|2160182|gb|AAB60745.1| ESTs
  misc_feature (1)..(179): Homolog of NCBI NO: 30681321 NR Description: ER6 protein -related [Arabidopsis thaliana]
  misc_feature (7)..(172): Homolog of NCBI NO: 5669654 NR Description: ER6 protein [Lycopersicon esculentum]
  misc_feature (7)..(175): Homolog of NCBI NO: 34914610 NR Description: P0520B06.18 [Oryza sativa (japonica
  misc_feature (10)..(176): Homolog of NCBI NO: 30681955 NR Description: ethylene-responsive protein -related [Arabidopsis >gi|6671949|gb|AAF23209.1|AC016795_22 unknown protein thaliana] >gi|10998131|dbj|BAB03102.1| gene_id:MEC18.3~unknown
  misc_feature (10)..(176): Homolog of NCBI NO: 18399413 NR Description: ethylene-responsive protein, putative; protein
  misc_feature (4)..(173): Homolog of NCBI NO: 40539010 NR Description: putative stress-related protein [Oryza sativa
  misc_feature (10)..(176): Homolog of NCBI NO: 21594903 NR Description: ethylene-responsive protein, putative
  misc_feature (10)..(178): Homolog of NCBI NO: 30694811 NR Description: expressed protein [Arabidopsis thaliana] unknown protein [Arabidopsis thaliana]
  misc_feature (10)..(178): Homolog of NCBI NO: 22831145 NR Description: contains ESTs
MDVSGSLNCVVVAVDGSEVSMEALRWALDNLKLSSSSSDSSFVVLHVQPSPSVAAGVSPGTIPFGGGLEVPAFTAAIEQHQKRITDTILEHASQICAEKSVSRVISLVSPVNVKTQVVIGDPKYKICEAVENLHADLLVMGSRAYGRIKRMFLGSVSNYCTNHAHCPVVIIKPKEDSSA

SEQ ID NO: 69979 - protein, 159 aa, Arabidopsis thaliana
  peptide (1)..(159): Ceres Seq. ID no. 2123865
  misc_feature (1)..(152): Pfam Name: Universal stress protein family Pfam Description: Universal stress protein family
  misc_feature (1)..(159): Homolog of NCBI NO: 25402571 NR Description: hypothetical protein [imported] - Arabidopsis >gi|2160182|gb|AAB60745.1| ESTs
  misc_feature (1)..(159): Homolog of NCBI NO: 30681321 NR Description: ER6 protein -related [Arabidopsis thaliana]
  misc_feature (1)..(152): Homolog of NCBI NO: 5669654 NR Description: ER6 protein [Lycopersicon esculentum]
  misc_feature (1)..(155): Homolog of NCBI NO: 34914610 NR Description: P0520B06.18 [Oryza sativa (japonica
  misc_feature (1)..(156): Homolog of NCBI NO: 30681955 NR Description: ethylene-responsive protein -related [Arabidopsis >gi|6671949|gb|AAF23209.1|AC016795_22 unknown protein thaliana] >gi|10998131|dbj|BAB03102.1| gene_id:MEC18.3~unknown
  misc_feature (1)..(156): Homolog of NCBI NO: 18399413 NR Description: ethylene-responsive protein, putative; protein
  misc_feature (1)..(153): Homolog of NCBI NO: 40539010 NR Description: putative stress-related protein [Oryza sativa
  misc_feature (1)..(156): Homolog of NCBI NO: 21594903 NR Description: ethylene-responsive protein, putative
  misc_feature (1)..(158): Homolog of NCBI NO: 30694811 NR Description: expressed protein [Arabidopsis thaliana] unknown protein [Arabidopsis thaliana]
  misc_feature (1)..(158): Homolog of NCBI NO: 22831145 NR Description: contains ESTs
MEALRWALDNLKLSSSSSDSSFVVLHVQPSPSVAAGVSPGTIPFGGGLEVPAFTAAIEQHQKRITDTILEHASQICAEKSVSRVISLVSPVNVKTQVVIGDPKYKICEAVENLHADLLVMGSRAYGRIKRMFLGSVSNYCTNHAHCPVVIIKPKEDSSA

SEQ ID NO: 69980 - DNA, 1752 bp, Arabidopsis thaliana
  misc_feature (1)..(1752): Ceres Seq. ID no. 2124700
  misc_feature: MA Experiment ID: 20000173 Result: Down-regulated in Transcription
  misc_feature: MA Experiment 20000173 PARAMETER Experiment Name: At_42deg_Heat_P Parameter: Age (day) Value: 14
  misc_feature: MA Experiment 20000173 PARAMETER Experiment Name: At_42deg_Heat_P Parameter: Organism Value: A. thaliana
  misc_feature: MA Experiment 20000173 PARAMETER Experiment Name: At_42deg_Heat_P Parameter: Plant Line Value: WS
  misc_feature: MA Experiment 20000173 PARAMETER Experiment Name: At_42deg_Heat_P Parameter: Temperature (deg C) Value: 42 vs. 22
  misc_feature: MA Experiment 20000173 PARAMETER Experiment Name: At_42deg_Heat_P Parameter: Timepoint (hr) Value: 6
  misc_feature: MA Experiment 20000173 PARAMETER Experiment Name: At_42deg_Heat_P Parameter: Tissue Value: Aerial
  misc_feature: MA Experiment ID: 20000180 Result: Up-regulated in Transcription
  misc_feature: MA Experiment 20000180 PARAMETER Experiment Name: At_Germinating_Seeds_P Parameter: Age (hr) Value: 24 vs. 0
  misc_feature: MA Experiment 20000180 PARAMETER Experiment Name: At_Germinating_Seeds_P Parameter: Tissue Value: Germinating Seeds
  misc_feature: MA Experiment ID: 20000794 Result: Up-regulated in Transcription
  misc_feature: MA Experiment 20000794 PARAMETER Experiment Name: At_Petals_P Parameter: Age (day) Value: 23-25 days
  misc_feature: MA Experiment 20000794 PARAMETER Experiment Name: At_Petals_P Parameter: Plant Line Value: WS
  misc_feature: MA Experiment 20000794 PARAMETER Experiment Name: At_Petals_P Parameter: Tissue Value: Petals vs. Whole plant
atggtgaattcgaatgaagaagacgaaaggagaattcttgacgttgaagaatctcttcttacacaggaggaagtgaacaatcacttgaccggattgtcttctacagctgaagatggttctattgacatttatggaaacccaccatcgaagaagaagacaggaaactggaaagcttgtccctttattcttggaaacgaatgttgtgagagattagcttactatggaattgccaagaatctaatcacttactacacaagtgaattacacgagtccaatgtttctgcagctagtgacgttatgatttggcaaggaacttgctatatcacacctctcattggagctgttatagctgattcttactggggaagatactggaccattgcttctttctctgctatttatttcattggaatggctttgttgacactctcggcttcacttccggttttaaagccagcggcatgtgctggcgttgctgcggctctatgctcaccagcaacaacggttcagtatgcggttttctttacagggctttaccttattgctcttggtactggaggtatcaaaccatgtgtatcatcttttggtgctgatcagtttgatgatactgacccgagggaacgagttagaaaagcttctttctttaactggttttacttctccatcaacattggttcatttatctcatccactttgttagtttgggttcaagaaaatgtcgggtggggactcggtttcttgattcccaccgtgtttatgggagtctctattgcgagtttcttcattggaactccgctttatcggtttcagaaaccgggaggtagtccgattactagagtttgccaagttcttgtagctgcataccgtaaattgaagcttaatctccctgaagatatctcatttctgtatgaaacacgagagaaaaactccatgattgctggaagcaggaagattcaacacactgacgctgctgttatctcagaatatgaatctaaatccggtgctttttccaacccatggaagctatgtactgtaactcaagtcgaagaagttaagactctaatccgtatgtttccaatctgggcctcggggatcgtctactcggtcctatattcacagatttccactctattcgtgcaacaaggacggtccatgaaccgaataatccgttctttcgagatccctcctgcttcattcggggttttcgacacacttatcgtgctcatatccatcccaatatatgaccgtttcctcgtaccctttgtaagacggttcacagggataccaaaagggttaactgatctgcagcgaatgggcattggtctttttctctctgtcctaagcattgcagctgcagctattgttgagacagtgcggttgcagcttgctcaagactttgttgcaatgagcatattttggcagatccctcagtacatactaatgggaatagcagaggtctttttcttcattggtcgagttgagtttttctatgatgaatctcctgatgcaatgagaagtgtatgcagcgctttggcactactcaataccgcagtcggaagctacctgagctcgttgatcctcactcttgtggcgtatttcacagctcttggaggtaaagatggttgggttccagacgaccttaataaaggacatcttgactacttcttctggcttttggtctctcttggacttgtcaacattcctgtttatgccttgatttgtgttaagcacacaaagaagaaggctttgtaa

SEQ ID NO: 69981 - protein, 583 aa, Arabidopsis thaliana
  peptide (1)..(583): Ceres Seq. ID no. 2124701
  misc_feature (124)..(516): Pfam Name: POT family Pfam Description: POT family
  misc_feature (1)..(583): Homolog of NCBI NO: 30696666 NR Description: oligopeptide transporter -related [Arabidopsis >gi|16604436|gb|AAL24224.1| At1g62200/F19K23_13 [Arabidopsis
  misc_feature (19)..(583): Homolog of NCBI NO: 25404366 NR Description: hypothetical protein F19K23.13 [imported] - thaliana >gi|2160144|gb|AAB60766.1| Strong similarity to
  misc_feature (7)..(582): Homolog of NCBI NO: 15226861 NR Description: histidine transport protein (PTR2-B); protein id: supported by cDNA: gi_13937184, supported by cDNA: gi_633939
  misc_feature (7)..(582): Homolog of NCBI NO: 1076331 NR Description: histidine transport protein - Arabidopsis thaliana
  misc_feature (7)..(298): Homolog of NCBI NO: 15226856 NR Description: putative peptide/amino acid transporter; protein At2g02020.1 [Arabidopsis thaliana] >gi|25410951|pir||A84432
  misc_feature (311)..(581): Homolog of NCBI NO: 15226856 NR Description: putative peptide/amino acid transporter; protein At2g02020.1 [Arabidopsis thaliana] >gi|25410951|pir||A84432
  misc_feature (38)..(582): Homolog of NCBI NO: 4102839 NR Description: LeOPT1 [Lycopersicon esculentum]
  misc_feature (2)..(582): Homolog of NCBI NO: 31088360 NR Description: peptide transporter 1 [Vicia faba]
  misc_feature (1)..(582): Homolog of NCBI NO: 15076661 NR Description: peptide transporter [Oryza sativa (japonica >gi|15076663|dbj|BAB62327.1| peptide transporter [Oryza sativa
  misc_feature (7)..(555): Homolog of NCBI NO: 6635838 NR Description: amino acid/peptide transporter [Prunus dulcis]
MVNSNEEDERRILDVEESLLTQEEVNNHLTGLSSTAEDGSIDIYGNPPSKKKTGNWKACPFILGNECCERLAYYGIAKNLITYYTSELHESNVSAASDVMIWQGTCYITPLIGAVIADSYWGRYWTIASFSAIYFIGMALLTLSASLPVLKPAACAGVAAALCSPATTVQYAVFFTGLYLIALGTGGIKPCVSSFGADQFDDTDPRERVRKASFFNWFYFSINIGSFISSTLLVWVQENVGWGLGFLIPTVFMGVSIASFFIGTPLYRFQKPGGSPITRVCQVLVAAYRKLKLNLPEDISFLYETREKNSMIAGSRKIQHTDAAVISEYESKSGAFSNPWKLCTVTQVEEVKTLIRMFPIWASGIVYSVLYSQISTLFVQQGRSMNRIIRSFEIPPASFGVFDTLIVLISIPIYDRFLVPFVRRFTGIPKGLTDLQRMGIGLFLSVLSIAAAAIVETVRLQLAQDFVAMSIFWQIPQYILMGIAEVFFFIGRVEFFYDESPDAMRSVCSALALLNTAVGSYLSSLILTLVAYFTALGGKDGWVPDDLNKGHLDYFFWLLVSLGLVNIPVYALICVKHTKKKAL

SEQ ID NO: 69982 - protein, 484 aa, Arabidopsis thaliana
  peptide (1)..(484): Ceres Seq. ID no. 2124702
  misc_feature (25)..(417): Pfam Name: POT family Pfam Description: POT family
  misc_feature (1)..(484): Homolog of NCBI NO: 30696666 NR Description: oligopeptide transporter -related [Arabidopsis >gi|16604436|gb|AAL24224.1| At1g62200/F19K23_13 [Arabidopsis
  misc_feature (1)..(484): Homolog of NCBI NO: 25404366 NR Description: hypothetical protein F19K23.13 [imported] - thaliana >gi|2160144|gb|AAB60766.1| Strong similarity to
  misc_feature (1)..(483): Homolog of NCBI NO: 15226861 NR Description: histidine transport protein (PTR2-B); protein id: supported by cDNA: gi_13937184, supported by cDNA: gi_633939
  misc_feature (1)..(483): Homolog of NCBI NO: 1076331 NR Description: histidine transport protein - Arabidopsis thaliana
  misc_feature (1)..(199): Homolog of NCBI NO: 15226856 NR Description: putative peptide/amino acid transporter; protein At2g02020.1 [Arabidopsis thaliana] >gi|25410951|pir||A84432
  misc_feature (212)..(482): Homolog of NCBI NO: 15226856 NR Description: putative peptide/amino acid transporter; protein At2g02020.1 [Arabidopsis thaliana] >gi|25410951|pir||A84432
  misc_feature (1)..(483): Homolog of NCBI NO: 4102839 NR Description: LeOPT1 [Lycopersicon esculentum]
  misc_feature (1)..(483): Homolog of NCBI NO: 31088360 NR Description: peptide transporter 1 [Vicia faba]
  misc_feature (1)..(483): Homolog of NCBI NO: 15076661 NR Description: peptide transporter [Oryza sativa (japonica >gi|15076663|dbj|BAB62327.1| peptide transporter [Oryza sativa
  misc_feature (1)..(456): Homolog of NCBI NO: 6635838 NR Description: amino acid/peptide transporter [Prunus dulcis]
MIWQGTCYITPLIGAVIADSYWGRYWTIASFSAIYFIGMALLTLSASLPVLKPAACAGVAAALCSPATTVQYAVFFTGLYLIALGTGGIKPCVSSFGADQFDDTDPRERVRKASFFNWFYFSINIGSFISSTLLVWVQENVGWGLGFLIPTVFMGVSIASFFIGTPLYRFQKPGGSPITRVCQVLVAAYRKLKLNLPEDISFLYETREKNSMIAGSRKIQHTDAAVISEYESKSGAFSNPWKLCTVTQVEEVKTLIRMFPIWASGIVYSVLYSQISTLFVQQGRSMNRIIRSFEIPPASFGVFDTLIVLISIPIYDRFLVPFVRRFTGIPKGLTDLQRMGIGLFLSVLSIAAAAIVETVRLQLAQDFVAMSIFWQIPQYILMGIAEVFFFIGRVEFFYDESPDAMRSVCSALALLNTAVGSYLSSLILTLVAYFTALGGKDGWVPDDLNKGHLDYFFWLLVSLGLVNIPVYALICVKHTKKKAL

SEQ ID NO: 69983 - protein, 446 aa, Arabidopsis thaliana
  peptide (1)..(446): Ceres Seq. ID no. 2124703
  misc_feature (1)..(379): Pfam Name: POT family Pfam Description: POT family
  misc_feature (1)..(446): Homolog of NCBI NO: 30696666 NR Description: oligopeptide transporter -related [Arabidopsis >gi|16604436|gb|AAL24224.1| At1g62200/F19K23_13 [Arabidopsis
  misc_feature (1)..(446): Homolog of NCBI NO: 25404366 NR Description: hypothetical protein F19K23.13 [imported] - thaliana >gi|2160144|gb|AAB60766.1| Strong similarity to
  misc_feature (1)..(445): Homolog of NCBI NO: 15226861 NR Description: histidine transport protein (PTR2-B); protein id: supported by cDNA: gi_13937184, supported by cDNA: gi_633939
  misc_feature (1)..(445): Homolog of NCBI NO: 1076331 NR Description: histidine transport protein - Arabidopsis thaliana
  misc_feature (1)..(161): Homolog of NCBI NO: 15226856 NR Description: putative peptide/amino acid transporter; protein At2g02020.1 [Arabidopsis thaliana] >gi|25410951|pir||A84432
  misc_feature (174)..(444): Homolog of NCBI NO: 15226856 NR Description: putative peptide/amino acid transporter; protein At2g02020.1 [Arabidopsis thaliana] >gi|25410951|pir||A84432
  misc_feature (1)..(445): Homolog of NCBI NO: 4102839 NR Description: LeOPT1 [Lycopersicon esculentum]
  misc_feature (1)..(445): Homolog of NCBI NO: 31088360 NR Description: peptide transporter 1 [Vicia faba]
  misc_feature (1)..(445): Homolog of NCBI NO: 15076661 NR Description: peptide transporter [Oryza sativa (japonica >gi|15076663|dbj|BAB62327.1| peptide transporter [Oryza sativa
  misc_feature (1)..(418): Homolog of NCBI NO: 6635838 NR Description: amino acid/peptide transporter [Prunus dulcis]
MALLTLSASLPVLKPAACAGVAAALCSPATTVQYAVFFTGLYLIALGTGGIKPCVSSFGADQFDDTDPRERVRKASFFNWFYFSINIGSFISSTLLVWVQENVGWGLGFLIPTVFMGVSIASFFIGTPLYRFQKPGGSPITRVCQVLVAAYRKLKLNLPEDISFLYETREKNSMIAGSRKIQHTDAAVISEYESKSGAFSNPWKLCTVTQVEEVKTLIRMFPIWASGIVYSVLYSQISTLFVQQGRSMNRIIRSFEIPPASFGVFDTLIVLISIPIYDRFLVPFVRRFTGIPKGLTDLQRMGIGLFLSVLSIAAAAIVETVRLQLAQDFVAMSIFWQIPQYILMGIAEVFFFIGRVEFFYDESPDAMRSVCSALALLNTAVGSYLSSLILTLVAYFTALGGKDGWVPDDLNKGHLDYFFWLLVSLGLVNIPVYALICVKHTKKKAL

SEQ ID NO: 69984 - DNA, 1605 bp, Arabidopsis thaliana
  misc_feature (1)..(1605): Ceres Seq. ID no. 2126383
  misc_feature: MA Experiment ID: 20000171 Result: Down-regulated in Transcription
  misc_feature: MA Experiment 20000171 PARAMETER Experiment Name: At_42deg_Heat_P Parameter: Age (day) Value: 14
  misc_feature: MA Experiment 20000171 PARAMETER Experiment Name: At_42deg_Heat_P Parameter: Organism Value: A. thaliana
  misc_feature: MA Experiment 20000171 PARAMETER Experiment Name: At_42deg_Heat_P Parameter: Plant Line Value: WS
  misc_feature: MA Experiment 20000171 PARAMETER Experiment Name: At_42deg_Heat_P Parameter: Temperature (deg C) Value: 42 vs. 22
  misc_feature: MA Experiment 20000171 PARAMETER Experiment Name: At_42deg_Heat_P Parameter: Timepoint (hr) Value: 1
  misc_feature: MA Experiment 20000171 PARAMETER Experiment Name: At_42deg_Heat_P Parameter: Tissue Value: Aerial
  misc_feature: MA Experiment ID: 20000173 Result: Down-regulated in Transcription
  misc_feature: MA Experiment 20000173 PARAMETER Experiment Name: At_42deg_Heat_P Parameter: Age (day) Value: 14
  misc_feature: MA Experiment 20000173 PARAMETER Experiment Name: At_42deg_Heat_P Parameter: Organism Value: A. thaliana
  misc_feature: MA Experiment 20000173 PARAMETER Experiment Name: At_42deg_Heat_P Parameter: Plant Line Value: WS
  misc_feature: MA Experiment 20000173 PARAMETER Experiment Name: At_42deg_Heat_P Parameter: Temperature (deg C) Value: 42 vs. 22
  misc_feature: MA Experiment 20000173 PARAMETER Experiment Name: At_42deg_Heat_P Parameter: Timepoint (hr) Value: 6
  misc_feature: MA Experiment 20000173 PARAMETER Experiment Name: At_42deg_Heat_P Parameter: Tissue Value: Aerial
  misc_feature: MA Experiment ID: 20000180 Result: Up-regulated in Transcription
  misc_feature: MA Experiment 20000180 PARAMETER Experiment Name: At_Germinating_Seeds_P Parameter: Age (hr) Value: 24 vs. 0
  misc_feature: MA Experiment 20000180 PARAMETER Experiment Name: At_Germinating_Seeds_P Parameter: Tissue Value: Germinating Seeds
  misc_feature: MA Experiment ID: 20000182 Result: Up-regulated in Transcription
  misc_feature: MA Experiment 20000182 PARAMETER Experiment Name: At_2mM_SA_P Parameter: Age (day) Value: 14
  misc_feature: MA Experiment 20000182 PARAMETER Experiment Name: At_2mM_SA_P Parameter: Organism Value: A. thaliana
  misc_feature: MA Experiment 20000182 PARAMETER Experiment Name: At_2mM_SA_P Parameter: Plant Line Value: WS
  misc_feature: MA Experiment 20000182 PARAMETER Experiment Name: At_2mM_SA_P Parameter: Timepoint (hr) Value: 6
  misc_feature: MA Experiment 20000182 PARAMETER Experiment Name: At_2mM_SA_P Parameter: Tissue Value: Aerial
  misc_feature: MA Experiment 20000182 PARAMETER Experiment Name: At_2mM_SA_P Parameter: Treatment Value: 2mM SA vs. No Treatment
  misc_feature: MA Experiment ID: 20000185 Result: Up-regulated in Transcription
  misc_feature: MA Experiment 20000185 PARAMETER Experiment Name: At_Roots__P Parameter: Age (day) Value: 7 vs. 21
  misc_feature: MA Experiment 20000185 PARAMETER Experiment Name: At_Roots__P Parameter: Organism Value: A. thaliana
  misc_feature: MA Experiment 20000185 PARAMETER Experiment Name: At_Roots__P Parameter: Tissue Value: Roots vs. Whole Plant
  misc_feature: MA Experiment ID: 20000234 Result: Down-regulated in Transcription
  misc_feature: MA Experiment 20000234 PARAMETER Experiment Name: At_Siliques_P Parameter: Age (day) Value: 21
  misc_feature: MA Experiment 20000234 PARAMETER Experiment Name: At_Siliques_P Parameter: Organism Value: A. thaliana
  misc_feature: MA Experiment 20000234 PARAMETER Experiment Name: At_Siliques_P Parameter: Plant Line Value: WS
  misc_feature: MA Experiment 20000234 PARAMETER Experiment Name: At_Siliques_P Parameter: Tissue Value: Less Than 5mm Siliques vs. Whole Plant
  misc_feature: MA Experiment ID: 20000235 Result: Down-regulated in Transcription
  misc_feature: MA Experiment 20000235 PARAMETER Experiment Name: At_Siliques_P Parameter: Age (day) Value: 21
  misc_feature: MA Experiment 20000235 PARAMETER Experiment Name: At_Siliques_P Parameter: Organism Value: A. thaliana
  misc_feature: MA Experiment 20000235 PARAMETER Experiment Name: At_Siliques_P Parameter: Plant Line Value: WS
  misc_feature: MA Experiment 20000235 PARAMETER Experiment Name: At_Siliques_P Parameter: Tissue Value: 5-10mm Siliques vs. Whole Plant
  misc_feature: MA Experiment ID: 20000264 Result: Down-regulated in Transcription
  misc_feature: MA Experiment 20000264 PARAMETER Experiment Name: At_Open_Flower_P Parameter: Age (day) Value: 21
  misc_feature: MA Experiment 20000264 PARAMETER Experiment Name: At_Open_Flower_P Parameter: Plant Line Value: WS
  misc_feature: MA Experiment 20000264 PARAMETER Experiment Name: At_Open_Flower_P Parameter: Tissue Value: Open Flower vs. Whole Plant
  misc_feature: MA Experiment ID: 20000438 Result: Up-regulated in Transcription
  misc_feature: MA Experiment 20000438 PARAMETER Experiment Name: At_Shoots__P Parameter: Age (day) Value: 14
  misc_feature: MA Experiment 20000438 PARAMETER Experiment Name: At_Shoots__P Parameter: Tissue Value: Shoots vs. Whole Plant
  misc_feature: MA Experiment ID: 20000439 Result: Up-regulated in Transcription
  misc_feature: MA Experiment 20000439 PARAMETER Experiment Name: At_Roots__P Parameter: Age (day) Value: 14 vs. 21
  misc_feature: MA Experiment 20000439 PARAMETER Experiment Name: At_Roots__P Parameter: Organism Value: A. thaliana
  misc_feature: MA Experiment 20000439 PARAMETER Experiment Name: At_Roots__P Parameter: Tissue Value: Roots vs. Whole Plant
  misc_feature: MA Experiment ID: 20001247 Result: Up-regulated in Transcription
  misc_feature: MA Experiment 20001247 PARAMETER Experiment Name: At_Far-red-induction_P Parameter: Age (day) Value: 7
  misc_feature: MA Experiment 20001247 PARAMETER Experiment Name: At_Far-red-induction_P Parameter: Light Value: Far-red vs. White
  misc_feature: MA Experiment 20001247 PARAMETER Experiment Name: At_Far-red-induction_P Parameter: Organism Value: A. thaliana
  misc_feature: MA Experiment 20001247 PARAMETER Experiment Name: At_Far-red-induction_P Parameter: Plant Line Value: Columbia
  misc_feature: MA Experiment 20001247 PARAMETER Experiment Name: At_Far-red-induction_P Parameter: Timepoint (hr) Value: 1
  misc_feature: MA Experiment 20001247 PARAMETER Experiment Name: At_Far-red-induction_P Parameter: Tissue Value: Whole Plant
  misc_feature: MA Experiment ID: 20001451 Result: Up-regulated in Transcription
  misc_feature: MA Experiment 20001451 PARAMETER Experiment Name: At_Far-red-induction_P Parameter: Age (day) Value: 7
  misc_feature: MA Experiment 20001451 PARAMETER Experiment Name: At_Far-red-induction_P Parameter: Light Value: Far-red vs. White
  misc_feature: MA Experiment 20001451 PARAMETER Experiment Name: At_Far-red-induction_P Parameter: Organism Value: A. thaliana
  misc_feature: MA Experiment 20001451 PARAMETER Experiment Name: At_Far-red-induction_P Parameter: Plant Line Value: Columbia
  misc_feature: MA Experiment 20001451 PARAMETER Experiment Name: At_Far-red-induction_P Parameter: Timepoint (hr) Value: 24
  misc_feature: MA Experiment 20001451 PARAMETER Experiment Name: At_Far-red-induction_P Parameter: Tissue Value: Whole Plant
  misc_feature: MA Experiment ID: 20001554 Result: Down-regulated in Transcription
  misc_feature: MA Experiment 20001554 PARAMETER Experiment Name: At_Drought_Soil_Dry_P Parameter: Age (day) Value: 21
  misc_feature: MA Experiment 20001554 PARAMETER Experiment Name: At_Drought_Soil_Dry_P Parameter: Organism Value: A. thaliana
  misc_feature: MA Experiment 20001554 PARAMETER Experiment Name: At_Drought_Soil_Dry_P Parameter: Plant Line Value: WS
  misc_feature: MA Experiment 20001554 PARAMETER Experiment Name: At_Drought_Soil_Dry_P Parameter: Post Timepoint (hr) Value: None
  misc_feature: MA Experiment 20001554 PARAMETER Experiment Name: At_Drought_Soil_Dry_P Parameter: Post-Treatment Value: None
  misc_feature: MA Experiment 20001554 PARAMETER Experiment Name: At_Drought_Soil_Dry_P Parameter: Timepoint (day) Value: 7
  misc_feature: MA Experiment 20001554 PARAMETER Experiment Name: At_Drought_Soil_Dry_P Parameter: Treatment Value: Drought vs. No Drought
  misc_feature: MA Experiment ID: 20001555 Result: Down-regulated in Transcription
  misc_feature: MA Experiment 20001555 PARAMETER Experiment Name: At_Drought_Soil_Dry_P Parameter: Age (day) Value: 24
  misc_feature: MA Experiment 20001555 PARAMETER Experiment Name: At_Drought_Soil_Dry_P Parameter: Organism Value: A. thaliana
  misc_feature: MA Experiment 20001555 PARAMETER Experiment Name: At_Drought_Soil_Dry_P Parameter: Plant Line Value: WS
  misc_feature: MA Experiment 20001555 PARAMETER Experiment Name: At_Drought_Soil_Dry_P Parameter: Post Timepoint (hr) Value: None
  misc_feature: MA Experiment 20001555 PARAMETER Experiment Name: At_Drought_Soil_Dry_P Parameter: Post-Treatment Value: None
  misc_feature: MA Experiment 20001555 PARAMETER Experiment Name: At_Drought_Soil_Dry_P Parameter: Timepoint (day) Value: 10
  misc_feature: MA Experiment 20001555 PARAMETER Experiment Name: At_Drought_Soil_Dry_P Parameter: Treatment Value: Drought vs. No Drought
  misc_feature: MA Experiment ID: 20001556 Result: Down-regulated in Transcription
  misc_feature: MA Experiment 20001556 PARAMETER Experiment Name: At_Drought_Soil_Dry_P Parameter: Age (day) Value: 26
  misc_feature: MA Experiment 20001556 PARAMETER Experiment Name: At_Drought_Soil_Dry_P Parameter: Organism Value: A. thaliana
  misc_feature: MA Experiment 20001556 PARAMETER Experiment Name: At_Drought_Soil_Dry_P Parameter: Plant Line Value: WS
  misc_feature: MA Experiment 20001556 PARAMETER Experiment Name: At_Drought_Soil_Dry_P Parameter: Post Timepoint (hr) Value: None
  misc_feature: MA Experiment 20001556 PARAMETER Experiment Name: At_Drought_Soil_Dry_P Parameter: Post-Treatment Value: None
  misc_feature: MA Experiment 20001556 PARAMETER Experiment Name: At_Drought_Soil_Dry_P Parameter: Timepoint (day) Value: 12
  misc_feature: MA Experiment 20001556 PARAMETER Experiment Name: At_Drought_Soil_Dry_P Parameter: Treatment Value: Drought vs. No Drought
  misc_feature: MA Experiment ID: 20001557 Result: Down-regulated in Transcription
  misc_feature: MA Experiment 20001557 PARAMETER Experiment Name: At_Drought_Soil_Dry_P Parameter: Age (day) Value: 27
  misc_feature: MA Experiment 20001557 PARAMETER Experiment Name: At_Drought_Soil_Dry_P Parameter: Organism Value: A. thaliana
  misc_feature: MA Experiment 20001557 PARAMETER Experiment Name: At_Drought_Soil_Dry_P Parameter: Plant Line Value: WS
  misc_feature: MA Experiment 20001557 PARAMETER Experiment Name: At_Drought_Soil_Dry_P Parameter: Post Timepoint (hr) Value: 3
  misc_feature: MA Experiment 20001557 PARAMETER Experiment Name: At_Drought_Soil_Dry_P Parameter: Post-Treatment Value: Re-Water vs. No Drought
  misc_feature: MA Experiment 20001557 PARAMETER Experiment Name: At_Drought_Soil_Dry_P Parameter: Timepoint (day) Value: 13
  misc_feature: MA Experiment 20001557 PARAMETER Experiment Name: At_Drought_Soil_Dry_P Parameter: Treatment Value: Drought vs. No Drought
  misc_feature: MA Experiment ID: 20001560 Result: Down-regulated in Transcription
  misc_feature: MA Experiment 20001560 PARAMETER Experiment Name: At_Drought_Soil_Dry_P Parameter: Age (day) Value: 28
  misc_feature: MA Experiment 20001560 PARAMETER Experiment Name: At_Drought_Soil_Dry_P Parameter: Organism Value: A. thaliana
  misc_feature: MA Experiment 20001560 PARAMETER Experiment Name: At_Drought_Soil_Dry_P Parameter: Plant Line Value: WS
  misc_feature: MA Experiment 20001560 PARAMETER Experiment Name: At_Drought_Soil_Dry_P Parameter: Post Timepoint (hr) Value: None
  misc_feature: MA Experiment 20001560 PARAMETER Experiment Name: At_Drought_Soil_Dry_P Parameter: Post-Treatment Value: None
  misc_feature: MA Experiment 20001560 PARAMETER Experiment Name: At_Drought_Soil_Dry_P Parameter: Timepoint (day) Value: 14
  misc_feature: MA Experiment 20001560 PARAMETER Experiment Name: At_Drought_Soil_Dry_P Parameter: Treatment Value: Drought vs. No Drought
  misc_feature: MA Experiment ID: 20001906 Result: Down-regulated in Transcription
  misc_feature: MA Experiment 20001906 PARAMETER Experiment Name: At_Drought_Reproduction_P Parameter: Age (day) Value: 35
  misc_feature: MA Experiment 20001906 PARAMETER Experiment Name: At_Drought_Reproduction_P Parameter: Organism Value: A. thaliana
  misc_feature: MA Experiment 20001906 PARAMETER Experiment Name: At_Drought_Reproduction_P Parameter: Plant Line Value: WS
  misc_feature: MA Experiment 20001906 PARAMETER Experiment Name: At_Drought_Reproduction_P Parameter: Timepoint (day) Value: 5
  misc_feature: MA Experiment 20001906 PARAMETER Experiment Name: At_Drought_Reproduction_P Parameter: Tissue Value: Siliques
  misc_feature: MA Experiment 20001906 PARAMETER Experiment Name: At_Drought_Reproduction_P Parameter: Treatment Value: Drought vs. No Drought
atggtgaaacccttaggagaaggaacaagagatgtctctaatgttggttgtaaatcagttgatctcctcctagcttctcttggtggtcttgccgccgctgtagcagctgcttacgccggagaattactccttcgacgccggaaacttgatcaaggtgcttccatggggtataaagatgtcaaaatcgcccctttgattgagaggaaagactcaggtcgacgatcaaacctagagagattctcccactatgttgcaaggcagctcggatttgaggatccaaatgaatacccacaactatgcaaattagcaaatggatatttgttgaaaacaaaagggtatgatgagaatgtggatgagtatttggagaatgaagctgagcgtgattctctctatgttcatctccttgaagaatttgatagatgcattctcacttatttttctttcaattggacccaatcttccaacctcatctctcaggctttaagcgatgagtcggatcagaaagttccaaaactcaaggatttcgtgatggcagcaacaaggaaacagaggtttgagagagtaacaaaagatctcaaggtgaaaagggtaatttcgacattagtagaagagatgagagtcattgggagcggaagcagtgagccacactgtacggaagtaatgtctccggtggctcataacaaacgaagtcccgtccttctccttatgggcggaggaatgggcgcaggaaagagcaccgtcctcaaagatatcttcctagagtcgttttggtcggaggcacaggccgacgcggtggttatagaggcagacgcgtttaaggagacggatgtaatttatagagctcttagctctagaggtcaccacgatgatatgcttcaaactgctgaattggttcatcaatcatcaacggatgctgcatcgtccttactagtaacagcattgaacgacggacgtgatgtgataatggatggaacattgtcatgggagccattcgtcgaacaaatgatcgaaatggcaagaaacgtccacaaacaaaaatatcgaatgggcgaaggctacaaggtgtccgaagaggggacgataaccgaaaaatattgggaagaagaagaagaagaaacgaaagaaaatggcaaacaacaaaatctgaaaccttacagaatcgagctggtcggtgtggtttgtgacgcttatcttgccgtagcaagaggcatacggagagctctaatggtgaagagagcagtgagagtgaaaccacaattgaattcacacaagagatttgctaatgcattcccaaagtattgtgagcttgttgataacgctaggctttattgcaccaatgctgttggtggtcctccaaggcttatagcgtggaaagacggaaatagtaagcttctggtggatccagaggatattgattgtctaaaacgggtcagcagtctcaacccggatgcagaatccatttacgagctttatccggatccaagccaattaagcaaacccggttctgtttggaatgatgttgtgttagttccatcgaggcccaaggtccagaaggaacttagcgatgcaatcaggagaatcgaaaaggcccaaccaaaaaattga

SEQ ID NO: 69985 - protein, 534 aa, Arabidopsis thaliana
  peptide (1)..(534): Ceres Seq. ID no. 2126384
  misc_feature (10)..(534): Homolog of NCBI NO: 99733 NR Description: hypothetical protein H1flk - Arabidopsis thaliana
  misc_feature (55)..(534): Homolog of NCBI NO: 15219698 NR Description: unknown protein; protein id: At1g04280.1
  misc_feature (58)..(529): Homolog of NCBI NO: 15222183 NR Description: unknown protein; protein id: At1g06750.1
  misc_feature (68)..(529): Homolog of NCBI NO: 15224537 NR Description: unknown protein; protein id: At2g30630.1
  misc_feature (68)..(529): Homolog of NCBI NO: 28207050 NR Description: hypothetical protein [Arabidopsis thaliana]
  misc_feature (159)..(529): Homolog of NCBI NO: 28207052 NR Description: hypothetical protein [Arabidopsis thaliana]
  misc_feature (68)..(202): Homolog of NCBI NO: 28207052 NR Description: hypothetical protein [Arabidopsis thaliana]
  misc_feature (248)..(532): Homolog of NCBI NO: 34909990 NR Description: P0490D09.19 [Oryza sativa (japonica
  misc_feature (86)..(181): Homolog of NCBI NO: 34909990 NR Description: P0490D09.19 [Oryza sativa (japonica
  misc_feature (263)..(529): Homolog of NCBI NO: 1076336 NR Description: hypothetical protein H1.1flk - Arabidopsis
MVKPLGEGTRDVSNVGCKSVDLLLASLGGLAAAVAAAYAGELLLRRRKLDQGASMGYKDVKIAPLIERKDSGRRSNLERFSHYVARQLGFEDPNEYPQLCKLANGYLLKTKGYDENVDEYLENEAERDSLYVHLLEEFDRCILTYFSFNWTQSSNLISQALSDESDQKVPKLKDFVMAATRKQRFERVTKDLKVKRVISTLVEEMRVIGSGSSEPHCTEVMSPVAHNKRSPVLLLMGGGMGAGKSTVLKDIFLESFWSEAQADAVVIEADAFKETDVIYRALSSRGHHDDMLQTAELVHQSSTDAASSLLVTALNDGRDVIMDGTLSWEPFVEQMIEMARNVHKQKYRMGEGYKVSEEGTITEKYWEEEEEETKENGKQQNLKPYRIELVGVVCDAYLAVARGIRRALMVKRAVRVKPQLNSHKRFANAFPKYCELVDNARLYCTNAVGGPPRLIAWKDGNSKLLVDPEDIDCLKRVSSLNPDAESIYELYPDPSQLSKPGSVWNDVVLVPSRPKVQKELSDAIRRIEKAQPKN

SEQ ID NO: 69986 - protein, 480 aa, Arabidopsis thaliana
  peptide (1)..(480): Ceres Seq. ID no. 2126385
  misc_feature (1)..(480): Homolog of NCBI NO: 99733 NR Description: hypothetical protein H1flk - Arabidopsis thaliana
  misc_feature (1)..(480): Homolog of NCBI NO: 15219698 NR Description: unknown protein; protein id: At1g04280.1
  misc_feature (4)..(475): Homolog of NCBI NO: 15222183 NR Description: unknown protein; protein id: At1g06750.1
  misc_feature (14)..(475): Homolog of NCBI NO: 15224537 NR Description: unknown protein; protein id: At2g30630.1
  misc_feature (14)..(475): Homolog of NCBI NO: 28207050 NR Description: hypothetical protein [Arabidopsis thaliana]
  misc_feature (105)..(475): Homolog of NCBI NO: 28207052 NR Description: hypothetical protein [Arabidopsis thaliana]
  misc_feature (14)..(148): Homolog of NCBI NO: 28207052 NR Description: hypothetical protein [Arabidopsis thaliana]
  misc_feature (194)..(478): Homolog of NCBI NO: 34909990 NR Description: P0490D09.19 [Oryza sativa (japonica
  misc_feature (32)..(127): Homolog of NCBI NO: 34909990 NR Description: P0490D09.19 [Oryza sativa (japonica
  misc_feature (209)..(475): Homolog of NCBI NO: 1076336 NR Description: hypothetical protein H1.1flk - Arabidopsis
MGYKDVKIAPLIERKDSGRRSNLERFSHYVARQLGFEDPNEYPQLCKLANGYLLKTKGYDENVDEYLENEAERDSLYVHLLEEFDRCILTYFSFNWTQSSNLISQALSDESDQKVPKLKDFVMAATRKQRFERVTKDLKVKRVISTLVEEMRVIGSGSSEPHCTEVMSPVAHNKRSPVLLLMGGGMGAGKSTVLKDIFLESFWSEAQADAVVIEADAFKETDVIYRALSSRGHHDDMLQTAELVHQSSTDAASSLLVTALNDGRDVIMDGTLSWEPFVEQMIEMARNVHKQKYRMGEGYKVSEEGTITEKYWEEEEEETKENGKQQNLKPYRIELVGVVCDAYLAVARGIRRALMVKRAVRVKPQLNSHKRFANAFPKYCELVDNARLYCTNAVGGPPRLIAWKDGNSKLLVDPEDIDCLKRVSSLNPDAESIYELYPDPSQLSKPGSVWNDVVLVPSRPKVQKELSDAIRRIEKAQPKN

SEQ ID NO: 69987 - protein, 358 aa, Arabidopsis thaliana
  peptide (1)..(358): Ceres Seq. ID no. 2126386
  misc_feature (1)..(358): Homolog of NCBI NO: 99733 NR Description: hypothetical protein H1flk - Arabidopsis thaliana
  misc_feature (1)..(358): Homolog of NCBI NO: 15219698 NR Description: unknown protein; protein id: At1g04280.1
  misc_feature (1)..(353): Homolog of NCBI NO: 15222183 NR Description: unknown protein; protein id: At1g06750.1
  misc_feature (1)..(353): Homolog of NCBI NO: 15224537 NR Description: unknown protein; protein id: At2g30630.1
  misc_feature (1)..(353): Homolog of NCBI NO: 28207050 NR Description: hypothetical protein [Arabidopsis thaliana]
  misc_feature (1)..(353): Homolog of NCBI NO: 28207052 NR Description: hypothetical protein [Arabidopsis thaliana]
  misc_feature (1)..(26): Homolog of NCBI NO: 28207052 NR Description: hypothetical protein [Arabidopsis thaliana]
  misc_feature (72)..(356): Homolog of NCBI NO: 34909990 NR Description: P0490D09.19 [Oryza sativa (japonica
  misc_feature (87)..(353): Homolog of NCBI NO: 1076336 NR Description: hypothetical protein H1.1flk - Arabidopsis
  misc_feature (88)..(353): Homolog of NCBI NO: 388260 NR Description: H1-1flk [Arabidopsis thaliana]
MAATRKQRFERVTKDLKVKRVISTLVEEMRVIGSGSSEPHCTEVMSPVAHNKRSPVLLLMGGGMGAGKSTVLKDIFLESFWSEAQADAVVIEADAFKETDVIYRALSSRGHHDDMLQTAELVHQSSTDAASSLLVTALNDGRDVIMDGTLSWEPFVEQMIEMARNVHKQKYRMGEGYKVSEEGTITEKYWEEEEEETKENGKQQNLKPYRIELVGVVCDAYLAVARGIRRALMVKRAVRVKPQLNSHKRFANAFPKYCELVDNARLYCTNAVGGPPRLIAWKDGNSKLLVDPEDIDCLKRVSSLNPDAESIYELYPDPSQLSKPGSVWNDVVLVPSRPKVQKELSDAIRRIEKAQPKN

SEQ ID NO: 69988 - DNA, 1158 bp, Arabidopsis thaliana
  misc_feature (1)..(1158): Ceres Seq. ID no. 2126439
  misc_feature: MA Experiment ID: 20000180 Result: Up-regulated in Transcription
  misc_feature: MA Experiment 20000180 PARAMETER Experiment Name: At_Germinating_Seeds_P Parameter: Age (hr) Value: 24 vs. 0
  misc_feature: MA Experiment 20000180 PARAMETER Experiment Name: At_Germinating_Seeds_P Parameter: Tissue Value: Germinating Seeds
  misc_feature: MA Experiment ID: 20001906 Result: Up-regulated in Transcription
  misc_feature: MA Experiment 20001906 PARAMETER Experiment Name: At_Drought_Reproduction_P Parameter: Age (day) Value: 35
  misc_feature: MA Experiment 20001906 PARAMETER Experiment Name: At_Drought_Reproduction_P Parameter: Organism Value: A. thaliana
  misc_feature: MA Experiment 20001906 PARAMETER Experiment Name: At_Drought_Reproduction_P Parameter: Plant Line Value: WS
  misc_feature: MA Experiment 20001906 PARAMETER Experiment Name: At_Drought_Reproduction_P Parameter: Timepoint (day) Value: 5
  misc_feature: MA Experiment 20001906 PARAMETER Experiment Name: At_Drought_Reproduction_P Parameter: Tissue Value: Siliques
  misc_feature: MA Experiment 20001906 PARAMETER Experiment Name: At_Drought_Reproduction_P Parameter: Treatment Value: Drought vs. No Drought
atgcatgatagtgaaatattcaagtttaaagacatgatgatgatgtcttgcacagttcaaacattagtacttgttccatggtttctagtagtatttgtactcgccggtggagaagactcatccgagacgacggcaatgtttccggcgatgtttgtgttcggagactctttggtggataacggaaacaataaccacttgaactcactggctaggtccaactatctcccttacggcatcgatttcgctggaaatcaaccaaccggtcgcttctctaacggcaaaactatcgtcgatttcattggagagttgctagggctgccggagataccggcgtttatggacacggttgacggaggagtggatattctccatggtgtgaactatgcctcagctgccggaggaatcttagaggaaaccggtcgccatctgggagagagatttagcatgggaagacaagtggagaacttcgagaagacattaatggagataagtaggagcatgaggaaagagtcagtgaaggaatatatggcaaagtcattggtggtggtgtcattgggtaacaatgactacattaacaattatctgaaaccaaggctattcctctcaagctctatttacgaccctacttctttcgccgacctccttctctccaacttcaccactcatctccttgaattgtatggaaaggggtttaggaaatttgtaatagccggtgtgggtccattgggttgcataccagaccaactagccgcccaagcggctctgccaggtgaatgtgtcgaggctgtaaacgagatggctgaacttttcaacaaccgtcttgtatcgctggtggatcgtctcaattccgataacaaaaccgctagtgaagccatctttgtttacggtaatacctatggagccgccgtggatattctcaccaacccatttaattacggattcgaagtgacggatagagggtgttgtggagtagggagaaatagaggagaaataacgtgtctgccattagcggtaccatgcgctttcagagaccgacatgtgttctgggatgcatttcatccaacacaagcttttaatctcataattgctctcagagcctttaatggttccaaatccgattgttaccccattaatctttctcaactttctcgtctctaa

SEQ ID NO: 69989 - protein, 385 aa, Arabidopsis thaliana
  peptide (1)..(385): Ceres Seq. ID no. 2126440
  misc_feature (50)..(366): Pfam Name: GDSL-like Lipase/Acylhydrolase Pfam Description: GDSL-like Lipase/Acylhydrolase
  misc_feature (1)..(385): Homolog of NCBI NO: 15241626 NR Description: GDSL-motif lipase acylhydrolase-like protein;
  misc_feature (45)..(385): Homolog of NCBI NO: 15224005 NR Description: putative GDSL-motif lipase/acylhydrolase; protein At1g71250.1 [Arabidopsis thaliana] >gi|25336259|pir||B96737
  misc_feature (24)..(385): Homolog of NCBI NO: 15220514 NR Description: lipase/hydrolase, putative; protein id: supported by cDNA: 23556., supported by cDNA: gi_18086454
  misc_feature (24)..(385): Homolog of NCBI NO: 21592417 NR Description: lipase/hydrolase, putative [Arabidopsis thaliana]
  misc_feature (27)..(385): Homolog of NCBI NO: 21594055 NR Description: lipase/hydrolase, putative [Arabidopsis thaliana]
  misc_feature (27)..(385): Homolog of NCBI NO: 15220512 NR Description: lipase/hydrolase, putative; protein id: supported by cDNA: 6680., supported by cDNA: gi_15215767
  misc_feature (48)..(385): Homolog of NCBI NO: 7485419 NR Description: hypothetical protein F13C5.140 - Arabidopsis >gi|2832625|emb|CAA16754.1| putative protein [Arabidopsis >gi|7268691|emb|CAB78899.1| putative protein [Arabidopsis
  misc_feature (48)..(385): Homolog of NCBI NO: 18415211 NR Description: Expressed protein; protein id: At4g18970.1, by cDNA: 42850., supported by cDNA: gi_16604576, supported by gi_21281049 [Arabidopsis thaliana] >gi|16604577|gb|AAL24090.1|
  misc_feature (23)..(385): Homolog of NCBI NO: 18417760 NR Description: putative protein; protein id: At5g15720.1, by cDNA: 118296. [Arabidopsis thaliana]
  misc_feature (48)..(385): Homolog of NCBI NO: 15242458 NR Description: GDSL-motif lipase/hydrolase-like protein; protein At5g45670.1, supported by cDNA: 18389., supported by cDNA:
MHDSEIFKFKDMMMMSCTVQTLVLVPWFLVVFVLAGGEDSSETTAMFPAMFVFGDSLVDNGNNNHLNSLARSNYLPYGIDFAGNQPTGRFSNGKTIVDFIGELLGLPEIPAFMDTVDGGVDILHGVNYASAAGGILEETGRHLGERFSMGRQVENFEKTLMEISRSMRKESVKEYMAKSLVVVSLGNNDYINNYLKPRLFLSSSIYDPTSFADLLLSNFTTHLLELYGKGFRKFVIAGVGPLGCIPDQLAAQAALPGECVEAVNEMAELFNNRLVSLVDRLNSDNKTASEAIFVYGNTYGAAVDILTNPFNYGFEVTDRGCCGVGRNRGEITCLPLAVPCAFRDRHVFWDAFHPTQAFNLIIALRAFNGSKSDCYPINLSQLSRL

SEQ ID NO: 69990 - protein, 374 aa, Arabidopsis thaliana
  peptide (1)..(374): Ceres Seq. ID no. 2126441
  misc_feature (39)..(355): Pfam Name: GDSL-like Lipase/Acylhydrolase Pfam Description: GDSL-like Lipase/Acylhydrolase
  misc_feature (13)..(374): Homolog of NCBI NO: 15220514 NR Description: lipase/hydrolase, putative; protein id: supported by cDNA: 23556., supported by cDNA: gi_18086454
  misc_feature (13)..(374): Homolog of NCBI NO: 21592417 NR Description: lipase/hydrolase, putative [Arabidopsis thaliana]
  misc_feature (16)..(374): Homolog of NCBI NO: 21594055 NR Description: lipase/hydrolase, putative [Arabidopsis thaliana]
  misc_feature (16)..(374): Homolog of NCBI NO: 15220512 NR Description: lipase/hydrolase, putative; protein id: supported by cDNA: 6680., supported by cDNA: gi_15215767
  misc_feature (1)..(374): Homolog of NCBI NO: 15241626 NR Description: GDSL-motif lipase acylhydrolase-like protein;
  misc_feature (34)..(374): Homolog of NCBI NO: 15224005 NR Description: putative GDSL-motif lipase/acylhydrolase; protein At1g71250.1 [Arabidopsis thaliana] >gi|25336259|pir||B96737
  misc_feature (37)..(374): Homolog of NCBI NO: 7485419 NR Description: hypothetical protein F13C5.140 - Arabidopsis >gi|2832625|emb|CAA16754.1| putative protein [Arabidopsis >gi|7268691|emb|CAB78899.1| putative protein [Arabidopsis
  misc_feature (37)..(374): Homolog of NCBI NO: 18415211 NR Description: Expressed protein; protein id: At4g18970.1, by cDNA: 42850., supported by cDNA: gi_16604576, supported by gi_21281049 [Arabidopsis thaliana] >gi|16604577|gb|AAL24090.1|
  misc_feature (12)..(374): Homolog of NCBI NO: 18417760 NR Description: putative protein; protein id: At5g15720.1, by cDNA: 118296. [Arabidopsis thaliana]
  misc_feature (37)..(374): Homolog of NCBI NO: 15242458 NR Description: GDSL-motif lipase/hydrolase-like protein; protein At5g45670.1, supported by cDNA: 18389., supported by cDNA:
MMMMSCTVQTLVLVPWFLVVFVLAGGEDSSETTAMFPAMFVFGDSLVDNGNNNHLNSLARSNYLPYGIDFAGNQPTGRFSNGKTIVDFIGELLGLPEIPAFMDTVDGGVDILHGVNYASAAGGILEETGRHLGERFSMGRQVENFEKTLMEISRSMRKESVKEYMAKSLVVVSLGNNDYINNYLKPRLFLSSSIYDPTSFADLLLSNFTTHLLELYGKGFRKFVIAGVGPLGCIPDQLAAQAALPGECVEAVNEMAELFNNRLVSLVDRLNSDNKTASEAIFVYGNTYGAAVDILTNPFNYGFEVTDRGCCGVGRNRGEITCLPLAVPCAFRDRHVFWDAFHPTQAFNLIIALRAFNGSKSDCYPINLSQLSRL

SEQ ID NO: 69991 - protein, 373 aa, Arabidopsis thaliana
  peptide (1)..(373): Ceres Seq. ID no. 2126442
  misc_feature (38)..(354): Pfam Name: GDSL-like Lipase/Acylhydrolase Pfam Description: GDSL-like Lipase/Acylhydrolase
  misc_feature (1)..(373): Homolog of NCBI NO: 15241626 NR Description: GDSL-motif lipase acylhydrolase-like protein;
  misc_feature (33)..(373): Homolog of NCBI NO: 15224005 NR Description: putative GDSL-motif lipase/acylhydrolase; protein At1g71250.1 [Arabidopsis thaliana] >gi|25336259|pir||B96737
  misc_feature (12)..(373): Homolog of NCBI NO: 15220514 NR Description: lipase/hydrolase, putative; protein id: supported by cDNA: 23556., supported by cDNA: gi_18086454
  misc_feature (12)..(373): Homolog of NCBI NO: 21592417 NR Description: lipase/hydrolase, putative [Arabidopsis thaliana]
  misc_feature (15)..(373): Homolog of NCBI NO: 21594055 NR Description: lipase/hydrolase, putative [Arabidopsis thaliana]
  misc_feature (15)..(373): Homolog of NCBI NO: 15220512 NR Description: lipase/hydrolase, putative; protein id: supported by cDNA: 6680., supported by cDNA: gi_15215767
  misc_feature (36)..(373): Homolog of NCBI NO: 7485419 NR Description: hypothetical protein F13C5.140 - Arabidopsis >gi|2832625|emb|CAA16754.1| putative protein [Arabidopsis >gi|7268691|emb|CAB78899.1| putative protein [Arabidopsis
  misc_feature (36)..(373): Homolog of NCBI NO: 18415211 NR Description: Expressed protein; protein id: At4g18970.1, by cDNA: 42850., supported by cDNA: gi_16604576, supported by gi_21281049 [Arabidopsis thaliana] >gi|16604577|gb|AAL24090.1|
  misc_feature (11)..(373): Homolog of NCBI NO: 18417760 NR Description: putative protein; protein id: At5g15720.1, by cDNA: 118296. [Arabidopsis thaliana]
  misc_feature (36)..(373): Homolog of NCBI NO: 15242458 NR Description: GDSL-motif lipase/hydrolase-like protein; protein At5g45670.1, supported by cDNA: 18389., supported by cDNA:
MMMSCTVQTLVLVPWFLVVFVLAGGEDSSETTAMFPAMFVFGDSLVDNGNNNHLNSLARSNYLPYGIDFAGNQPTGRFSNGKTIVDFIGELLGLPEIPAFMDTVDGGVDILHGVNYASAAGGILEETGRHLGERFSMGRQVENFEKTLMEISRSMRKESVKEYMAKSLVVVSLGNNDYINNYLKPRLFLSSSIYDPTSFADLLLSNFTTHLLELYGKGFRKFVIAGVGPLGCIPDQLAAQAALPGECVEAVNEMAELFNNRLVSLVDRLNSDNKTASEAIFVYGNTYGAAVDILTNPFNYGFEVTDRGCCGVGRNRGEITCLPLAVPCAFRDRHVFWDAFHPTQAFNLIIALRAFNGSKSDCYPINLSQLSRL

SEQ ID NO: 69992 - DNA, 1212 bp, Arabidopsis thaliana
  misc_feature (1)..(1212): Ceres Seq. ID no. 2127736
  misc_feature: MA Experiment ID: 20000307 Result: Up-regulated in Transcription
  misc_feature: MA Experiment 20000307 PARAMETER Experiment Name: At_Germinating_Seeds_Sub_P Parameter: Age (hr) Value: 24 vs. 0
  misc_feature: MA Experiment 20000307 PARAMETER Experiment Name: At_Germinating_Seeds_Sub_P Parameter: Organism Value: A. thaliana
  misc_feature: MA Experiment 20000307 PARAMETER Experiment Name: At_Germinating_Seeds_Sub_P Parameter: Plant Line Value: WS
  misc_feature: MA Experiment 20000307 PARAMETER Experiment Name: At_Germinating_Seeds_Sub_P Parameter: Tissue Value: Germinating Seeds
  misc_feature: MA Experiment ID: 20000314 Result: Up-regulated in Transcription
  misc_feature: MA Experiment 20000314 PARAMETER Experiment Name: At_14day_Shoots-Roots_Sub_P Parameter: Age (day) Value: 14
  misc_feature: MA Experiment 20000314 PARAMETER Experiment Name: At_14day_Shoots-Roots_Sub_P Parameter: Organism Value: A. thaliana
  misc_feature: MA Experiment 20000314 PARAMETER Experiment Name: At_14day_Shoots-Roots_Sub_P Parameter: Plant Line Value: WS
  misc_feature: MA Experiment 20000314 PARAMETER Experiment Name: At_14day_Shoots-Roots_Sub_P Parameter: Tissue Value: Roots vs. Whole Plant
  misc_feature: MA Experiment ID: 20000328 Result: Up-regulated in Transcription
  misc_feature: MA Experiment 20000328 PARAMETER Experiment Name: At_42deg_Heat_Sub_P Parameter: Age (day) Value: 14
  misc_feature: MA Experiment 20000328 PARAMETER Experiment Name: At_42deg_Heat_Sub_P Parameter: Organism Value: A. thaliana
  misc_feature: MA Experiment 20000328 PARAMETER Experiment Name: At_42deg_Heat_Sub_P Parameter: Plant Line Value: WS
  misc_feature: MA Experiment 20000328 PARAMETER Experiment Name: At_42deg_Heat_Sub_P Parameter: Temperature (deg C) Value: 42 vs. 22
  misc_feature: MA Experiment 20000328 PARAMETER Experiment Name: At_42deg_Heat_Sub_P Parameter: Timepoint (hr) Value: 6
  misc_feature: MA Experiment 20000328 PARAMETER Experiment Name: At_42deg_Heat_Sub_P Parameter: Tissue Value: Aerial
  misc_feature: MA Experiment ID: 20000355 Result: Down-regulated in Transcription
  misc_feature: MA Experiment 20000355 PARAMETER Experiment Name: At_Siliques_Sub_P Parameter: Age (day) Value: 21
  misc_feature: MA Experiment 20000355 PARAMETER Experiment Name: At_Siliques_Sub_P Parameter: Organism Value: A. thaliana
  misc_feature: MA Experiment 20000355 PARAMETER Experiment Name: At_Siliques_Sub_P Parameter: Plant Line Value: WS
  misc_feature: MA Experiment 20000355 PARAMETER Experiment Name: At_Siliques_Sub_P Parameter: Tissue Value: Less Than 5mm Siliques vs. Whole Plant
  misc_feature: MA Experiment ID: 20000440 Result: Down-regulated in Transcription
  misc_feature: MA Experiment 20000440 PARAMETER Experiment Name: At_Closed-Flower__Sub_P Parameter: Tissue Value: Closed Flower vs. Whole Plant
atggcaaagagagcgttgttgataggaatcaactatccaggaaccacggaggagctacaaggctgcgtcaatgacgtccatagaatgcataagtgtctcgttgaccggttcggattcgcggaggaagatatcactgtgctgattgacaccgacgaatcttacactcaacccacaggaaagaacatccgtcaggctttgtcggagctcataaagccagcaaaatccggtgacgttttattcgtgcattacagcggacacggcacgagagtcccaccggaaacaggggaagaggatgatacaggttttgatgagtgtattgttccttccgacttgaatccaattcctgatgatgatttcagggatttagtggaacaagttccagagggatgtcagataactatcgtatcagactcttgtcacagcggcgggctcattgatgaagctaaggaacagatcggagagagtaccacgacgaagccaaatcgagaatccaaagtttcttcttttgaattcgagtttaaaaactgtttgcatagcatttttgtgaaactgcttgctttttgtggaatcggaagttctcatgtagagacgcgcgagatcgtagaagtaggcgagggagatgaagttgtcagatcaaggtatctgccgttggagaggtttattgaacttctcaaacaacaaactgggcaagacaatatcgagattgggaaaatcagacccaccctttttgatgtctttggtgaagattcgagcccgaagataaagaagttcatgaaagtgattcttaccaagctaaggaaaacaaatgaccaaagtacgctacttggtaagatcgaagaaagtgctcgagggtatatagaagagacgctgaacgatgaacactacatgaaacccgcaatgcaggcacaagtgaagagcgatcgtgagatttatggaggaagatcaagcaacggattgtttcctgaccgagggattctgttgagtggatgtcaaacagatgagacatcagcagatgttaagaagaaaggagaagcgtttggagcgtttagtaatgccatccaaatggttttgtcagagactgatcataaagataagattacaaacaaggaaatggtattgagggcaagagagattctgaagaaacagatgtttattcagagaccaggattgtattgcaatgaccgctttgtgaatgctccgtttatatgctaa

SEQ ID NO: 69993 - protein, 403 aa, Arabidopsis thaliana
  peptide (1)..(403): Ceres Seq. ID no. 2127737
  misc_feature (3)..(403): Pfam Name: Caspase domain Pfam Description: Caspase domain
  misc_feature (1)..(403): Homolog of NCBI NO: 37788557 NR Description: metacaspase 7 [Arabidopsis thaliana]
  misc_feature (1)..(403): Homolog of NCBI NO: 32482818 NR Description: metacaspase 4 [Arabidopsis thaliana]
  misc_feature (1)..(403): Homolog of NCBI NO: 15219338 NR Description: hypothetical protein common family; protein id:
  misc_feature (1)..(403): Homolog of NCBI NO: 15219342 NR Description: hypothetical protein common family; protein id:
  misc_feature (1)..(403): Homolog of NCBI NO: 15219345 NR Description: hypothetical protein common family; protein id: supported by cDNA: gi_19347868 [Arabidopsis thaliana]
  misc_feature (1)..(403): Homolog of NCBI NO: 33304380 NR Description: metacaspase 7 [Arabidopsis thaliana]
  misc_feature (8)..(403): Homolog of NCBI NO: 23343885 NR Description: metacaspase 1 [Lycopersicon esculentum]
  misc_feature (1)..(403): Homolog of NCBI NO: 4235430 NR Description: latex-abundant protein [Hevea brasiliensis]
  misc_feature (196)..(403): Homolog of NCBI NO: 15219340 NR Description: hypothetical protein common family; protein id:
  misc_feature (1)..(168): Homolog of NCBI NO: 15219340 NR Description: hypothetical protein common family; protein id:
MAKRALLIGINYPGTTEELQGCVNDVHRMHKCLVDRFGFAEEDITVLIDTDESYTQPTGKNIRQALSELIKPAKSGDVLFVHYSGHGTRVPPETGEEDDTGFDECIVPSDLNPIPDDDFRDLVEQVPEGCQITIVSDSCHSGGLIDEAKEQIGESTTTKPNRESKVSSFEFEFKNCLHSIFVKLLAFCGIGSSHVETREIVEVGEGDEVVRSRYLPLERFIELLKQQTGQDNIEIGKIRPTLFDVFGEDSSPKIKKFMKVILTKLRKTNDQSTLLGKIEESARGYIEETLNDEHYMKPAMQAQVKSDREIYGGRSSNGLFPDRGILLSGCQTDETSADVKKKGEAFGAFSNAIQMVLSETDHKDKITNKEMVLRAREILKKQMFIQRPGLYCNDRFVNAPFIC

SEQ ID NO: 69994 - protein, 375 aa, Arabidopsis thaliana
  peptide (1)..(375): Ceres Seq. ID no. 2127738
  misc_feature (1)..(375): Pfam Name: Caspase domain Pfam Description: Caspase domain
  misc_feature (1)..(375): Homolog of NCBI NO: 37788557 NR Description: metacaspase 7 [Arabidopsis thaliana]
  misc_feature (1)..(375): Homolog of NCBI NO: 32482818 NR Description: metacaspase 4 [Arabidopsis thaliana]
  misc_feature (1)..(375): Homolog of NCBI NO: 15219338 NR Description: hypothetical protein common family; protein id:
  misc_feature (1)..(375): Homolog of NCBI NO: 15219342 NR Description: hypothetical protein common family; protein id:
  misc_feature (1)..(375): Homolog of NCBI NO: 15219345 NR Description: hypothetical protein common family; protein id: supported by cDNA: gi_19347868 [Arabidopsis thaliana]
  misc_feature (1)..(375): Homolog of NCBI NO: 33304380 NR Description: metacaspase 7 [Arabidopsis thaliana]
  misc_feature (1)..(375): Homolog of NCBI NO: 23343885 NR Description: metacaspase 1 [Lycopersicon esculentum]
  misc_feature (1)..(375): Homolog of NCBI NO: 4235430 NR Description: latex-abundant protein [Hevea brasiliensis]
  misc_feature (168)..(375): Homolog of NCBI NO: 15219340 NR Description: hypothetical protein common family; protein id:
  misc_feature (1)..(140): Homolog of NCBI NO: 15219340 NR Description: hypothetical protein common family; protein id:
MHKCLVDRFGFAEEDITVLIDTDESYTQPTGKNIRQALSELIKPAKSGDVLFVHYSGHGTRVPPETGEEDDTGFDECIVPSDLNPIPDDDFRDLVEQVPEGCQITIVSDSCHSGGLIDEAKEQIGESTTTKPNRESKVSSFEFEFKNCLHSIFVKLLAFCGIGSSHVETREIVEVGEGDEVVRSRYLPLERFIELLKQQTGQDNIEIGKIRPTLFDVFGEDSSPKIKKFMKVILTKLRKTNDQSTLLGKIEESARGYIEETLNDEHYMKPAMQAQVKSDREIYGGRSSNGLFPDRGILLSGCQTDETSADVKKKGEAFGAFSNAIQMVLSETDHKDKITNKEMVLRAREILKKQMFIQRPGLYCNDRFVNAPFIC

SEQ ID NO: 69995 - DNA, 723 bp, Arabidopsis thaliana
  misc_feature (1)..(723): Ceres Seq. ID no. 2130043
  misc_feature: MA Experiment ID: 20000265 Result: Up-regulated in Transcription
  misc_feature: MA Experiment 20000265 PARAMETER Experiment Name: At_Open_Flower_P Parameter: Age (day) Value: 21
  misc_feature: MA Experiment 20000265 PARAMETER Experiment Name: At_Open_Flower_P Parameter: Plant Line Value: WS
  misc_feature: MA Experiment 20000265 PARAMETER Experiment Name: At_Open_Flower_P Parameter: Tissue Value: Closed Flower vs. Whole Plant
atgacggacccccacaccgcccggacgatcgtcggaatcgttggaaacgtgatttctttcggcttgttctgcgctccaataccaacgatggtgaagatatggaagatgaaatcggtctccgagtttaagccagatccatacgtagctacggttttaaactgcatgatgtggacattttacggacttcctttcgtccagcccgacagtctcctcgtcatcaccattaatggaactggtcttttcatggaactcgtttacgtcaccatcttctttgtcttcgctacctcccctgtccgcagaaagatcacaatagctatggttatcgaggtaatattcatggcggtggtgatcttctgcacaatgtattttttgcatacaacaaagcagagatcaatgcttattgggatcttgtgcattgttttcaacgtcatcatgtatgctgctcctctcaccgtcatgaaacttgtgataaagacaaagagcgtgaaatacatgccgttcttcctatcattagccaacttcatgaacggtgtcgtttgggtcatttatgcatgtcttaaatttgacccttatattttgattccaaatggtcttggatcgctatcaggaataatccagcttataatatacataacttactataaaacaactaactggaacgatgacgatgaagataaagaaaagcgctattcgaatgctggaatcgaacttggccaggcttga

SEQ ID NO: 69996 - protein, 240 aa, Arabidopsis thaliana
  peptide (1)..(240): Ceres Seq. ID no. 2130044
  misc_feature (9)..(98): Pfam Name: MtN3/saliva family Pfam Description: MtN3/saliva family
  misc_feature (1)..(194): Homolog of NCBI NO: 10177463 NR Description: contains similarity to MtN3
  misc_feature (1)..(237): Homolog of NCBI NO: 18405611 NR Description: Expressed protein; protein id: At3g28007.1, by cDNA: 22745., supported by cDNA: gi_16226221 [Arabidopsis >gi|16226222|gb|AAL16107.1|AF428275_1 unknown protein
  misc_feature (1)..(237): Homolog of NCBI NO: 21592355 NR Description: contains similarity to nodulin MtN3 protein
  misc_feature (1)..(217): Homolog of NCBI NO: 34912462 NR Description: MtN3-like protein [Oryza sativa (japonica
  misc_feature (1)..(217): Homolog of NCBI NO: 34912454 NR Description: P0681B11.31 [Oryza sativa (japonica
  misc_feature (39)..(237): Homolog of NCBI NO: 11994120 NR Description: contains similarity to nodulin MtN3
  misc_feature (30)..(153): Homolog of NCBI NO: 15241979 NR Description: LIM7 - like protein; protein id: At5g62850.1
  misc_feature (8)..(217): Homolog of NCBI NO: 18413388 NR Description: putative protein; protein id: At4g10850.1, by cDNA: 33161. [Arabidopsis thaliana] contains similarity to Medicago truncatula MtN3 (GB:Y08726)
  misc_feature (8)..(238): Homolog of NCBI NO: 15219732 NR Description: hypothetical protein; protein id: At1g66770.1 thaliana] >gi|12597757|gb|AAG60070.1|AC013288_4 hypothetical
  misc_feature (28)..(217): Homolog of NCBI NO: 7486148 NR Description: hypothetical protein F25I24.60 - Arabidopsis >gi|4539359|emb|CAB40053.1| putative protein [Arabidopsis >gi|7267783|emb|CAB81186.1| putative protein [Arabidopsis
MTDPHTARTIVGIVGNVISFGLFCAPIPTMVKIWKMKSVSEFKPDPYVATVLNCMMWTFYGLPFVQPDSLLVITINGTGLFMELVYVTIFFVFATSPVRRKITIAMVIEVIFMAVVIFCTMYFLHTTKQRSMLIGILCIVFNVIMYAAPLTVMKLVIKTKSVKYMPFFLSLANFMNGVVWVIYACLKFDPYILIPNGLGSLSGIIQLIIYITYYKTTNWNDDDEDKEKRYSNAGIELGQA

SEQ ID NO: 69997 - protein, 211 aa, Arabidopsis thaliana
  peptide (1)..(211): Ceres Seq. ID no. 2130045
  misc_feature (1)..(69): Pfam Name: MtN3/saliva family Pfam Description: MtN3/saliva family
  misc_feature (1)..(165): Homolog of NCBI NO: 10177463 NR Description: contains similarity to MtN3
  misc_feature (1)..(208): Homolog of NCBI NO: 18405611 NR Description: Expressed protein; protein id: At3g28007.1, by cDNA: 22745., supported by cDNA: gi_16226221 [Arabidopsis >gi|16226222|gb|AAL16107.1|AF428275_1 unknown protein
  misc_feature (1)..(208): Homolog of NCBI NO: 21592355 NR Description: contains similarity to nodulin MtN3 protein
  misc_feature (1)..(188): Homolog of NCBI NO: 34912462 NR Description: MtN3-like protein [Oryza sativa (japonica
  misc_feature (1)..(188): Homolog of NCBI NO: 34912454 NR Description: P0681B11.31 [Oryza sativa (japonica
  misc_feature (10)..(208): Homolog of NCBI NO: 11994120 NR Description: contains similarity to nodulin MtN3
  misc_feature (1)..(124): Homolog of NCBI NO: 15241979 NR Description: LIM7 - like protein; protein id: At5g62850.1
  misc_feature (1)..(188): Homolog of NCBI NO: 18413388 NR Description: putative protein; protein id: At4g10850.1, by cDNA: 33161. [Arabidopsis thaliana] contains similarity to Medicago truncatula MtN3 (GB:Y08726)
  misc_feature (1)..(209): Homolog of NCBI NO: 15219732 NR Description: hypothetical protein; protein id: At1g66770.1 thaliana] >gi|12597757|gb|AAG60070.1|AC013288_4 hypothetical
  misc_feature (1)..(188): Homolog of NCBI NO: 7486148 NR Description: hypothetical protein F25I24.60 - Arabidopsis >gi|4539359|emb|CAB40053.1| putative protein [Arabidopsis >gi|7267783|emb|CAB81186.1| putative protein [Arabidopsis
MVKIWKMKSVSEFKPDPYVATVLNCMMWTFYGLPFVQPDSLLVITINGTGLFMELVYVTIFFVFATSPVRRKITIAMVIEVIFMAVVIFCTMYFLHTTKQRSMLIGILCIVFNVIMYAAPLTVMKLVIKTKSVKYMPFFLSLANFMNGVVWVIYACLKFDPYILIPNGLGSLSGIIQLIIYITYYKTTNWNDDDEDKEKRYSNAGIELGQA

SEQ ID NO: 69998 - protein, 205 aa, Arabidopsis thaliana
  peptide (1)..(205): Ceres Seq. ID no. 2130046
  misc_feature (1)..(63): Pfam Name: MtN3/saliva family Pfam Description: MtN3/saliva family
  misc_feature (1)..(159): Homolog of NCBI NO: 10177463 NR Description: contains similarity to MtN3
  misc_feature (1)..(202): Homolog of NCBI NO: 18405611 NR Description: Expressed protein; protein id: At3g28007.1, by cDNA: 22745., supported by cDNA: gi_16226221 [Arabidopsis >gi|16226222|gb|AAL16107.1|AF428275_1 unknown protein
  misc_feature (1)..(202): Homolog of NCBI NO: 21592355 NR Description: contains similarity to nodulin MtN3 protein
  misc_feature (1)..(182): Homolog of NCBI NO: 34912462 NR Description: MtN3-like protein [Oryza sativa (japonica
  misc_feature (1)..(182): Homolog of NCBI NO: 34912454 NR Description: P0681B11.31 [Oryza sativa (japonica
  misc_feature (4)..(202): Homolog of NCBI NO: 11994120 NR Description: contains similarity to nodulin MtN3
  misc_feature (1)..(118): Homolog of NCBI NO: 15241979 NR Description: LIM7 - like protein; protein id: At5g62850.1
  misc_feature (1)..(182): Homolog of NCBI NO: 18413388 NR Description: putative protein; protein id: At4g10850.1, by cDNA: 33161. [Arabidopsis thaliana] contains similarity to Medicago truncatula MtN3 (GB:Y08726)
  misc_feature (1)..(203): Homolog of NCBI NO: 15219732 NR Description: hypothetical protein; protein id: At1g66770.1 thaliana] >gi|12597757|gb|AAG60070.1|AC013288_4 hypothetical
  misc_feature (1)..(182): Homolog of NCBI NO: 7486148 NR Description: hypothetical protein F25I24.60 - Arabidopsis >gi|4539359|emb|CAB40053.1| putative protein [Arabidopsis >gi|7267783|emb|CAB81186.1| putative protein [Arabidopsis
MKSVSEFKPDPYVATVLNCMMWTFYGLPFVQPDSLLVITINGTGLFMELVYVTIFFVFATSPVRRKITIAMVIEVIFMAVVIFCTMYFLHTTKQRSMLIGILCIVFNVIMYAAPLTVMKLVIKTKSVKYMPFFLSLANFMNGVVWVIYACLKFDPYILIPNGLGSLSGIIQLIIYITYYKTTNWNDDDEDKEKRYSNAGIELGQA

SEQ ID NO: 69999 - DNA, 2337 bp, Arabidopsis thaliana
  misc_feature (1)..(2337): Ceres Seq. ID no. 2130264
  misc_feature: MA Experiment ID: 20000185 Result: Up-regulated in Transcription
  misc_feature: MA Experiment 20000185 PARAMETER Experiment Name: At_Roots__P Parameter: Age (day) Value: 7 vs. 21
  misc_feature: MA Experiment 20000185 PARAMETER Experiment Name: At_Roots__P Parameter: Organism Value: A. thaliana
  misc_feature: MA Experiment 20000185 PARAMETER Experiment Name: At_Roots__P Parameter: Tissue Value: Roots vs. Whole Plant
  misc_feature: MA Experiment ID: 20000227 Result: Down-regulated in Transcription
  misc_feature: MA Experiment 20000227 PARAMETER Experiment Name: At_Root-Tips-vs-Tops_P Parameter: Tissue Value: Root Tips vs. Root Tops
  misc_feature: MA Experiment ID: 20000439 Result: Up-regulated in Transcription
  misc_feature: MA Experiment 20000439 PARAMETER Experiment Name: At_Roots__P Parameter: Age (day) Value: 14 vs. 21
  misc_feature: MA Experiment 20000439 PARAMETER Experiment Name: At_Roots__P Parameter: Organism Value: A. thaliana
  misc_feature: MA Experiment 20000439 PARAMETER Experiment Name: At_Roots__P Parameter: Tissue Value: Roots vs. Whole Plant
  misc_feature: MA Experiment ID: 20000451 Result: Down-regulated in Transcription
  misc_feature: MA Experiment 20000451 PARAMETER Experiment Name: At_CS6879_Shoots-Roots_P Parameter: Age (day) Value: 14
  misc_feature: MA Experiment 20000451 PARAMETER Experiment Name: At_CS6879_Shoots-Roots_P Parameter: Organism Value: A. thaliana
  misc_feature: MA Experiment 20000451 PARAMETER Experiment Name: At_CS6879_Shoots-Roots_P Parameter: Plant Line Value: CS6879 vs. WS
  misc_feature: MA Experiment 20000451 PARAMETER Experiment Name: At_CS6879_Shoots-Roots_P Parameter: Tissue Value: Roots
  misc_feature: MA Experiment ID: 20000453 Result: Up-regulated in Transcription
  misc_feature: MA Experiment 20000453 PARAMETER Experiment Name: At_100uM_ABA_P Parameter: Age (day) Value: 15
  misc_feature: MA Experiment 20000453 PARAMETER Experiment Name: At_100uM_ABA_P Parameter: Organism Value: A. thaliana
  misc_feature: MA Experiment 20000453 PARAMETER Experiment Name: At_100uM_ABA_P Parameter: Plant Line Value: WS
  misc_feature: MA Experiment 20000453 PARAMETER Experiment Name: At_100uM_ABA_P Parameter: Timepoint (hr) Value: 24
  misc_feature: MA Experiment 20000453 PARAMETER Experiment Name: At_100uM_ABA_P Parameter: Tissue Value: Aerial
  misc_feature: MA Experiment 20000453 PARAMETER Experiment Name: At_100uM_ABA_P Parameter: Treatment Value: 100uM ABA vs. No Treatment
atggcgacattagcagatattggactagcagcagcgattaatattctaagtgcattgatatttctattgctatttgcaatcttgaggattcaaccattcaatgatagggtttatttccctaaatggtacttaaaaggtgttagaagcagccctgtgaattcgggtgctttcgttagcaagattatgaatttggactttcgatcatacgttcggtttttaaactggatgcctgatgctcttaagatgccagagcctgaacttattgatcatgctggtttggattctgctgtttacttgaggatttacttgattgggcttaagatctttggtccgattgcattactttcatggtcaattttagtacctgtaaattggacaagtgatggattgcagctagcaaaacttcgtaatgtaacatcgagtaatatcgataagctttcgatttcgaatgtcgaacgtggatcagacaggttttgggcacatcttgtgatggcttatgcattcacattttggacttgctatgtactaatgaaggaatatgagaaaattgctgcaatgcggttatcttttctccaatcagagaagcgacgtgctgatcaattcactgttctggttaggaacgtaccaccggactcagacgagtcgattagcgaaaacgtgcagcatttctttcttgttaaccacccagaccattatcttacacatcaggtggtgtacaatgcaaatgaattggctaaattggtagaagacaagaagaaaatgcagaattggttagattactaccagttgaagtatacaagaaacaaggaacaacggccacgggtaaagatgggatttctcgggctatggggcaaaaaagtagatgcaatggatcattatacagcagagatcgagaaacttagcgagcaaataatggaagaaaggaagaggataaagaaagatgacaaaagtgtaatgcaagcagcttttgtgtcttttaaaacgcgttggggcgctgcggtctgcgcgcagacacaacagacgaagaatccaactgaatggttaaccgaatgggctcctgaggcaagagaaatgtactggccaaatctcgcaatgccttacgtatctctcactgtaaggagatttgtaatgcacatcgccttcttcttcctcacgttctttttcatcatcccaatcgcatttgtgcaatccttagcgagtattgaaggtatcgagaaatccgctccgttcctcagtcccattgtcaaaaacaagttaatgaaatcattgatccaaggttttcttcccggtattgtcttgaagctctttttgatattcctgccaacaatattgatgatcatgtcgaaattcgaagggtttatttcaatatcatcgttagagagaagagcggcttttcgatactatattttcaaccttgtgaatgttttcctcggtagcgtaatcactggatctgcttttgaacagctcgattcttttcttaaacaatccgcaaacgacattccgcggacagttggagtcgcgataccgataaaagcaacgttctttataacgtatataatggtagacggttgggcgggtgtggcgggagaaatctttaggctgaaaccattagtcattttccatttaaagaacttcttctttgtgaaaactgaaaaggatagagaagaagctatggatccgggacagattgatttctacgctaccgagcctcggattcaactatacttcctccttggccttgtctacgctcctgtcactcctgttcttcttcctttcatcatcttcttctttggtttcgcctacctcgtcttccgtcatcagatcataaatgtgtacaatcagaagtatgagagtgcgggtgcattctggccagacgttcatggacgtataatatcggcattgatcatctcacaaatccttttgttgggattaatgagcacgaaaggaaaagttcagtccacacctttcctcctcgttctagcgattctcaccttcggttttcatcggttttgcaaaggccggtacgaatcggcattcgtcattaacccgttgcaggaagctatgattaaggatacattggaacgagcaagagaaccaaacttgaatcttaaagggtttcttcagaatgcatatgttcatcctgtttttaaagacgaagaagattcagatgaagagggactaatcgaggattcagatgacgaagattgtgtagttgtacaaaccaaacgtcaaagatcacggagaaccaccgttgcgagcagcaatgcgagccgtggctcgtcacaatcaacgccttttaatcaacttgatttgggtaaggggaaaccggagacttga

SEQ ID NO: 70000 - protein, 778 aa, Arabidopsis thaliana
  peptide (1)..(778): Ceres Seq. ID no. 2130265
  misc_feature (304)..(729): Pfam Name: Domain of unknown function DUF221 Pfam Description: Domain of unknown function DUF221
  misc_feature (1)..(763): Homolog of NCBI NO: 15233476 NR Description: unknown protein; protein id: At4g04340.1, by cDNA: gi_15810532, supported by cDNA: gi_20260619 [Arabidopsis >gi|25407261|pir||H85054 hypothetical protein AT4g04340
  misc_feature (1)..(763): Homolog of NCBI NO: 15810533 NR Description: unknown protein [Arabidopsis thaliana]
  misc_feature (1)..(754): Homolog of NCBI NO: 15233100 NR Description: unknown protein; protein id: At3g21620.1 thaliana] >gi|11994398|dbj|BAB02357.1|
  misc_feature (217)..(767): Homolog of NCBI NO: 15234725 NR Description: putative protein; protein id: At4g22120.1
  misc_feature (1)..(203): Homolog of NCBI NO: 15234725 NR Description: putative protein; protein id: At4g22120.1
  misc_feature (1)..(758): Homolog of NCBI NO: 17381104 NR Description: unknown protein [Arabidopsis thaliana]
  misc_feature (1)..(765): Homolog of NCBI NO: 15236212 NR Description: hypothetical protein; protein id: At4g02900.1
  misc_feature (1)..(764): Homolog of NCBI NO: 37537172 NR Description: unknown protein [Oryza sativa (japonica
  misc_feature (1)..(734): Homolog of NCBI NO: 15222569 NR Description: hypothetical protein; protein id: At1g32090.1
  misc_feature (453)..(761): Homolog of NCBI NO: 34913548 NR Description: OJ1029_F04.25 [Oryza sativa (japonica
MATLADIGLAAAINILSALIFLLLFAILRIQPFNDRVYFPKWYLKGVRSSPVNSGAFVSKIMNLDFRSYVRFLNWMPDALKMPEPELIDHAGLDSAVYLRIYLIGLKIFGPIALLSWSILVPVNWTSDGLQLAKLRNVTSSNIDKLSISNVERGSDRFWAHLVMAYAFTFWTCYVLMKEYEKIAAMRLSFLQSEKRRADQFTVLVRNVPPDSDESISENVQHFFLVNHPDHYLTHQVVYNANELAKLVEDKKKMQNWLDYYQLKYTRNKEQRPRVKMGFLGLWGKKVDAMDHYTAEIEKLSEQIMEERKRIKKDDKSVMQAAFVSFKTRWGAAVCAQTQQTKNPTEWLTEWAPEAREMYWPNLAMPYVSLTVRRFVMHIAFFFLTFFFIIPIAFVQSLASIEGIEKSAPFLSPIVKNKLMKSLIQGFLPGIVLKLFLIFLPTILMIMSKFEGFISISSLERRAAFRYYIFNLVNVFLGSVITGSAFEQLDSFLKQSANDIPRTVGVAIPIKATFFITYIMVDGWAGVAGEIFRLKPLVIFHLKNFFFVKTEKDREEAMDPGQIDFYATEPRIQLYFLLGLVYAPVTPVLLPFIIFFFGFAYLVFRHQIINVYNQKYESAGAFWPDVHGRIISALIISQILLLGLMSTKGKVQSTPFLLVLAILTFGFHRFCKGRYESAFVINPLQEAMIKDTLERAREPNLNLKGFLQNAYVHPVFKDEEDSDEEGLIEDSDDEDCVVVQTKRQRSRRTTVASSNASRGSSQSTPFNQLDLGKGKPET

SEQ ID NO: 70001 - protein, 717 aa, Arabidopsis thaliana
  peptide (1)..(717): Ceres Seq. ID no. 2130266
  misc_feature (243)..(668): Pfam Name: Domain of unknown function DUF221 Pfam Description: Domain of unknown function DUF221
  misc_feature (1)..(702): Homolog of NCBI NO: 15233476 NR Description: unknown protein; protein id: At4g04340.1, by cDNA: gi_15810532, supported by cDNA: gi_20260619 [Arabidopsis >gi|25407261|pir||H85054 hypothetical protein AT4g04340
  misc_feature (1)..(702): Homolog of NCBI NO: 15810533 NR Description: unknown protein [Arabidopsis thaliana]
  misc_feature (1)..(693): Homolog of NCBI NO: 15233100 NR Description: unknown protein; protein id: At3g21620.1 thaliana] >gi|11994398|dbj|BAB02357.1|
  misc_feature (156)..(706): Homolog of NCBI NO: 15234725 NR Description: putative protein; protein id: At4g22120.1
  misc_feature (1)..(142): Homolog of NCBI NO: 15234725 NR Description: putative protein; protein id: At4g22120.1
  misc_feature (1)..(697): Homolog of NCBI NO: 17381104 NR Description: unknown protein [Arabidopsis thaliana]
  misc_feature (1)..(704): Homolog of NCBI NO: 15236212 NR Description: hypothetical protein; protein id: At4g02900.1
  misc_feature (1)..(703): Homolog of NCBI NO: 37537172 NR Description: unknown protein [Oryza sativa (japonica
  misc_feature (1)..(673): Homolog of NCBI NO: 15222569 NR Description: hypothetical protein; protein id: At1g32090.1
  misc_feature (392)..(700): Homolog of NCBI NO: 34913548 NR Description: OJ1029_F04.25 [Oryza sativa (japonica
MNLDFRSYVRFLNWMPDALKMPEPELIDHAGLDSAVYLRIYLIGLKIFGPIALLSWSILVPVNWTSDGLQLAKLRNVTSSNIDKLSISNVERGSDRFWAHLVMAYAFTFWTCYVLMKEYEKIAAMRLSFLQSEKRRADQFTVLVRNVPPDSDESISENVQHFFLVNHPDHYLTHQVVYNANELAKLVEDKKKMQNWLDYYQLKYTRNKEQRPRVKMGFLGLWGKKVDAMDHYTAEIEKLSEQIMEERKRIKKDDKSVMQAAFVSFKTRWGAAVCAQTQQTKNPTEWLTEWAPEAREMYWPNLAMPYVSLTVRRFVMHIAFFFLTFFFIIPIAFVQSLASIEGIEKSAPFLSPIVKNKLMKSLIQGFLPGIVLKLFLIFLPTILMIMSKFEGFISISSLERRAAFRYYIFNLVNVFLGSVITGSAFEQLDSFLKQSANDIPRTVGVAIPIKATFFITYIMVDGWAGVAGEIFRLKPLVIFHLKNFFFVKTEKDREEAMDPGQIDFYATEPRIQLYFLLGLVYAPVTPVLLPFIIFFFGFAYLVFRHQIINVYNQKYESAGAFWPDVHGRIISALIISQILLLGLMSTKGKVQSTPFLLVLAILTFGFHRFCKGRYESAFVINPLQEAMIKDTLERAREPNLNLKGFLQNAYVHPVFKDEEDSDEEGLIEDSDDEDCVVVQTKRQRSRRTTVASSNASRGSSQSTPFNQLDLGKGKPET

SEQ ID NO: 70002 - protein, 703 aa, Arabidopsis thaliana
  peptide (1)..(703): Ceres Seq. ID no. 2130267
  misc_feature (229)..(654): Pfam Name: Domain of unknown function DUF221 Pfam Description: Domain of unknown function DUF221
  misc_feature (1)..(688): Homolog of NCBI NO: 15233476 NR Description: unknown protein; protein id: At4g04340.1, by cDNA: gi_15810532, supported by cDNA: gi_20260619 [Arabidopsis >gi|25407261|pir||H85054 hypothetical protein AT4g04340
  misc_feature (1)..(688): Homolog of NCBI NO: 15810533 NR Description: unknown protein [Arabidopsis thaliana]
  misc_feature (1)..(679): Homolog of NCBI NO: 15233100 NR Description: unknown protein; protein id: At3g21620.1 thaliana] >gi|11994398|dbj|BAB02357.1|
  misc_feature (142)..(692): Homolog of NCBI NO: 15234725 NR Description: putative protein; protein id: At4g22120.1
  misc_feature (1)..(128): Homolog of NCBI NO: 15234725 NR Description: putative protein; protein id: At4g22120.1
  misc_feature (1)..(683): Homolog of NCBI NO: 17381104 NR Description: unknown protein [Arabidopsis thaliana]
  misc_feature (1)..(690): Homolog of NCBI NO: 15236212 NR Description: hypothetical protein; protein id: At4g02900.1
  misc_feature (1)..(689): Homolog of NCBI NO: 37537172 NR Description: unknown protein [Oryza sativa (japonica
  misc_feature (1)..(659): Homolog of NCBI NO: 15222569 NR Description: hypothetical protein; protein id: At1g32090.1
  misc_feature (378)..(686): Homolog of NCBI NO: 34913548 NR Description: OJ1029_F04.25 [Oryza sativa (japonica
MPDALKMPEPELIDHAGLDSAVYLRIYLIGLKIFGPIALLSWSILVPVNWTSDGLQLAKLRNVTSSNIDKLSISNVERGSDRFWAHLVMAYAFTFWTCYVLMKEYEKIAAMRLSFLQSEKRRADQFTVLVRNVPPDSDESISENVQHFFLVNHPDHYLTHQVVYNANELAKLVEDKKKMQNWLDYYQLKYTRNKEQRPRVKMGFLGLWGKKVDAMDHYTAEIEKLSEQIMEERKRIKKDDKSVMQAAFVSFKTRWGAAVCAQTQQTKNPTEWLTEWAPEAREMYWPNLAMPYVSLTVRRFVMHIAFFFLTFFFIIPIAFVQSLASIEGIEKSAPFLSPIVKNKLMKSLIQGFLPGIVLKLFLIFLPTILMIMSKFEGFISISSLERRAAFRYYIFNLVNVFLGSVITGSAFEQLDSFLKQSANDIPRTVGVAIPIKATFFITYIMVDGWAGVAGEIFRLKPLVIFHLKNFFFVKTEKDREEAMDPGQIDFYATEPRIQLYFLLGLVYAPVTPVLLPFIIFFFGFAYLVFRHQIINVYNQKYESAGAFWPDVHGRIISALIISQILLLGLMSTKGKVQSTPFLLVLAILTFGFHRFCKGRYESAFVINPLQEAMIKDTLERAREPNLNLKGFLQNAYVHPVFKDEEDSDEEGLIEDSDDEDCVVVQTKRQRSRRTTVASSNASRGSSQSTPFNQLDLGKGKPET

SEQ ID NO: 70003 - DNA, 666 bp, Arabidopsis thaliana
  misc_feature (1)..(666): Ceres Seq. ID no. 2130361
  misc_feature: MA Experiment ID: 20000184 Result: Down-regulated in Transcription
  misc_feature: MA Experiment 20000184 PARAMETER Experiment Name: At_Shoots__P Parameter: Age (day) Value: 7
  misc_feature: MA Experiment 20000184 PARAMETER Experiment Name: At_Shoots__P Parameter: Tissue Value: Shoots vs. Whole Plant
atggagcctgaacgtttaaaatttggaggtccaagagagttgtgcggtgctgcggatcttatatctcaattcaaactagtgcaacaccatgaattcttttgcaagaaatctcttcctgtttctttatcagattcccattatcttcataatgtggttggggacacagagatcagaaaaggagaaggaatgcaattagatcagcttattgagagcatatcacagagccgggagactaatattcgcatccagccttttgatatagatgagcttcaggagtctttccaactaaatgatatgactcctgttgaattacccccagcagagaagggagctcctacaattccgtctaagtcaaaaagtgagtcgaaagatagggacaggaaacataagaaacacaaggacagggataaagacaaagatagagagcataagaagcacaagcacaaacataaagatagaagcaaagataaagataaagacaaggaccgagacagaaagaaggacaaaaatggccaccatgattcgggtgatcattctaagaaacatcatgataagaaaaggaaacacgatggagatgaagatcttaatgacgttcagaggcacaaaaaaaacaagcataaaagctcaaagcttgatgaggtgggtgcaataagggttgctggctaa

SEQ ID NO: 70004 - protein, 221 aa, Arabidopsis thaliana
  peptide (1)..(221): Ceres Seq. ID no. 2130362
  misc_feature (117)..(197): Pfam Name: SART-1 family Pfam Description: SART-1 family
  misc_feature (44)..(208): Homolog of NCBI NO: 23619174 NR Description: hypothetical protein [Plasmodium falciparum 3D7]
  misc_feature (117)..(213): Homolog of NCBI NO: 17558378 NR Description: Putative protein, with 4 coiled coil-4 domains, specific [Caenorhabditis elegans] >gi|7496941|pir||T34137
  misc_feature (103)..(204): Homolog of NCBI NO: 24580623 NR Description: CG31921-PA [Drosophila melanogaster]
  misc_feature (1)..(221): Homolog of NCBI NO: 38454176 NR Description: At5g12230 [Arabidopsis thaliana]
  misc_feature (97)..(203): Homolog of NCBI NO: 29246869 NR Description: GLP_191_32543_34384 [Giardia lamblia ATCC 50803]
  misc_feature (103)..(213): Homolog of NCBI NO: 39594465 NR Description: Hypothetical protein CBG19125 [Caenorhabditis
  misc_feature (1)..(217): Homolog of NCBI NO: 15239764 NR Description: putative protein; protein id: At5g19480.1
  misc_feature (1)..(221): Homolog of NCBI NO: 15239910 NR Description: unknown protein; protein id: At5g12230.1 thaliana] >gi|9759390|dbj|BAB10041.1| gene_id:MXC9.19~unknown
  misc_feature (105)..(210): Homolog of NCBI NO: 9858779 NR Description: BAC19.11 [Lycopersicon esculentum]
  misc_feature (121)..(214): Homolog of NCBI NO: 17558378 NR Description: Putative protein, with 4 coiled coil-4 domains, specific [Caenorhabditis elegans] >gi|7496941|pir||T34137
MEPERLKFGGPRELCGAADLISQFKLVQHHEFFCKKSLPVSLSDSHYLHNVVGDTEIRKGEGMQLDQLIESISQSRETNIRIQPFDIDELQESFQLNDMTPVELPPAEKGAPTIPSKSKSESKDRDRKHKKHKDRDKDKDREHKKHKHKHKDRSKDKDKDKDRDRKKDKNGHHDSGDHSKKHHDKKRKHDGDEDLNDVQRHKKNKHKSSKLDEVGAIRVAG

SEQ ID NO: 70005 - protein, 159 aa, Arabidopsis thaliana
  peptide (1)..(159): Ceres Seq. ID no. 2130363
  misc_feature (55)..(135): Pfam Name: SART-1 family Pfam Description: SART-1 family
  misc_feature (1)..(159): Homolog of NCBI NO: 15239910 NR Description: unknown protein; protein id: At5g12230.1 thaliana] >gi|9759390|dbj|BAB10041.1| gene_id:MXC9.19~unknown
  misc_feature (1)..(159): Homolog of NCBI NO: 38454176 NR Description: At5g12230 [Arabidopsis thaliana]
  misc_feature (1)..(155): Homolog of NCBI NO: 15239764 NR Description: putative protein; protein id: At5g19480.1
  misc_feature (35)..(141): Homolog of NCBI NO: 29246869 NR Description: GLP_191_32543_34384 [Giardia lamblia ATCC 50803]
  misc_feature (41)..(151): Homolog of NCBI NO: 39594465 NR Description: Hypothetical protein CBG19125 [Caenorhabditis
  misc_feature (1)..(146): Homolog of NCBI NO: 23619174 NR Description: hypothetical protein [Plasmodium falciparum 3D7]
  misc_feature (55)..(151): Homolog of NCBI NO: 17558378 NR Description: Putative protein, with 4 coiled coil-4 domains, specific [Caenorhabditis elegans] >gi|7496941|pir||T34137
  misc_feature (41)..(142): Homolog of NCBI NO: 24580623 NR Description: CG31921-PA [Drosophila melanogaster]
  misc_feature (43)..(148): Homolog of NCBI NO: 9858779 NR Description: BAC19.11 [Lycopersicon esculentum]
  misc_feature (59)..(152): Homolog of NCBI NO: 17558378 NR Description: Putative protein, with 4 coiled coil-4 domains, specific [Caenorhabditis elegans] >gi|7496941|pir||T34137
MQLDQLIESISQSRETNIRIQPFDIDELQESFQLNDMTPVELPPAEKGAPTIPSKSKSESKDRDRKHKKHKDRDKDKDREHKKHKHKHKDRSKDKDKDKDRDRKKDKNGHHDSGDHSKKHHDKKRKHDGDEDLNDVQRHKKNKHKSSKLDEVGAIRVAG

SEQ ID NO: 70006 - protein, 123 aa, Arabidopsis thaliana
  peptide (1)..(123): Ceres Seq. ID no. 2130364
  misc_feature (19)..(99): Pfam Name: SART-1 family Pfam Description: SART-1 family
  misc_feature (1)..(123): Homolog of NCBI NO: 15239910 NR Description: unknown protein; protein id: At5g12230.1 thaliana] >gi|9759390|dbj|BAB10041.1| gene_id:MXC9.19~unknown
  misc_feature (1)..(123): Homolog of NCBI NO: 38454176 NR Description: At5g12230 [Arabidopsis thaliana]
  misc_feature (1)..(119): Homolog of NCBI NO: 15239764 NR Description: putative protein; protein id: At5g19480.1
  misc_feature (1)..(105): Homolog of NCBI NO: 29246869 NR Description: GLP_191_32543_34384 [Giardia lamblia ATCC 50803]
  misc_feature (5)..(115): Homolog of NCBI NO: 39594465 NR Description: Hypothetical protein CBG19125 [Caenorhabditis
  misc_feature (1)..(110): Homolog of NCBI NO: 23619174 NR Description: hypothetical protein [Plasmodium falciparum 3D7]
  misc_feature (19)..(115): Homolog of NCBI NO: 17558378 NR Description: Putative protein, with 4 coiled coil-4 domains, specific [Caenorhabditis elegans] >gi|7496941|pir||T34137
  misc_feature (5)..(106): Homolog of NCBI NO: 24580623 NR Description: CG31921-PA [Drosophila melanogaster]
  misc_feature (7)..(112): Homolog of NCBI NO: 9858779 NR Description: BAC19.11 [Lycopersicon esculentum]
  misc_feature (23)..(116): Homolog of NCBI NO: 17558378 NR Description: Putative protein, with 4 coiled coil-4 domains, specific [Caenorhabditis elegans] >gi|7496941|pir||T34137
MTPVELPPAEKGAPTIPSKSKSESKDRDRKHKKHKDRDKDKDREHKKHKHKHKDRSKDKDKDKDRDRKKDKNGHHDSGDHSKKHHDKKRKHDGDEDLNDVQRHKKNKHKSSKLDEVGAIRVAG

SEQ ID NO: 70007 - DNA, 1377 bp, Arabidopsis thaliana
  misc_feature (1)..(1377): Ceres Seq. ID no. 2130895
atggaattcacggaggcttacaagcaaacaggtccttgttgtttctccccaaactctcgttacgtcgccgtcgccaatgattatcgtctcgtgatccgtgatacgttttcgtttcaggttgtgcaattgttttcttgcttagataaaataagctacatagaatgggctcttgattcagagtacattctttgtggtctttataaaaaaccgatgattcaagcttggtctttgactcaaccagaatggacttgcaagattgatgaaggtcctgctggtatttcatacgctaggtggagtccagatagccgtcatatactcactacgtcagagtttcagctgcggttaacggtttggtctcttttaaacacggcgtgtgttcatgttcagtggccaaagcatggttccaagggagtttcattcaatcaagatgggaagtttgcggctatatgtacacggcgtgactgtaaggattatgttaaccttttgtcttgtcaatcatgggagataatgggtagctttgctgttgataccttggacttggctgatcttgagtggtcacctgatgatagttctattgtagtgtgggattcgcctcttgaatataaggttctaatttattctccagatggtaggtgtctgtttaagtaccaggcatatgaatgtggacttggtgtcaagactgtttcctggtctccgtgtggtcagtttcttgccattggtagctatgatcaaatgttgcgggtcctgaatcaccttacttggaaaacattcgctgagttcttacacctatcaacggttcgtgcgccctgttctgcggctattttcaaggaaatcgatgaaccattacagcttgatatgtctgagttatcgttggatgaaaactttatgccaagcaattatgatgcttcagaaggctatataagtgtcaggtatgaagtcatggaattaccggtagcttttcctttccagaaacctcctgcggacaagcctaacccaaaacaaggagtcggccttctagcttggagcaaagacagccagtacatatgcacacgaaacgacagtatgcccactgctctgtggatatgggacatgcgcctcctcgaggttgcagccatcctggtccagaaggaacccatccgagcagctgtgtgggacccaacctgcacacgcctcctcctgtgcactggaagctctcacctttacatgtggactccctcgggtgctttctgtgtatgcaatccccttccgggcttctccatatcggacctcaaatggaacattgatggaagctgtctccttctcaaagacaaagatgcgttctgttgtgccacggtcccgtctctgcctgagtccagcgactacagttctgatgactga

SEQ ID NO: 70008 - protein, 458 aa, Arabidopsis thaliana
  peptide (1)..(458): Ceres Seq. ID no. 2130896
  misc_feature (368)..(404): Pfam Name: WD domain, G-beta repeat Pfam Description: WD domain, G-beta repeat
  misc_feature (1)..(458): Homolog of NCBI NO: 15240819 NR Description: WD-repeat protein-like; protein id: At5g07590.1
  misc_feature (1)..(458): Homolog of NCBI NO: 37536890 NR Description: putative WD-40 protein [Oryza sativa (japonica group)] >gi|12597885|gb|AAG60193.1| putative WD40 protein [Oryza
  misc_feature (1)..(444): Homolog of NCBI NO: 29791584 NR Description: Similar to WD repeat domain 8 [Danio rerio]
  misc_feature (1)..(441): Homolog of NCBI NO: 16445434 NR Description: WD repeat domain 8 protein; WD repeat-containing
  misc_feature (1)..(441): Homolog of NCBI NO: 17380347 NR Description: WD-repeat protein 8 >gi|7209723|dbj|BAA92312.1|
  misc_feature (1)..(441): Homolog of NCBI NO: 10946908 NR Description: WD repeat domain 8; DD57 [Mus musculus]
  misc_feature (1)..(441): Homolog of NCBI NO: 26342120 NR Description: unnamed protein product [Mus musculus]
  misc_feature (1)..(441): Homolog of NCBI NO: 7020525 NR Description: unnamed protein product [Homo sapiens]
  misc_feature (1)..(417): Homolog of NCBI NO: 12803559 NR Description: Similar to hypothetical protein FLJ20430 [Homo
  misc_feature (1)..(377): Homolog of NCBI NO: 38174120 NR Description: Unknown (protein for MGC:75994) [Silurana
MEFTEAYKQTGPCCFSPNSRYVAVANDYRLVIRDTFSFQVVQLFSCLDKISYIEWALDSEYILCGLYKKPMIQAWSLTQPEWTCKIDEGPAGISYARWSPDSRHILTTSEFQLRLTVWSLLNTACVHVQWPKHGSKGVSFNQDGKFAAICTRRDCKDYVNLLSCQSWEIMGSFAVDTLDLADLEWSPDDSSIVVWDSPLEYKVLIYSPDGRCLFKYQAYECGLGVKTVSWSPCGQFLAIGSYDQMLRVLNHLTWKTFAEFLHLSTVRAPCSAAIFKEIDEPLQLDMSELSLDENFMPSNYDASEGYISVRYEVMELPVAFPFQKPPADKPNPKQGVGLLAWSKDSQYICTRNDSMPTALWIWDMRLLEVAAILVQKEPIRAAVWDPTCTRLLLCTGSSHLYMWTPSGAFCVCNPLPGFSISDLKWNIDGSCLLLKDKDAFCCATVPSLPESSDYSSDD

SEQ ID NO: 70009 - protein, 388 aa, Arabidopsis thaliana
  peptide (1)..(388): Ceres Seq. ID no. 2130897
  misc_feature (298)..(334): Pfam Name: WD domain, G-beta repeat Pfam Description: WD domain, G-beta repeat
  misc_feature (1)..(388): Homolog of NCBI NO: 15240819 NR Description: WD-repeat protein-like; protein id: At5g07590.1
  misc_feature (1)..(388): Homolog of NCBI NO: 37536890 NR Description: putative WD-40 protein [Oryza sativa (japonica group)] >gi|12597885|gb|AAG60193.1| putative WD40 protein [Oryza
  misc_feature (1)..(374): Homolog of NCBI NO: 29791584 NR Description: Similar to WD repeat domain 8 [Danio rerio]
  misc_feature (1)..(371): Homolog of NCBI NO: 16445434 NR Description: WD repeat domain 8 protein; WD repeat-containing
  misc_feature (1)..(371): Homolog of NCBI NO: 17380347 NR Description: WD-repeat protein 8 >gi|7209723|dbj|BAA92312.1|
  misc_feature (1)..(371): Homolog of NCBI NO: 10946908 NR Description: WD repeat domain 8; DD57 [Mus musculus]
  misc_feature (1)..(371): Homolog of NCBI NO: 26342120 NR Description: unnamed protein product [Mus musculus]
  misc_feature (1)..(371): Homolog of NCBI NO: 7020525 NR Description: unnamed protein product [Homo sapiens]
  misc_feature (1)..(347): Homolog of NCBI NO: 12803559 NR Description: Similar to hypothetical protein FLJ20430 [Homo
  misc_feature (1)..(307): Homolog of NCBI NO: 38174120 NR Description: Unknown (protein for MGC:75994) [Silurana
MIQAWSLTQPEWTCKIDEGPAGISYARWSPDSRHILTTSEFQLRLTVWSLLNTACVHVQWPKHGSKGVSFNQDGKFAAICTRRDCKDYVNLLSCQSWEIMGSFAVDTLDLADLEWSPDDSSIVVWDSPLEYKVLIYSPDGRCLFKYQAYECGLGVKTVSWSPCGQFLAIGSYDQMLRVLNHLTWKTFAEFLHLSTVRAPCSAAIFKEIDEPLQLDMSELSLDENFMPSNYDASEGYISVRYEVMELPVAFPFQKPPADKPNPKQGVGLLAWSKDSQYICTRNDSMPTALWIWDMRLLEVAAILVQKEPIRAAVWDPTCTRLLLCTGSSHLYMWTPSGAFCVCNPLPGFSISDLKWNIDGSCLLLKDKDAFCCATVPSLPESSDYSSDD

SEQ ID NO: 70010 - protein, 289 aa, Arabidopsis thaliana
  peptide (1)..(289): Ceres Seq. ID no. 2130898
  misc_feature (199)..(235): Pfam Name: WD domain, G-beta repeat Pfam Description: WD domain, G-beta repeat
  misc_feature (1)..(289): Homolog of NCBI NO: 15240819 NR Description: WD-repeat protein-like; protein id: At5g07590.1
  misc_feature (1)..(289): Homolog of NCBI NO: 37536890 NR Description: putative WD-40 protein [Oryza sativa (japonica group)] >gi|12597885|gb|AAG60193.1| putative WD40 protein [Oryza
  misc_feature (1)..(275): Homolog of NCBI NO: 29791584 NR Description: Similar to WD repeat domain 8 [Danio rerio]
  misc_feature (1)..(272): Homolog of NCBI NO: 16445434 NR Description: WD repeat domain 8 protein; WD repeat-containing
  misc_feature (1)..(272): Homolog of NCBI NO: 17380347 NR Description: WD-repeat protein 8 >gi|7209723|dbj|BAA92312.1|
  misc_feature (1)..(272): Homolog of NCBI NO: 10946908 NR Description: WD repeat domain 8; DD57 [Mus musculus]
  misc_feature (1)..(272): Homolog of NCBI NO: 26342120 NR Description: unnamed protein product [Mus musculus]
  misc_feature (1)..(272): Homolog of NCBI NO: 7020525 NR Description: unnamed protein product [Homo sapiens]
  misc_feature (1)..(248): Homolog of NCBI NO: 12803559 NR Description: Similar to hypothetical protein FLJ20430 [Homo
  misc_feature (1)..(208): Homolog of NCBI NO: 38174120 NR Description: Unknown (protein for MGC:75994) [Silurana
MGSFAVDTLDLADLEWSPDDSSIVVWDSPLEYKVLIYSPDGRCLFKYQAYECGLGVKTVSWSPCGQFLAIGSYDQMLRVLNHLTWKTFAEFLHLSTVRAPCSAAIFKEIDEPLQLDMSELSLDENFMPSNYDASEGYISVRYEVMELPVAFPFQKPPADKPNPKQGVGLLAWSKDSQYICTRNDSMPTALWIWDMRLLEVAAILVQKEPIRAAVWDPTCTRLLLCTGSSHLYMWTPSGAFCVCNPLPGFSISDLKWNIDGSCLLLKDKDAFCCATVPSLPESSDYSSDD

SEQ ID NO: 70011 - DNA, 1584 bp, Arabidopsis thaliana
  misc_feature (1)..(1584): Ceres Seq. ID no. 2131153
  misc_feature: MA Experiment ID: 20001807 Result: Down-regulated in Transcription
  misc_feature: MA Experiment 20001807 PARAMETER Experiment Name: At_50mM_NH4NO3_L-to-H_Sub_P Parameter: Timepoint (hr) Value: 6
  misc_feature: MA Experiment 20001807 PARAMETER Experiment Name: At_50mM_NH4NO3_L-to-H_Sub_P Parameter: Tissue Value: Leaf
  misc_feature: MA Experiment 20001807 PARAMETER Experiment Name: At_50mM_NH4NO3_L-to-H_Sub_P Parameter: Treatment Value: 50mM NH4NO3 vs 100mM Mannitol
atggcgatgagattttttcaacttcaccgaaatcgtcttgtgaaaggtaattctggaaaagctctctcctttagccgccttttagatcttagtttctgggttcgagctttttgtaattaccgagagattttgagaaatggtcttcactctcttcagtttaatgaagctctcgatttgttcactcacatggttgagtctcgtcctcttccttcaattatcgatttcactaagttattgaatgttattgccaaaatgaagaagtttgatgttgtgatcaatctctgcgaccatctgcagataatgggagtttcacatgatctctatacttgcaatcttttgatgaattgtttctgccaatcttctcagccttatcttgcctcatcttttcttgggaagatgatgaaacttggttttgagcctgatattgtcacgtttacttctctgatcaatgggttctgtctcgggaatagaatggaggaggctatgtctatggtgaatcagatggtggagatggggattaaacctgatgttgtaatgtatacaacaatcattgatagtctttgcaaaaacgggcatgtgaattacgcgttgagccttttcgatcaaatggaaaactacgggattagaccggatgttgttatgtacacctctctcgtgaacggtctttgtaactctggtagatggagagatgctgattcattgctgaggggtatgacgaagaggaaaatcaaacctgatgtaatcactttcaatgcattgatcgatgcgtttgtgaaagaaggaaagtttttggatgctgaagaattgtacaatgagatgattcgtatgtctatagctcctaatattttcacctatacttcattgatcaatgggttttgcatggaaggttgtgtagatgaggccagacaaatgttttatttgatggaaaccaagggttgttttccagatgtagtggcttatacttctctcataaacgggttttgcaagtgtaagaaggtagatgatgcgatgaaaatcttctacgagatgtcccaaaaaggattgactgggaacactatcacttacactactcttatccaaggttttggtcaagtgggcaaacctaatgtcgcccaagaagtttttagtcatatggtttctcgtggcgtgcctcccaatattaggacctataatgttttgttacattgtctatgttataacgggaaggtaaagaaagcgttgatgatatttgaggatatgcaaaagagagaaatggatggtgtcgctcccaatatttggacttacaacgtcttgttacatggtctatgttataatgggaagctagagaaagccttgatggtattcgaggatatgcgaaagagagagatggatattggaattattacatataccatcatcattcaagggatgtgcaaggctggtaaagtgaaaaatgctgttaatttattttgtagccttccttcaaaaggagtgaagcctaatgttgtaacatatactacaatgatatcaggattgtttagggaagggttaaagcatgaagctcatgtgttgtttaggaaaatgaaagaagatggggtttcataa

SEQ ID NO: 70012 - protein, 527 aa, Arabidopsis thaliana
  peptide (1)..(527): Ceres Seq. ID no. 2131154
  misc_feature (283)..(317): Pfam Name: PPR repeat Pfam Description: PPR repeat
  misc_feature (1)..(527): Homolog of NCBI NO: 15237575 NR Description: salt-inducible protein-like; protein id:
  misc_feature (9)..(498): Homolog of NCBI NO: 11994626 NR Description: contains similarity to salt-inducible
  misc_feature (63)..(498): Homolog of NCBI NO: 15228287 NR Description: hypothetical protein; protein id: At3g16710.1
  misc_feature (8)..(494): Homolog of NCBI NO: 15237384 NR Description: putative protein; protein id: At5g16640.1 thaliana] >gi|10176973|dbj|BAB10191.1|
  misc_feature (2)..(497): Homolog of NCBI NO: 6630464 NR Description: F23N19.4 [Arabidopsis thaliana]
  misc_feature (2)..(497): Homolog of NCBI NO: 15221550 NR Description: PPR-repeat protein; protein id: At1g62680.1
  misc_feature (5)..(498): Homolog of NCBI NO: 15217683 NR Description: hypothetical protein; protein id: At1g64580.1
  misc_feature (5)..(498): Homolog of NCBI NO: 25404938 NR Description: protein F1N19.15 [imported] - Arabidopsis >gi|6633829|gb|AAF19688.1|AC009519_22 F1N19.15 [Arabidopsis
  misc_feature (32)..(493): Homolog of NCBI NO: 6630449 NR Description: F23N19.8 [Arabidopsis thaliana]
  misc_feature (63)..(493): Homolog of NCBI NO: 15221558 NR Description: PPR-repeat protein; protein id: At1g62720.1
MAMRFFQLHRNRLVKGNSGKALSFSRLLDLSFWVRAFCNYREILRNGLHSLQFNEALDLFTHMVESRPLPSIIDFTKLLNVIAKMKKFDVVINLCDHLQIMGVSHDLYTCNLLMNCFCQSSQPYLASSFLGKMMKLGFEPDIVTFTSLINGFCLGNRMEEAMSMVNQMVEMGIKPDVVMYTTIIDSLCKNGHVNYALSLFDQMENYGIRPDVVMYTSLVNGLCNSGRWRDADSLLRGMTKRKIKPDVITFNALIDAFVKEGKFLDAEELYNEMIRMSIAPNIFTYTSLINGFCMEGCVDEARQMFYLMETKGCFPDVVAYTSLINGFCKCKKVDDAMKIFYEMSQKGLTGNTITYTTLIQGFGQVGKPNVAQEVFSHMVSRGVPPNIRTYNVLLHCLCYNGKVKKALMIFEDMQKREMDGVAPNIWTYNVLLHGLCYNGKLEKALMVFEDMRKREMDIGIITYTIIIQGMCKAGKVKNAVNLFCSLPSKGVKPNVVTYTTMISGLFREGLKHEAHVLFRKMKEDGVS

SEQ ID NO: 70013 - protein, 525 aa, Arabidopsis thaliana
  peptide (1)..(525): Ceres Seq. ID no. 2131155
  misc_feature (281)..(315): Pfam Name: PPR repeat Pfam Description: PPR repeat
  misc_feature (1)..(525): Homolog of NCBI NO: 15237575 NR Description: salt-inducible protein-like; protein id:
  misc_feature (7)..(496): Homolog of NCBI NO: 11994626 NR Description: contains similarity to salt-inducible
  misc_feature (61)..(496): Homolog of NCBI NO: 15228287 NR Description: hypothetical protein; protein id: At3g16710.1
  misc_feature (6)..(492): Homolog of NCBI NO: 15237384 NR Description: putative protein; protein id: At5g16640.1 thaliana] >gi|10176973|dbj|BAB10191.1|
  misc_feature (1)..(495): Homolog of NCBI NO: 6630464 NR Description: F23N19.4 [Arabidopsis thaliana]
  misc_feature (1)..(495): Homolog of NCBI NO: 15221550 NR Description: PPR-repeat protein; protein id: At1g62680.1
  misc_feature (3)..(496): Homolog of NCBI NO: 15217683 NR Description: hypothetical protein; protein id: At1g64580.1
  misc_feature (3)..(496): Homolog of NCBI NO: 25404938 NR Description: protein F1N19.15 [imported] - Arabidopsis >gi|6633829|gb|AAF19688.1|AC009519_22 F1N19.15 [Arabidopsis
  misc_feature (30)..(491): Homolog of NCBI NO: 6630449 NR Description: F23N19.8 [Arabidopsis thaliana]
  misc_feature (61)..(491): Homolog of NCBI NO: 15221558 NR Description: PPR-repeat protein; protein id: At1g62720.1
MRFFQLHRNRLVKGNSGKALSFSRLLDLSFWVRAFCNYREILRNGLHSLQFNEALDLFTHMVESRPLPSIIDFTKLLNVIAKMKKFDVVINLCDHLQIMGVSHDLYTCNLLMNCFCQSSQPYLASSFLGKMMKLGFEPDIVTFTSLINGFCLGNRMEEAMSMVNQMVEMGIKPDVVMYTTIIDSLCKNGHVNYALSLFDQMENYGIRPDVVMYTSLVNGLCNSGRWRDADSLLRGMTKRKIKPDVITFNALIDAFVKEGKFLDAEELYNEMIRMSIAPNIFTYTSLINGFCMEGCVDEARQMFYLMETKGCFPDVVAYTSLINGFCKCKKVDDAMKIFYEMSQKGLTGNTITYTTLIQGFGQVGKPNVAQEVFSHMVSRGVPPNIRTYNVLLHCLCYNGKVKKALMIFEDMQKREMDGVAPNIWTYNVLLHGLCYNGKLEKALMVFEDMRKREMDIGIITYTIIIQGMCKAGKVKNAVNLFCSLPSKGVKPNVVTYTTMISGLFREGLKHEAHVLFRKMKEDGVS

SEQ ID NO: 70014 - protein, 465 aa, Arabidopsis thaliana
  peptide (1)..(465): Ceres Seq. ID no. 2131156
  misc_feature (221)..(255): Pfam Name: PPR repeat Pfam Description: PPR repeat
  misc_feature (1)..(465): Homolog of NCBI NO: 15237575 NR Description: salt-inducible protein-like; protein id:
  misc_feature (1)..(436): Homolog of NCBI NO: 11994626 NR Description: contains similarity to salt-inducible
  misc_feature (1)..(436): Homolog of NCBI NO: 15228287 NR Description: hypothetical protein; protein id: At3g16710.1
  misc_feature (1)..(432): Homolog of NCBI NO: 15237384 NR Description: putative protein; protein id: At5g16640.1 thaliana] >gi|10176973|dbj|BAB10191.1|
  misc_feature (1)..(435): Homolog of NCBI NO: 6630464 NR Description: F23N19.4 [Arabidopsis thaliana]
  misc_feature (1)..(435): Homolog of NCBI NO: 15221550 NR Description: PPR-repeat protein; protein id: At1g62680.1
  misc_feature (1)..(436): Homolog of NCBI NO: 15217683 NR Description: hypothetical protein; protein id: At1g64580.1
  misc_feature (1)..(436): Homolog of NCBI NO: 25404938 NR Description: protein F1N19.15 [imported] - Arabidopsis >gi|6633829|gb|AAF19688.1|AC009519_22 F1N19.15 [Arabidopsis
  misc_feature (1)..(431): Homolog of NCBI NO: 6630449 NR Description: F23N19.8 [Arabidopsis thaliana]
  misc_feature (1)..(431): Homolog of NCBI NO: 15221558 NR Description: PPR-repeat protein; protein id: At1g62720.1
MVESRPLPSIIDFTKLLNVIAKMKKFDVVINLCDHLQIMGVSHDLYTCNLLMNCFCQSSQPYLASSFLGKMMKLGFEPDIVTFTSLINGFCLGNRMEEAMSMVNQMVEMGIKPDVVMYTTIIDSLCKNGHVNYALSLFDQMENYGIRPDVVMYTSLVNGLCNSGRWRDADSLLRGMTKRKIKPDVITFNALIDAFVKEGKFLDAEELYNEMIRMSIAPNIFTYTSLINGFCMEGCVDEARQMFYLMETKGCFPDVVAYTSLINGFCKCKKVDDAMKIFYEMSQKGLTGNTITYTTLIQGFGQVGKPNVAQEVFSHMVSRGVPPNIRTYNVLLHCLCYNGKVKKALMIFEDMQKREMDGVAPNIWTYNVLLHGLCYNGKLEKALMVFEDMRKREMDIGIITYTIIIQGMCKAGKVKNAVNLFCSLPSKGVKPNVVTYTTMISGLFREGLKHEAHVLFRKMKEDGVS

SEQ ID NO: 70015 - DNA, 2100 bp, Arabidopsis thaliana
  misc_feature (1)..(2100): Ceres Seq. ID no. 2133275
  misc_feature: MA Experiment ID: 20000328 Result: Up-regulated in Transcription
  misc_feature: MA Experiment 20000328 PARAMETER Experiment Name: At_42deg_Heat_Sub_P Parameter: Age (day) Value: 14
  misc_feature: MA Experiment 20000328 PARAMETER Experiment Name: At_42deg_Heat_Sub_P Parameter: Organism Value: A. thaliana
  misc_feature: MA Experiment 20000328 PARAMETER Experiment Name: At_42deg_Heat_Sub_P Parameter: Plant Line Value: WS
  misc_feature: MA Experiment 20000328 PARAMETER Experiment Name: At_42deg_Heat_Sub_P Parameter: Temperature (deg C) Value: 42 vs. 22
  misc_feature: MA Experiment 20000328 PARAMETER Experiment Name: At_42deg_Heat_Sub_P Parameter: Timepoint (hr) Value: 6
  misc_feature: MA Experiment 20000328 PARAMETER Experiment Name: At_42deg_Heat_Sub_P Parameter: Tissue Value: Aerial
atggcggacgcagaaacctttgctttccaagctgagatcaaccagttgctctccctcatcatcaataccttttactctaacaaggagatcttccttcgtgaactcatcagtaactcttctgatgctttggacaagattaggtttgagtccttgacagacaagagcaagctcgatggtcagccagagctcttcattcacatcattcccgacaagactaacaacaccttgacgattatcgatagtggtattgggatgaccaaggctgatctggtgaacaaccttggaacaattgcaagatctggaaccaaagaattcatggaggcgttggctgctggagctgatgttagcatgattggacagtttggtgttggtttctactctgcttacttggttgctgacaaggttgttgttactaccaagcacaatgacgatgagcagtacgtgtgggagtctcaggccggtggatctttcaccgtcaccagagacacctctggtgaggctcttggtagaggaactaagatggtcctttacctcaaggaagaccagatggagtacattgaggagcgaaggcttaaggatttggtgaagaagcactctgagttcatcagctacccaatctctctctggattgagaagaccattgagaaggagatctctgatgatgaagaggaggaagagaagaaggatgaggaaggcaaggttgaggaagttgatgaggagaaagaaaaggaggagaagaaaaagaagaagattaaggaggtttctcatgagtgggatttggtgaacaagcagaaaccgatttggatgaggaagccagaggagatcaacaaggaggagtacgctgctttctacaagagtttgagcaatgactgggaagagcatttggctgtgaagcatttctcagttgaaggacagcttgagttcaaagctatcctctttgttcccaagagagctccttttgatctctttgacactaagaagaagcccaacaacatcaagctctatgtccgtcgtgtcttcatcatggacaactgtgaagacatcattcctgagtaccttgggtttgtcaagggtattgttgactctgaagatcttcctctcaacatctcaagagaaacattgcagcagaacaagatcctcaaggtcatccgcaagaaccttgtgaagaagtgtcttgagctcttctttgagattgctgagaacaaggaggactacaacaagttctatgaggctttctctaagaacctgaagctcggtatccatgaggactcccaaaacagaaccaagattgctgagttgctccgttaccactcaaccaagagcggtgatgaattgaccagtctcaaggactacgtgacaaggatgaaggaaggtcagaacgatatcttctatatcactggtgagagcaagaaggctgttgagaactctccattccttgagaagctcaagaagaagggtattgaagttctctacatggttgacgctatcgatgagtatgctattggtcagctcaaggaattcgaaggaaagaagcttgtctctgcaaccaaggaaggtctgaaactggatgagactgaagacgagaagaagaagaaagaagagctcaaggagaagtttgagggactctgcaaagtgatcaaggacgttttgggagacaaggttgagaaggttatcgtctctgaccgtgttgtggactcaccctgctgtcttgtaacaggcgagtatggctggactgcaaacatggagaggatcatgaaagctcaagccttgagagacagcagcatgggtggctacatgtcgagcaagaagacaatggagattaacccagagaactccatcatggatgagctgagaaagagagctgatgcagacaagaacgacaagtctgtgaaggaccttgtacttcttctctttgagaccgctcttctcacttctggtttcagcctcgatgagcccaacactttcgggagcaggattcacaggatgttgaagcttggattgagcattgatgacgatgatgttgttgaagccgatgctgacatgcctccacttgaagatgatgccgatgctgaaggtagcaagatggaggaagttgactaa

SEQ ID NO: 70016 - protein, 699 aa, Arabidopsis thaliana; identical to SEQ ID NO: 49702
  peptide (1)..(699): Ceres Seq. ID no. 2133276
  misc_feature (27)..(181): Pfam Name: Histidine kinase-, DNA gyrase B-, and HSP90-like ATPase Pfam Description: Histidine kinase-, DNA gyrase B-, and
  misc_feature (211)..(699): Homolog of NCBI NO: 29145077 NR Description: heat shock protein, 1 [Mus musculus]
  misc_feature (3)..(280): Homolog of NCBI NO: 29145077 NR Description: heat shock protein, 1 [Mus musculus]
  misc_feature (1)..(699): Homolog of NCBI NO: 31415498 NR Description: HSP90 [Toxoplasma gondii]
  misc_feature (1)..(699): Homolog of NCBI NO: 32405738 NR Description: hypothetical protein ( (AL513463) heat shock
  misc_feature (3)..(699): Homolog of NCBI NO: 30313869 NR Description: heat shock protein 90 alpha; heat shock protein
  misc_feature (4)..(697): Homolog of NCBI NO: 6755863 NR Description: tumor rejection antigen gp96; tumor rejection (gp96) 1 [Mus musculus] >gi|119362|sp|P08113|ENPL_MOUSE
  misc_feature (4)..(697): Homolog of NCBI NO: 14714615 NR Description: tumor rejection antigen gp96 [Mus musculus]
  misc_feature (4)..(699): Homolog of NCBI NO: 27807263 NR Description: tumor rejection antigen (gp96) 1 [Bos taurus]
  misc_feature (4)..(699): Homolog of NCBI NO: 4507677 NR Description: tumor rejection antigen (gp96) 1; Tumor rejection (gp96) [Homo sapiens] >gi|119360|sp|P14625|ENPL_HUMAN Endoplasmin
  misc_feature (4)..(699): Homolog of NCBI NO: 7441885 NR Description: protein kinase ppk98 (EC 2.7.1.-) precursor,

SEQ ID NO: 70017 - protein, 615 aa, Arabidopsis thaliana; identical to SEQ ID NO: 49703
  peptide (1)..(615): Ceres Seq. ID no. 2133277
  misc_feature (1)..(97): Pfam Name: Histidine kinase-, DNA gyrase B-, and HSP90-like ATPase Pfam Description: Histidine kinase-, DNA gyrase B-, and
  misc_feature (127)..(615): Homolog of NCBI NO: 29145077 NR Description: heat shock protein, 1 [Mus musculus]
  misc_feature (1)..(196): Homolog of NCBI NO: 29145077 NR Description: heat shock protein, 1 [Mus musculus]
  misc_feature (1)..(615): Homolog of NCBI NO: 31415498 NR Description: HSP90 [Toxoplasma gondii]
  misc_feature (1)..(615): Homolog of NCBI NO: 32405738 NR Description: hypothetical protein ( (AL513463) heat shock
  misc_feature (1)..(615): Homolog of NCBI NO: 30313869 NR Description: heat shock protein 90 alpha; heat shock protein
  misc_feature (1)..(613): Homolog of NCBI NO: 6755863 NR Description: tumor rejection antigen gp96; tumor rejection (gp96) 1 [Mus musculus] >gi|119362|sp|P08113|ENPL_MOUSE
  misc_feature (1)..(613): Homolog of NCBI NO: 14714615 NR Description: tumor rejection antigen gp96 [Mus musculus]
  misc_feature (1)..(615): Homolog of NCBI NO: 27807263 NR Description: tumor rejection antigen (gp96) 1 [Bos taurus]
  misc_feature (1)..(615): Homolog of NCBI NO: 4507677 NR Description: tumor rejection antigen (gp96) 1; Tumor rejection (gp96) [Homo sapiens] >gi|119360|sp|P14625|ENPL_HUMAN Endoplasmin
  misc_feature (1)..(615): Homolog of NCBI NO: 7441885 NR Description: protein kinase ppk98 (EC 2.7.1.-) precursor,

SEQ ID NO: 70018 - protein, 594 aa, Arabidopsis thaliana
  peptide (1)..(594): Ceres Seq. ID no. 2133278
  misc_feature (1)..(76): Pfam Name: Histidine kinase-, DNA gyrase B-, and HSP90-like ATPase Pfam Description: Histidine kinase-, DNA gyrase B-, and
  misc_feature (106)..(594): Homolog of NCBI NO: 29145077 NR Description: heat shock protein, 1 [Mus musculus]
  misc_feature (1)..(175): Homolog of NCBI NO: 29145077 NR Description: heat shock protein, 1 [Mus musculus]
  misc_feature (1)..(594): Homolog of NCBI NO: 31415498 NR Description: HSP90 [Toxoplasma gondii]
  misc_feature (1)..(594): Homolog of NCBI NO: 32405738 NR Description: hypothetical protein ( (AL513463) heat shock
  misc_feature (1)..(594): Homolog of NCBI NO: 30313869 NR Description: heat shock protein 90 alpha; heat shock protein
  misc_feature (1)..(592): Homolog of NCBI NO: 6755863 NR Description: tumor rejection antigen gp96; tumor rejection (gp96) 1 [Mus musculus] >gi|119362|sp|P08113|ENPL_MOUSE
  misc_feature (1)..(592): Homolog of NCBI NO: 14714615 NR Description: tumor rejection antigen gp96 [Mus musculus]
  misc_feature (1)..(594): Homolog of NCBI NO: 27807263 NR Description: tumor rejection antigen (gp96) 1 [Bos taurus]
  misc_feature (1)..(594): Homolog of NCBI NO: 4507677 NR Description: tumor rejection antigen (gp96) 1; Tumor rejection (gp96) [Homo sapiens] >gi|119360|sp|P14625|ENPL_HUMAN Endoplasmin
  misc_feature (1)..(594): Homolog of NCBI NO: 7441885 NR Description: protein kinase ppk98 (EC 2.7.1.-) precursor,
MEALAAGADVSMIGQFGVGFYSAYLVADKVVVTTKHNDDEQYVWESQAGGSFTVTRDTSGEALGRGTKMVLYLKEDQMEYIEERRLKDLVKKHSEFISYPISLWIEKTIEKEISDDEEEEEKKDEEGKVEEVDEEKEKEEKKKKKIKEVSHEWDLVNKQKPIWMRKPEEINKEEYAAFYKSLSNDWEEHLAVKHFSVEGQLEFKAILFVPKRAPFDLFDTKKKPNNIKLYVRRVFIMDNCEDIIPEYLGFVKGIVDSEDLPLNISRETLQQNKILKVIRKNLVKKCLELFFEIAENKEDYNKFYEAFSKNLKLGIHEDSQNRTKIAELLRYHSTKSGDELTSLKDYVTRMKEGQNDIFYITGESKKAVENSPFLEKLKKKGIEVLYMVDAIDEYAIGQLKEFEGKKLVSATKEGLKLDETEDEKKKKEELKEKFEGLCKVIKDVLGDKVEKVIVSDRVVDSPCCLVTGEYGWTANMERIMKAQALRDSSMGGYMSSKKTMEINPENSIMDELRKRADADKNDKSVKDLVLLLFETALLTSGFSLDEPNTFGSRIHRMLKLGLSIDDDDVVEADADMPPLEDDADAEGSKMEEVD

SEQ ID NO: 70019 - DNA, 420 bp, Arabidopsis thaliana
  misc_feature (1)..(420): Ceres Seq. ID no. 2133633
  misc_feature: MA Experiment ID: 20000306 Result: Up-regulated in Transcription
  misc_feature: MA Experiment 20000306 PARAMETER Experiment Name: At_Germinating_Seeds_Sub_P Parameter: Age (hr) Value: 6 vs. 0
  misc_feature: MA Experiment 20000306 PARAMETER Experiment Name: At_Germinating_Seeds_Sub_P Parameter: Organism Value: A. thaliana
  misc_feature: MA Experiment 20000306 PARAMETER Experiment Name: At_Germinating_Seeds_Sub_P Parameter: Plant Line Value: WS
  misc_feature: MA Experiment 20000306 PARAMETER Experiment Name: At_Germinating_Seeds_Sub_P Parameter: Tissue Value: Germinating Seeds
  misc_feature: MA Experiment ID: 20000307 Result: Up-regulated in Transcription
  misc_feature: MA Experiment 20000307 PARAMETER Experiment Name: At_Germinating_Seeds_Sub_P Parameter: Age (hr) Value: 24 vs. 0
  misc_feature: MA Experiment 20000307 PARAMETER Experiment Name: At_Germinating_Seeds_Sub_P Parameter: Organism Value: A. thaliana
  misc_feature: MA Experiment 20000307 PARAMETER Experiment Name: At_Germinating_Seeds_Sub_P Parameter: Plant Line Value: WS
  misc_feature: MA Experiment 20000307 PARAMETER Experiment Name: At_Germinating_Seeds_Sub_P Parameter: Tissue Value: Germinating Seeds
  misc_feature: MA Experiment ID: 20000315 Result: Down-regulated in Transcription
  misc_feature: MA Experiment 20000315 PARAMETER Experiment Name: At_14day_Shoots-Roots_Sub_P Parameter: Age (day) Value: 14
  misc_feature: MA Experiment 20000315 PARAMETER Experiment Name: At_14day_Shoots-Roots_Sub_P Parameter: Organism Value: A. thaliana
  misc_feature: MA Experiment 20000315 PARAMETER Experiment Name: At_14day_Shoots-Roots_Sub_P Parameter: Plant Line Value: WS
  misc_feature: MA Experiment 20000315 PARAMETER Experiment Name: At_14day_Shoots-Roots_Sub_P Parameter: Tissue Value: Shoots vs. Whole Plant
  misc_feature: MA Experiment ID: 20000328 Result: Down-regulated in Transcription
  misc_feature: MA Experiment 20000328 PARAMETER Experiment Name: At_42deg_Heat_Sub_P Parameter: Age (day) Value: 14
  misc_feature: MA Experiment 20000328 PARAMETER Experiment Name: At_42deg_Heat_Sub_P Parameter: Organism Value: A. thaliana
  misc_feature: MA Experiment 20000328 PARAMETER Experiment Name: At_42deg_Heat_Sub_P Parameter: Plant Line Value: WS
  misc_feature: MA Experiment 20000328 PARAMETER Experiment Name: At_42deg_Heat_Sub_P Parameter: Temperature (deg C) Value: 42 vs. 22
  misc_feature: MA Experiment 20000328 PARAMETER Experiment Name: At_42deg_Heat_Sub_P Parameter: Timepoint (hr) Value: 6
  misc_feature: MA Experiment 20000328 PARAMETER Experiment Name: At_42deg_Heat_Sub_P Parameter: Tissue Value: Aerial
atggctcgtaccaagcagactgctagaatatccaccggaggaaaagctccgaggaagcaattagcgccaaaagcggcgagacaatctgcaccagcaacgggaggagtgaagaagccacacagattccgtccaggaactgttgcgttgagagatattaggaaataccaaaagagtaccgagattttgatcagaaagcttccgtttcagcgacttgttcgtgagatcgctcaagatttcaaaacggatctgaggtttcagagcagtgccgtcgctgctctccaggaagctgctgaggcttaccttgttgggttattcgaagatacaaacctctgtgcgattcacgcaaagagggtgacgatcatgcctaaagagatccaattagcgagaaggattagaggtgagagagctcgaggagagtga

SEQ ID NO: 70020 - protein, 139 aa, Arabidopsis thaliana
  peptide (1)..(139): Ceres Seq. ID no. 2133634
  misc_feature (17)..(135): Pfam Name: Core histone H2A/H2B/H3/H4 Pfam Description: Core histone H2A/H2B/H3/H4
  misc_feature (1)..(136): Homolog of NCBI NO: 15232146 NR Description: histone H3, putative; protein id: At3g27360.1, by cDNA: gi_14335141, supported by cDNA: gi_18655352 [Arabidopsis >gi|15238433|ref|NP_201339.1| histone H3 (sp|P05203); id:
  misc_feature (1)..(136): Homolog of NCBI NO: 122087 NR Description: Histone H3 >gi|81849|pir||S04520 histone H3
  misc_feature (1)..(136): Homolog of NCBI NO: 1362108 NR Description: histone H3 homolog - common tobacco
  misc_feature (1)..(136): Homolog of NCBI NO: 166384 NR Description: histone H3 (H3-1.1)
  misc_feature (2)..(136): Homolog of NCBI NO: 70753 NR Description: histone H3 - garden pea (tentative sequence)
  misc_feature (1)..(139): Homolog of NCBI NO: 15238430 NR Description: histone H3; protein id: At5g65350.1 [Arabidopsis
  misc_feature (2)..(136): Homolog of NCBI NO: 122083 NR Description: Histone H3 >gi|70751|pir||HSEAH3 histone H3 -
  misc_feature (1)..(136): Homolog of NCBI NO: 122070 NR Description: Histone H3 >gi|82483|pir||A25564 histone H3 - >gi|169793|gb|AAA33907.1| histone 3 >gi|940018|gb|AAA74190.1|
  misc_feature (1)..(136): Homolog of NCBI NO: 7305139 NR Description: histone 1, H3f; histone gene complex 1 [Mus
  misc_feature (1)..(136): Homolog of NCBI NO: 30061401 NR Description: histone 2, H3ca1 [Mus musculus]
MARTKQTARISTGGKAPRKQLAPKAARQSAPATGGVKKPHRFRPGTVALRDIRKYQKSTEILIRKLPFQRLVREIAQDFKTDLRFQSSAVAALQEAAEAYLVGLFEDTNLCAIHAKRVTIMPKEIQLARRIRGERARGE

SEQ ID NO: 70021 - DNA, 672 bp, Arabidopsis thaliana
  misc_feature (1)..(672): Ceres Seq. ID no. 2133726
  misc_feature: MA Experiment ID: 20000171 Result: Up-regulated in Transcription
  misc_feature: MA Experiment 20000171 PARAMETER Experiment Name: At_42deg_Heat_P Parameter: Age (day) Value: 14
  misc_feature: MA Experiment 20000171 PARAMETER Experiment Name: At_42deg_Heat_P Parameter: Organism Value: A. thaliana
  misc_feature: MA Experiment 20000171 PARAMETER Experiment Name: At_42deg_Heat_P Parameter: Plant Line Value: WS
  misc_feature: MA Experiment 20000171 PARAMETER Experiment Name: At_42deg_Heat_P Parameter: Temperature (deg C) Value: 42 vs. 22
  misc_feature: MA Experiment 20000171 PARAMETER Experiment Name: At_42deg_Heat_P Parameter: Timepoint (hr) Value: 1
  misc_feature: MA Experiment 20000171 PARAMETER Experiment Name: At_42deg_Heat_P Parameter: Tissue Value: Aerial
  misc_feature: MA Experiment ID: 20000265 Result: Up-regulated in Transcription
  misc_feature: MA Experiment 20000265 PARAMETER Experiment Name: At_Open_Flower_P Parameter: Age (day) Value: 21
  misc_feature: MA Experiment 20000265 PARAMETER Experiment Name: At_Open_Flower_P Parameter: Plant Line Value: WS
  misc_feature: MA Experiment 20000265 PARAMETER Experiment Name: At_Open_Flower_P Parameter: Tissue Value: Closed Flower vs. Whole Plant
atgagctcgttatcaaaaccaaacagacaatttttgtcaccaacaacaaacaaccaagacaccggcagagaacaaacaatcgcctgcgcccgagatatggttgtcttgtacaacgagtgccttaaaaaccacgcggtcagtctcggaggccacgctcttgacggctgcggtgagttcacaccaaagtcaaccaccatcctcacggaccctccgtcccttaggtgcgatgcttgtggctgccatcgcaacttccaccgtcgtagtccttctgacggcttcagtcagcaccggtcaccaccgtctccgttacagctgcagccactcgcccctgttccgaacttgcttctctctcttagctccggtttctttggaccctcggatcaagaagtcaagaacaaatttacggtggaaagggatgttaggaagactgcgatgattaagaaacataagaggacgaaattcacggcggagcagaaggtgaagatgagaggtttcgcggagagagcggggtggaagattaacggctgggatgagaagtgggtgagagagttttgtagtgaagttggaatagagagaaaagttcttaaggtttggatccacaacaataagtactttaacaacgggaggagcagagacacgacgtcctctatgtctttgaatttgaagttgtag

SEQ ID NO: 70022 - protein, 223 aa, Arabidopsis thaliana
  peptide (1)..(223): Ceres Seq. ID no. 2133727
  misc_feature (32)..(93): Pfam Name: ZF-HD protein dimerisation region Pfam Description: ZF-HD protein dimerisation region
  misc_feature (1)..(223): Homolog of NCBI NO: 9757750 NR Description: gb|AAF24606.1~gene_id:MUF9.11~similar to unknown
  misc_feature (33)..(223): Homolog of NCBI NO: 15239341 NR Description: putative protein; protein id: At5g60480.1
  misc_feature (1)..(220): Homolog of NCBI NO: 15222382 NR Description: hypothetical protein; protein id: At1g69600.1
  misc_feature (33)..(107): Homolog of NCBI NO: 18421904 NR Description: putative protein; protein id: At5g39760.1, by cDNA: 249321., supported by cDNA: gi_20259469 [Arabidopsis >gi|10177976|dbj|BAB11382.1| gene_id:MKM21.8~pir||T00609~similar
  misc_feature (147)..(209): Homolog of NCBI NO: 18421904 NR Description: putative protein; protein id: At5g39760.1, by cDNA: 249321., supported by cDNA: gi_20259469 [Arabidopsis >gi|10177976|dbj|BAB11382.1| gene_id:MKM21.8~pir||T00609~similar
  misc_feature (33)..(102): Homolog of NCBI NO: 21592512 NR Description: unknown [Arabidopsis thaliana]
  misc_feature (147)..(209): Homolog of NCBI NO: 21592512 NR Description: unknown [Arabidopsis thaliana]
  misc_feature (35)..(219): Homolog of NCBI NO: 13277216 NR Description: ZF-HD homeobox protein [Flaveria trinervia]
  misc_feature (35)..(219): Homolog of NCBI NO: 13277218 NR Description: ZF-HD homeobox protein [Flaveria bidentis]
  misc_feature (31)..(104): Homolog of NCBI NO: 15226993 NR Description: hypothetical protein; protein id: At2g02540.1, by cDNA: gi_20148767 [Arabidopsis thaliana]
MSSLSKPNRQFLSPTTNNQDTGREQTIACARDMVVLYNECLKNHAVSLGGHALDGCGEFTPKSTTILTDPPSLRCDACGCHRNFHRRSPSDGFSQHRSPPSPLQLQPLAPVPNLLLSLSSGFFGPSDQEVKNKFTVERDVRKTAMIKKHKRTKFTAEQKVKMRGFAERAGWKINGWDEKWVREFCSEVGIERKVLKVWIHNNKYFNNGRSRDTTSSMSLNLKL

SEQ ID NO: 70023 - protein, 191 aa, Arabidopsis thaliana
  peptide (1)..(191): Ceres Seq. ID no. 2133728
  misc_feature (1)..(61): Pfam Name: ZF-HD protein dimerisation region Pfam Description: ZF-HD protein dimerisation region
  misc_feature (1)..(191): Homolog of NCBI NO: 9757750 NR Description: gb|AAF24606.1~gene_id:MUF9.11~similar to unknown
  misc_feature (1)..(191): Homolog of NCBI NO: 15239341 NR Description: putative protein; protein id: At5g60480.1
  misc_feature (1)..(188): Homolog of NCBI NO: 15222382 NR Description: hypothetical protein; protein id: At1g69600.1
  misc_feature (1)..(75): Homolog of NCBI NO: 18421904 NR Description: putative protein; protein id: At5g39760.1, by cDNA: 249321., supported by cDNA: gi_20259469 [Arabidopsis >gi|10177976|dbj|BAB11382.1| gene_id:MKM21.8~pir||T00609~similar
  misc_feature (115)..(177): Homolog of NCBI NO: 18421904 NR Description: putative protein; protein id: At5g39760.1, by cDNA: 249321., supported by cDNA: gi_20259469 [Arabidopsis >gi|10177976|dbj|BAB11382.1| gene_id:MKM21.8~pir||T00609~similar
  misc_feature (1)..(70): Homolog of NCBI NO: 21592512 NR Description: unknown [Arabidopsis thaliana]
  misc_feature (115)..(177): Homolog of NCBI NO: 21592512 NR Description: unknown [Arabidopsis thaliana]
  misc_feature (3)..(187): Homolog of NCBI NO: 13277216 NR Description: ZF-HD homeobox protein [Flaveria trinervia]
  misc_feature (3)..(187): Homolog of NCBI NO: 13277218 NR Description: ZF-HD homeobox protein [Flaveria bidentis]
  misc_feature (1)..(72): Homolog of NCBI NO: 15226993 NR Description: hypothetical protein; protein id: At2g02540.1, by cDNA: gi_20148767 [Arabidopsis thaliana]
MVVLYNECLKNHAVSLGGHALDGCGEFTPKSTTILTDPPSLRCDACGCHRNFHRRSPSDGFSQHRSPPSPLQLQPLAPVPNLLLSLSSGFFGPSDQEVKNKFTVERDVRKTAMIKKHKRTKFTAEQKVKMRGFAERAGWKINGWDEKWVREFCSEVGIERKVLKVWIHNNKYFNNGRSRDTTSSMSLNLKL

SEQ ID NO: 70024 - DNA, 1080 bp, Arabidopsis thaliana
  misc_feature (1)..(1080): Ceres Seq. ID no. 2134333
  misc_feature: MA Experiment ID: 20000173 Result: Down-regulated in Transcription
  misc_feature: MA Experiment 20000173 PARAMETER Experiment Name: At_42deg_Heat_P Parameter: Age (day) Value: 14
  misc_feature: MA Experiment 20000173 PARAMETER Experiment Name: At_42deg_Heat_P Parameter: Organism Value: A. thaliana
  misc_feature: MA Experiment 20000173 PARAMETER Experiment Name: At_42deg_Heat_P Parameter: Plant Line Value: WS
  misc_feature: MA Experiment 20000173 PARAMETER Experiment Name: At_42deg_Heat_P Parameter: Temperature (deg C) Value: 42 vs. 22
  misc_feature: MA Experiment 20000173 PARAMETER Experiment Name: At_42deg_Heat_P Parameter: Timepoint (hr) Value: 6
  misc_feature: MA Experiment 20000173 PARAMETER Experiment Name: At_42deg_Heat_P Parameter: Tissue Value: Aerial
  misc_feature: MA Experiment ID: 20000182 Result: Up-regulated in Transcription
  misc_feature: MA Experiment 20000182 PARAMETER Experiment Name: At_2mM_SA_P Parameter: Age (day) Value: 14
  misc_feature: MA Experiment 20000182 PARAMETER Experiment Name: At_2mM_SA_P Parameter: Organism Value: A. thaliana
  misc_feature: MA Experiment 20000182 PARAMETER Experiment Name: At_2mM_SA_P Parameter: Plant Line Value: WS
  misc_feature: MA Experiment 20000182 PARAMETER Experiment Name: At_2mM_SA_P Parameter: Timepoint (hr) Value: 6
  misc_feature: MA Experiment 20000182 PARAMETER Experiment Name: At_2mM_SA_P Parameter: Tissue Value: Aerial
  misc_feature: MA Experiment 20000182 PARAMETER Experiment Name: At_2mM_SA_P Parameter: Treatment Value: 2mM SA vs. No Treatment
  misc_feature: MA Experiment ID: 20001557 Result: Down-regulated in Transcription
  misc_feature: MA Experiment 20001557 PARAMETER Experiment Name: At_Drought_Soil_Dry_P Parameter: Age (day) Value: 27
  misc_feature: MA Experiment 20001557 PARAMETER Experiment Name: At_Drought_Soil_Dry_P Parameter: Organism Value: A. thaliana
  misc_feature: MA Experiment 20001557 PARAMETER Experiment Name: At_Drought_Soil_Dry_P Parameter: Plant Line Value: WS
  misc_feature: MA Experiment 20001557 PARAMETER Experiment Name: At_Drought_Soil_Dry_P Parameter: Post Timepoint (hr) Value: 3
  misc_feature: MA Experiment 20001557 PARAMETER Experiment Name: At_Drought_Soil_Dry_P Parameter: Post-Treatment Value: Re-Water vs. No Drought
  misc_feature: MA Experiment 20001557 PARAMETER Experiment Name: At_Drought_Soil_Dry_P Parameter: Timepoint (day) Value: 13
  misc_feature: MA Experiment 20001557 PARAMETER Experiment Name: At_Drought_Soil_Dry_P Parameter: Treatment Value: Drought vs. No Drought
atggcgagaagcgatgttttgatttttgtttctactcttcttctgtttctgtctctgcttacggtagctgatgcggaattggtgaaatctgacaagtttccggtagtggtgagtacttggcctttccttgaagctgttagagctgcttggagagcagttgataatgggagctctgcagtggaagctgttgttgaaggttgttctgcttgtgaagaacttcgttgtgacggtacagttgggcctggaggaagtccggatgagaatggtgagaccatgattgatgctttagtcatggatggggtgactatggaggttggagctgttgctgcaatgcggtatgttaaagacggtataagagctgcacatctagtgatgaaatactctcaacacacgttgcttgccggagaaggagcatcagcatttgcaatctccatgggtctccccggacccatgaacctaagctcccctgaatctgtaaagaagtggtcggactggaaagagaatcagtgtcaacccaatttcaggaagaatgtagtccccgcaaatgactgtggaccttacaagccaaacaatagtgctatgaatgtttttgtagacaaaagcactgaatcttgcgagatgggggcgattgagtataaacctcctcttgttggtcctcacaatcacgatacgatatcgatggctgtcattgacagaatggggcatatagctgttgggacatcgaccaatggagccacatataaaattcctggaagggttggtgatgggcctatcgtcggttcatcagcctacgctgatgatgaagtaggtggatgtggtgcaactggagatggtgacaccatgatgcgcttcctcccttgttaccaagttgtggagagcatgagacaaggaatgaaaccagaagaagctgctaaagatgcaatctcgagaatcgcaaggaagtttccagatttcgtgggagcagttgtggctgttgacaagaacggatctcacgcaggagcttgctatggctggacgtttcagtactcagtccaaaaccctgacatgaacgatgttcaagtctttacagttcttccatga

SEQ ID NO: 70025 - protein, 359 aa, Arabidopsis thaliana
  peptide (1)..(359): Ceres Seq. ID no. 2134334
  misc_feature (22)..(356): Pfam Name: Asparaginase Pfam Description: Asparaginase
  misc_feature (5)..(359): Homolog of NCBI NO: 15240278 NR Description: glycosylasparaginase - like protein; protein id:
  misc_feature (1)..(357): Homolog of NCBI NO: 31239653 NR Description: ENSANGP00000016583 [Anopheles gambiae]
  misc_feature (34)..(357): Homolog of NCBI NO: 6685237 NR Description: N(4)-(Beta-N-acetylglucosaminyl)-L-asparaginase
  misc_feature (21)..(347): Homolog of NCBI NO: 28573318 NR Description: CG1827-PA [Drosophila melanogaster]
  misc_feature (35)..(351): Homolog of NCBI NO: 40882569 NR Description: AT24323p [Drosophila melanogaster]
  misc_feature (35)..(347): Homolog of NCBI NO: 24652135 NR Description: CG1827-PB [Drosophila melanogaster]
  misc_feature (11)..(335): Homolog of NCBI NO: 20863490 NR Description: aspartylglucosaminidase [Mus musculus]
  misc_feature (27)..(350): Homolog of NCBI NO: 4557273 NR Description: aspartylglucosaminidase precursor [Homo sapiens]
  misc_feature (30)..(350): Homolog of NCBI NO: 732508 NR Description: lysosomal glycosylasparaginase [Homo sapiens]
  misc_feature (27)..(350): Homolog of NCBI NO: 183330 NR Description: glycosylasparaginase
MARSDVLIFVSTLLLFLSLLTVADAELVKSDKFPVVVSTWPFLEAVRAAWRAVDNGSSAVEAVVEGCSACEELRCDGTVGPGGSPDENGETMIDALVMDGVTMEVGAVAAMRYVKDGIRAAHLVMKYSQHTLLAGEGASAFAISMGLPGPMNLSSPESVKKWSDWKENQCQPNFRKNVVPANDCGPYKPNNSAMNVFVDKSTESCEMGAIEYKPPLVGPHNHDTISMAVIDRMGHIAVGTSTNGATYKIPGRVGDGPIVGSSAYADDEVGGCGATGDGDTMMRFLPCYQVVESMRQGMKPEEAAKDAISRIARKFPDFVGAVVAVDKNGSHAGACYGWTFQYSVQNPDMNDVQVFTVLP

SEQ ID NO: 70026 - protein, 268 aa, Arabidopsis thaliana
  peptide (1)..(268): Ceres Seq. ID no. 2134335
  misc_feature (1)..(265): Pfam Name: Asparaginase Pfam Description: Asparaginase
  misc_feature (1)..(268): Homolog of NCBI NO: 15240278 NR Description: glycosylasparaginase - like protein; protein id:
  misc_feature (1)..(266): Homolog of NCBI NO: 31239653 NR Description: ENSANGP00000016583 [Anopheles gambiae]
  misc_feature (1)..(266): Homolog of NCBI NO: 6685237 NR Description: N(4)-(Beta-N-acetylglucosaminyl)-L-asparaginase
  misc_feature (1)..(256): Homolog of NCBI NO: 28573318 NR Description: CG1827-PA [Drosophila melanogaster]
  misc_feature (1)..(260): Homolog of NCBI NO: 40882569 NR Description: AT24323p [Drosophila melanogaster]
  misc_feature (1)..(256): Homolog of NCBI NO: 24652135 NR Description: CG1827-PB [Drosophila melanogaster]
  misc_feature (1)..(244): Homolog of NCBI NO: 20863490 NR Description: aspartylglucosaminidase [Mus musculus]
  misc_feature (1)..(259): Homolog of NCBI NO: 4557273 NR Description: aspartylglucosaminidase precursor [Homo sapiens]
  misc_feature (1)..(259): Homolog of NCBI NO: 732508 NR Description: lysosomal glycosylasparaginase [Homo sapiens]
  misc_feature (1)..(259): Homolog of NCBI NO: 183330 NR Description: glycosylasparaginase
MIDALVMDGVTMEVGAVAAMRYVKDGIRAAHLVMKYSQHTLLAGEGASAFAISMGLPGPMNLSSPESVKKWSDWKENQCQPNFRKNVVPANDCGPYKPNNSAMNVFVDKSTESCEMGAIEYKPPLVGPHNHDTISMAVIDRMGHIAVGTSTNGATYKIPGRVGDGPIVGSSAYADDEVGGCGATGDGDTMMRFLPCYQVVESMRQGMKPEEAAKDAISRIARKFPDFVGAVVAVDKNGSHAGACYGWTFQYSVQNPDMNDVQVFTVLP

SEQ ID NO: 70027 - protein, 262 aa, Arabidopsis thaliana
  peptide (1)..(262): Ceres Seq. ID no. 2134336
  misc_feature (1)..(259): Pfam Name: Asparaginase Pfam Description: Asparaginase
  misc_feature (1)..(262): Homolog of NCBI NO: 15240278 NR Description: glycosylasparaginase - like protein; protein id:
  misc_feature (1)..(260): Homolog of NCBI NO: 31239653 NR Description: ENSANGP00000016583 [Anopheles gambiae]
  misc_feature (1)..(260): Homolog of NCBI NO: 6685237 NR Description: N(4)-(Beta-N-acetylglucosaminyl)-L-asparaginase
  misc_feature (1)..(250): Homolog of NCBI NO: 28573318 NR Description: CG1827-PA [Drosophila melanogaster]
  misc_feature (1)..(254): Homolog of NCBI NO: 40882569 NR Description: AT24323p [Drosophila melanogaster]
  misc_feature (1)..(250): Homolog of NCBI NO: 24652135 NR Description: CG1827-PB [Drosophila melanogaster]
  misc_feature (1)..(238): Homolog of NCBI NO: 20863490 NR Description: aspartylglucosaminidase [Mus musculus]
  misc_feature (1)..(253): Homolog of NCBI NO: 4557273 NR Description: aspartylglucosaminidase precursor [Homo sapiens]
  misc_feature (1)..(253): Homolog of NCBI NO: 732508 NR Description: lysosomal glycosylasparaginase [Homo sapiens]
  misc_feature (1)..(253): Homolog of NCBI NO: 183330 NR Description: glycosylasparaginase
MDGVTMEVGAVAAMRYVKDGIRAAHLVMKYSQHTLLAGEGASAFAISMGLPGPMNLSSPESVKKWSDWKENQCQPNFRKNVVPANDCGPYKPNNSAMNVFVDKSTESCEMGAIEYKPPLVGPHNHDTISMAVIDRMGHIAVGTSTNGATYKIPGRVGDGPIVGSSAYADDEVGGCGATGDGDTMMRFLPCYQVVESMRQGMKPEEAAKDAISRIARKFPDFVGAVVAVDKNGSHAGACYGWTFQYSVQNPDMNDVQVFTVLP

SEQ ID NO: 70028 - DNA, 1323 bp, Arabidopsis thaliana
  misc_feature (1)..(1323): Ceres Seq. ID no. 2134528
  misc_feature: MA Experiment ID: 20000315 Result: Down-regulated in Transcription
  misc_feature: MA Experiment 20000315 PARAMETER Experiment Name: At_14day_Shoots-Roots_Sub_P Parameter: Age (day) Value: 14
  misc_feature: MA Experiment 20000315 PARAMETER Experiment Name: At_14day_Shoots-Roots_Sub_P Parameter: Organism Value: A. thaliana
  misc_feature: MA Experiment 20000315 PARAMETER Experiment Name: At_14day_Shoots-Roots_Sub_P Parameter: Plant Line Value: WS
  misc_feature: MA Experiment 20000315 PARAMETER Experiment Name: At_14day_Shoots-Roots_Sub_P Parameter: Tissue Value: Shoots vs. Whole Plant
  misc_feature: MA Experiment ID: 20000347 Result: Up-regulated in Transcription
  misc_feature: MA Experiment 20000347 PARAMETER Experiment Name: At_2mM_SA_Sub_P Parameter: Age (day) Value: 14
  misc_feature: MA Experiment 20000347 PARAMETER Experiment Name: At_2mM_SA_Sub_P Parameter: Organism Value: A. thaliana
  misc_feature: MA Experiment 20000347 PARAMETER Experiment Name: At_2mM_SA_Sub_P Parameter: Plant Line Value: WS
  misc_feature: MA Experiment 20000347 PARAMETER Experiment Name: At_2mM_SA_Sub_P Parameter: Timepoint (hr) Value: 6
  misc_feature: MA Experiment 20000347 PARAMETER Experiment Name: At_2mM_SA_Sub_P Parameter: Tissue Value: Aerial
  misc_feature: MA Experiment 20000347 PARAMETER Experiment Name: At_2mM_SA_Sub_P Parameter: Treatment Value: 2mM SA vs. No Treatment
  misc_feature: MA Experiment ID: 20000355 Result: Down-regulated in Transcription
  misc_feature: MA Experiment 20000355 PARAMETER Experiment Name: At_Siliques_Sub_P Parameter: Age (day) Value: 21
  misc_feature: MA Experiment 20000355 PARAMETER Experiment Name: At_Siliques_Sub_P Parameter: Organism Value: A. thaliana
  misc_feature: MA Experiment 20000355 PARAMETER Experiment Name: At_Siliques_Sub_P Parameter: Plant Line Value: WS
  misc_feature: MA Experiment 20000355 PARAMETER Experiment Name: At_Siliques_Sub_P Parameter: Tissue Value: Less Than 5mm Siliques vs. Whole Plant
  misc_feature: MA Experiment ID: 20000440 Result: Down-regulated in Transcription
  misc_feature: MA Experiment 20000440 PARAMETER Experiment Name: At_Closed-Flower__Sub_P Parameter: Tissue Value: Closed Flower vs. Whole Plant
atggatccacagattgttgtagacataaagagtttaatctcagaagataatggtttgaagcttcttagagaatcagctggttcagagttatgttgcatcgtgagaatcccacagagcctcgctcgaatcaacctcaaagcttatgaaccgaagattgtctccattggtccttaccatcacggcaaagagcatctcaaaatgactcagcagcataaacgccgattcttgaagtttttcgtggctaaaatggaagaaaaaggatttgttcctcaagaattggtcaaagctgtatcgagtttggaaggagttatacgaggttcttactccgaggatctaggtttagattctgaaaacttggttcagatgatggttcttgatggttgctttatcctcacgttgttctttgttgtttccgggaaagttgaatacactaatcttgatgatccgatttttcgaatgccgtggattttgccgtcgattcgagcagatcttctccttttggaaaaccaggttccttatgttcttcttcaaactctatttgaaacatcgaagttagttacttgtagtggtttaaacgaaatcgcctttgaattctttaactactcattacaaaaaccagagaccttttgggaaaaacattatggtcttgaagcaaaacatcttcttgatttgatacgtaagacttttgttcctgttccgtctcaaagaagaatcaaagatcatagcagtaaatcgtcattcaatgatcatgaatatctcggatttgttctctctgccaagaagcttcatcttcggggaatcaaattcaaaccgaggaaaaacacagactcaatcttagacattagttatagtaatggtgtgcttcacattcctccggtagtcatggatgattttaccgcctcgatctttttaaactgtgtcgcatttgagcaattatatgctgattcatcgaaccacataacgagctacgtagctttcatggcttgtcttataaacgaagagagtgatgcatcgttccttagcgaaaggaggatcctagagaactattttggaacagaggatgaagtgtcccggttctataaacgcattggtaaagacattgccctcgacttagagaagagttacctagcaaaggtgtttgaaggagttaacgagtatacttctcaaggattccatgttcattgtgcagagtttattcatacgcatttcgatagtccatggacatttgcatcatcatttgcagcgttgttgcttcttctgtttgcggctttgcaagtcttctttgcagcttatagttatttccgtcctccaaaagaaaagtga

SEQ ID NO: 70029 - protein, 440 aa, Arabidopsis thaliana
  peptide (1)..(440): Ceres Seq. ID no. 2134529
  misc_feature (26)..(423): Pfam Name: Plant protein of unknown function Pfam Description: Plant protein of unknown function
  misc_feature (1)..(440): Homolog of NCBI NO: 15242911 NR Description: putative protein; protein id: At5g22540.1 thaliana] >gi|9758660|dbj|BAB09126.1|
  misc_feature (22)..(233): Homolog of NCBI NO: 9758661 NR Description: emb|CAB72473.1~gene_id:MQJ16.9~strong similarity
  misc_feature (252)..(438): Homolog of NCBI NO: 9758661 NR Description: emb|CAB72473.1~gene_id:MQJ16.9~strong similarity
  misc_feature (5)..(241): Homolog of NCBI NO: 15230487 NR Description: putative protein; protein id: At3g44710.1
  misc_feature (232)..(438): Homolog of NCBI NO: 15230487 NR Description: putative protein; protein id: At3g44710.1
  misc_feature (6)..(231): Homolog of NCBI NO: 15242915 NR Description: putative protein; protein id: At5g22560.1 thaliana] >gi|9758662|dbj|BAB09128.1|
  misc_feature (230)..(438): Homolog of NCBI NO: 15242915 NR Description: putative protein; protein id: At5g22560.1 thaliana] >gi|9758662|dbj|BAB09128.1|
  misc_feature (252)..(438): Homolog of NCBI NO: 18420531 NR Description: putative protein; protein id: At5g22550.1,
  misc_feature (136)..(233): Homolog of NCBI NO: 18420531 NR Description: putative protein; protein id: At5g22550.1,
  misc_feature (22)..(93): Homolog of NCBI NO: 18420531 NR Description: putative protein; protein id: At5g22550.1,
MDPQIVVDIKSLISEDNGLKLLRESAGSELCCIVRIPQSLARINLKAYEPKIVSIGPYHHGKEHLKMTQQHKRRFLKFFVAKMEEKGFVPQELVKAVSSLEGVIRGSYSEDLGLDSENLVQMMVLDGCFILTLFFVVSGKVEYTNLDDPIFRMPWILPSIRADLLLLENQVPYVLLQTLFETSKLVTCSGLNEIAFEFFNYSLQKPETFWEKHYGLEAKHLLDLIRKTFVPVPSQRRIKDHSSKSSFNDHEYLGFVLSAKKLHLRGIKFKPRKNTDSILDISYSNGVLHIPPVVMDDFTASIFLNCVAFEQLYADSSNHITSYVAFMACLINEESDASFLSERRILENYFGTEDEVSRFYKRIGKDIALDLEKSYLAKVFEGVNEYTSQGFHVHCAEFIHTHFDSPWTFASSFAALLLLLFAALQVFFAAYSYFRPPKEK

SEQ ID NO: 70030 - protein, 374 aa, Arabidopsis thaliana
  peptide (1)..(374): Ceres Seq. ID no. 2134530
  misc_feature (1)..(357): Pfam Name: Plant protein of unknown function Pfam Description: Plant protein of unknown function
  misc_feature (1)..(374): Homolog of NCBI NO: 15242911 NR Description: putative protein; protein id: At5g22540.1 thaliana] >gi|9758660|dbj|BAB09126.1|
  misc_feature (1)..(167): Homolog of NCBI NO: 9758661 NR Description: emb|CAB72473.1~gene_id:MQJ16.9~strong similarity
  misc_feature (186)..(372): Homolog of NCBI NO: 9758661 NR Description: emb|CAB72473.1~gene_id:MQJ16.9~strong similarity
  misc_feature (1)..(175): Homolog of NCBI NO: 15230487 NR Description: putative protein; protein id: At3g44710.1
  misc_feature (166)..(372): Homolog of NCBI NO: 15230487 NR Description: putative protein; protein id: At3g44710.1
  misc_feature (1)..(165): Homolog of NCBI NO: 15242915 NR Description: putative protein; protein id: At5g22560.1 thaliana] >gi|9758662|dbj|BAB09128.1|
  misc_feature (164)..(372): Homolog of NCBI NO: 15242915 NR Description: putative protein; protein id: At5g22560.1 thaliana] >gi|9758662|dbj|BAB09128.1|
  misc_feature (186)..(372): Homolog of NCBI NO: 18420531 NR Description: putative protein; protein id: At5g22550.1,
  misc_feature (70)..(167): Homolog of NCBI NO: 18420531 NR Description: putative protein; protein id: At5g22550.1,
  misc_feature (1)..(27): Homolog of NCBI NO: 18420531 NR Description: putative protein; protein id: At5g22550.1,
MTQQHKRRFLKFFVAKMEEKGFVPQELVKAVSSLEGVIRGSYSEDLGLDSENLVQMMVLDGCFILTLFFVVSGKVEYTNLDDPIFRMPWILPSIRADLLLLENQVPYVLLQTLFETSKLVTCSGLNEIAFEFFNYSLQKPETFWEKHYGLEAKHLLDLIRKTFVPVPSQRRIKDHSSKSSFNDHEYLGFVLSAKKLHLRGIKFKPRKNTDSILDISYSNGVLHIPPVVMDDFTASIFLNCVAFEQLYADSSNHITSYVAFMACLINEESDASFLSERRILENYFGTEDEVSRFYKRIGKDIALDLEKSYLAKVFEGVNEYTSQGFHVHCAEFIHTHFDSPWTFASSFAALLLLLFAALQVFFAAYSYFRPPKEK

SEQ ID NO: 70031 - protein, 358 aa, Arabidopsis thaliana
  peptide (1)..(358): Ceres Seq. ID no. 2134531
  misc_feature (1)..(341): Pfam Name: Plant protein of unknown function Pfam Description: Plant protein of unknown function
  misc_feature (1)..(358): Homolog of NCBI NO: 15242911 NR Description: putative protein; protein id: At5g22540.1 thaliana] >gi|9758660|dbj|BAB09126.1|
  misc_feature (1)..(151): Homolog of NCBI NO: 9758661 NR Description: emb|CAB72473.1~gene_id:MQJ16.9~strong similarity
  misc_feature (170)..(356): Homolog of NCBI NO: 9758661 NR Description: emb|CAB72473.1~gene_id:MQJ16.9~strong similarity
  misc_feature (1)..(159): Homolog of NCBI NO: 15230487 NR Description: putative protein; protein id: At3g44710.1
  misc_feature (150)..(356): Homolog of NCBI NO: 15230487 NR Description: putative protein; protein id: At3g44710.1
  misc_feature (1)..(149): Homolog of NCBI NO: 15242915 NR Description: putative protein; protein id: At5g22560.1 thaliana] >gi|9758662|dbj|BAB09128.1|
  misc_feature (148)..(356): Homolog of NCBI NO: 15242915 NR Description: putative protein; protein id: At5g22560.1 thaliana] >gi|9758662|dbj|BAB09128.1|
  misc_feature (170)..(356): Homolog of NCBI NO: 18420531 NR Description: putative protein; protein id: At5g22550.1,
  misc_feature (54)..(151): Homolog of NCBI NO: 18420531 NR Description: putative protein; protein id: At5g22550.1,
  misc_feature (1)..(11): Homolog of NCBI NO: 18420531 NR Description: putative protein; protein id: At5g22550.1,
MEEKGFVPQELVKAVSSLEGVIRGSYSEDLGLDSENLVQMMVLDGCFILTLFFVVSGKVEYTNLDDPIFRMPWILPSIRADLLLLENQVPYVLLQTLFETSKLVTCSGLNEIAFEFFNYSLQKPETFWEKHYGLEAKHLLDLIRKTFVPVPSQRRIKDHSSKSSFNDHEYLGFVLSAKKLHLRGIKFKPRKNTDSILDISYSNGVLHIPPVVMDDFTASIFLNCVAFEQLYADSSNHITSYVAFMACLINEESDASFLSERRILENYFGTEDEVSRFYKRIGKDIALDLEKSYLAKVFEGVNEYTSQGFHVHCAEFIHTHFDSPWTFASSFAALLLLLFAALQVFFAAYSYFRPPKEK

SEQ ID NO: 70032 - DNA, 2052 bp, Arabidopsis thaliana
  misc_feature (1)..(2052): Ceres Seq. ID no. 2135104
  misc_feature: MA Experiment ID: 20000171 Result: Down-regulated in Transcription
  misc_feature: MA Experiment 20000171 PARAMETER Experiment Name: At_42deg_Heat_P Parameter: Age (day) Value: 14
  misc_feature: MA Experiment 20000171 PARAMETER Experiment Name: At_42deg_Heat_P Parameter: Organism Value: A. thaliana
  misc_feature: MA Experiment 20000171 PARAMETER Experiment Name: At_42deg_Heat_P Parameter: Plant Line Value: WS
  misc_feature: MA Experiment 20000171 PARAMETER Experiment Name: At_42deg_Heat_P Parameter: Temperature (deg C) Value: 42 vs. 22
  misc_feature: MA Experiment 20000171 PARAMETER Experiment Name: At_42deg_Heat_P Parameter: Timepoint (hr) Value: 1
  misc_feature: MA Experiment 20000171 PARAMETER Experiment Name: At_42deg_Heat_P Parameter: Tissue Value: Aerial
  misc_feature: MA Experiment ID: 20000173 Result: Down-regulated in Transcription
  misc_feature: MA Experiment 20000173 PARAMETER Experiment Name: At_42deg_Heat_P Parameter: Age (day) Value: 14
  misc_feature: MA Experiment 20000173 PARAMETER Experiment Name: At_42deg_Heat_P Parameter: Organism Value: A. thaliana
  misc_feature: MA Experiment 20000173 PARAMETER Experiment Name: At_42deg_Heat_P Parameter: Plant Line Value: WS
  misc_feature: MA Experiment 20000173 PARAMETER Experiment Name: At_42deg_Heat_P Parameter: Temperature (deg C) Value: 42 vs. 22
  misc_feature: MA Experiment 20000173 PARAMETER Experiment Name: At_42deg_Heat_P Parameter: Timepoint (hr) Value: 6
  misc_feature: MA Experiment 20000173 PARAMETER Experiment Name: At_42deg_Heat_P Parameter: Tissue Value: Aerial
  misc_feature: MA Experiment ID: 20000496 Result: Down-regulated in Transcription
  misc_feature: MA Experiment 20000496 PARAMETER Experiment Name: At_Guard_Cells_P Parameter: Harvest Date Value: 7/19/2002
  misc_feature: MA Experiment 20000496 PARAMETER Experiment Name: At_Guard_Cells_P Parameter: Organism Value: Canola
  misc_feature: MA Experiment 20000496 PARAMETER Experiment Name: At_Guard_Cells_P Parameter: Tissue Value: Guard Cells vs. Leaves
  misc_feature: MA Experiment ID: 20000794 Result: Up-regulated in Transcription
  misc_feature: MA Experiment 20000794 PARAMETER Experiment Name: At_Petals_P Parameter: Age (day) Value: 23-25 days
  misc_feature: MA Experiment 20000794 PARAMETER Experiment Name: At_Petals_P Parameter: Plant Line Value: WS
  misc_feature: MA Experiment 20000794 PARAMETER Experiment Name: At_Petals_P Parameter: Tissue Value: Petals vs. Whole plant
  misc_feature: Pfam Name: Exo70 Pfam Description: Exo70 exocyst complex subunit
atggccgcaacaacaaccacggcggcgagtatcaacgccgaagccggaggtggtggtgggggagctgaagaccgtgttctcgctacggcgcaacagatcatgaaaagcctcaacacaccaaaagaggttcgtgaagatatgttacttatcttctcaagcttcgataaccgtttatcaaatatcaaaaccgcgatgacgaaccaggaagagaatcaaaacgacgctcttgtggcgcgtttagaggctgcagaatcggttattcatcggtgggatggtggtaatgattcttctcgtcactcgtcttcgtcttctggtaactatcgttcctcttcgttttctctttcgtttgatgaatctccggaggaagctaccgagtttctttcagctgttgatgagattatctctttgcttgaggatctttcgtctgagaataagcctgatatggtggatagagctgatagtgctttgcagatggctatgtctcagcttgaagatgaatttagacggattttgattcgtaacactgttcctttagacgctgagcgactctatggctcgatgcggcgtgtttcgttgtcctttgctgatggtgatgttgttgaggattttgagaattttggtttggttgctgatggagatggtagtgggagtaggaggaggttgtttcatgagagaggagggagtatagggtgtgatctttgggttgatttgattaatccaactgctgttgaagatttgaaggagattgcagagcggatgattcgcgctggttatgagaaggagtgtgttcaggtttatagttcggttaggcgtgatgctttggatgattgtttgatgattcttggtgttgagaagctgagtatagaagaagttcagaagattgattggaagtctatggatgagaagatgaagaagtggattcaagctgtgaagattactgttagggttcttcttgttggtgagaaaaagatatgtgatgagatctttagcagttcggagtcgagtaaagaggtttgctttaacgagacaactaaaagctgtgtgatgcagttgttgaatttcggagaggctgtggcgattggtagaagatcatcagagaagttgtttaggattctggacatgtatgatgcgttggctaatgtgttgcagactttagaggtgatggtcactgactgttttgtgtgtaatgagaccaagggggtgttggaagcactgggtgatgctgcgagggggacttttgttgagtttgagaataatgttcggaatgagacatcaaagagaccgacgacaaatggtgaggttcatccaatgatacgttatgtgatgaattacatgaaattgattgtggattatgcggtgaccttaaattcgcttctggagagtaatgagtcaagtggcgtatctggtgatgatagtacagaagagatgtctcctcttgcgaaaagaatattggggttgattacgtcgttggaatcaaatcttgaagataaatcaaagttgtatgaagatggtgggctgcaacatgtgttcatgatgaacaacatttactacatagttcagaaggtgaaggattctgagcttggtaaactcttgggtgatgattgggttagaaaacgaagagggcagatacgtcaatatgctaccggttacctcagggcttcctggagcagggtgctatctgctttgagggacgaaagtatgggtggaagttcaagtggtagtccgagttatggacaaagaagcaacaattcttccaagatggcgttaaaagagagattcagaggttttaatgccagctttgaagagttatacaggctgcaaacggcttggaaggtcccggatcctcaacttcgtgaagaactgagaatatctatatcagagaaagtaatcccggcttaccgggctttcttcggaaggaataggagtcaactagaaggtggtaggcatgctggaaagtacataaagtacacaccagatgacctggagagttacttaccagacctatttgaaggaaatcaattggttattcaccacccgagaaggaaaagttaa

SEQ ID NO: 70033 - protein, 683 aa, Arabidopsis thaliana
  peptide (1)..(683): Ceres Seq. ID no. 2135105
  misc_feature: Pfam Name: Exo70 Pfam Description: Exo70 exocyst complex subunit
  misc_feature (15)..(682): Homolog of NCBI NO: 38346639 NR Description: OSJNBa0072D21.9 [Oryza sativa (japonica
  misc_feature (21)..(673): Homolog of NCBI NO: 19386798 NR Description: putative leucine zipper protein [Oryza sativa
  misc_feature (70)..(681): Homolog of NCBI NO: 30682979 NR Description: exocyst subunit EXO70 family [Arabidopsis >gi|9294634|dbj|BAB02973.1| gb|AAD25781.1~gene_id:MAG2.5~strong
  misc_feature (235)..(683): Homolog of NCBI NO: 15218495 NR Description: unknown protein; protein id: At1g72470.1
  misc_feature (120)..(183): Homolog of NCBI NO: 15218495 NR Description: unknown protein; protein id: At1g72470.1
  misc_feature (80)..(677): Homolog of NCBI NO: 15221040 NR Description: hypothetical protein; protein id: At1g54090.1, by cDNA: gi_20260593 [Arabidopsis thaliana]
  misc_feature (116)..(672): Homolog of NCBI NO: 100226 NR Description: tomato leucine zipper-containing protein - tomato protein of unknown function [Lycopersicon esculentum]
  misc_feature (23)..(97): Homolog of NCBI NO: 100226 NR Description: tomato leucine zipper-containing protein - tomato protein of unknown function [Lycopersicon esculentum]
  misc_feature (212)..(681): Homolog of NCBI NO: 23270388 NR Description: unknown protein [Arabidopsis thaliana]
  misc_feature (108)..(673): Homolog of NCBI NO: 34909792 NR Description: P0403C05.2 [Oryza sativa (japonica
MAATTTTAASINAEAGGGGGGAEDRVLATAQQIMKSLNTPKEVREDMLLIFSSFDNRLSNIKTAMTNQEENQNDALVARLEAAESVIHRWDGGNDSSRHSSSSSGNYRSSSFSLSFDESPEEATEFLSAVDEIISLLEDLSSENKPDMVDRADSALQMAMSQLEDEFRRILIRNTVPLDAERLYGSMRRVSLSFADGDVVEDFENFGLVADGDGSGSRRRLFHERGGSIGCDLWVDLINPTAVEDLKEIAERMIRAGYEKECVQVYSSVRRDALDDCLMILGVEKLSIEEVQKIDWKSMDEKMKKWIQAVKITVRVLLVGEKKICDEIFSSSESSKEVCFNETTKSCVMQLLNFGEAVAIGRRSSEKLFRILDMYDALANVLQTLEVMVTDCFVCNETKGVLEALGDAARGTFVEFENNVRNETSKRPTTNGEVHPMIRYVMNYMKLIVDYAVTLNSLLESNESSGVSGDDSTEEMSPLAKRILGLITSLESNLEDKSKLYEDGGLQHVFMMNNIYYIVQKVKDSELGKLLGDDWVRKRRGQIRQYATGYLRASWSRVLSALRDESMGGSSSGSPSYGQRSNNSSKMALKERFRGFNASFEELYRLQTAWKVPDPQLREELRISISEKVIPAYRAFFGRNRSQLEGGRHAGKYIKYTPDDLESYLPDLFEGNQLVIHHPRRKS

SEQ ID NO: 70034 - protein, 650 aa, Arabidopsis thaliana
  peptide (1)..(650): Ceres Seq. ID no. 2135106
  misc_feature: Pfam Name: Exo70 Pfam Description: Exo70 exocyst complex subunit
  misc_feature (1)..(649): Homolog of NCBI NO: 38346639 NR Description: OSJNBa0072D21.9 [Oryza sativa (japonica
  misc_feature (1)..(640): Homolog of NCBI NO: 19386798 NR Description: putative leucine zipper protein [Oryza sativa
  misc_feature (37)..(648): Homolog of NCBI NO: 30682979 NR Description: exocyst subunit EXO70 family [Arabidopsis >gi|9294634|dbj|BAB02973.1| gb|AAD25781.1~gene_id:MAG2.5~strong
  misc_feature (202)..(650): Homolog of NCBI NO: 15218495 NR Description: unknown protein; protein id: At1g72470.1
  misc_feature (87)..(150): Homolog of NCBI NO: 15218495 NR Description: unknown protein; protein id: At1g72470.1
  misc_feature (47)..(644): Homolog of NCBI NO: 15221040 NR Description: hypothetical protein; protein id: At1g54090.1, by cDNA: gi_20260593 [Arabidopsis thaliana]
  misc_feature (83)..(639): Homolog of NCBI NO: 100226 NR Description: tomato leucine zipper-containing protein - tomato protein of unknown function [Lycopersicon esculentum]
  misc_feature (1)..(64): Homolog of NCBI NO: 100226 NR Description: tomato leucine zipper-containing protein - tomato protein of unknown function [Lycopersicon esculentum]
  misc_feature (179)..(648): Homolog of NCBI NO: 23270388 NR Description: unknown protein [Arabidopsis thaliana]
  misc_feature (75)..(640): Homolog of NCBI NO: 34909792 NR Description: P0403C05.2 [Oryza sativa (japonica
MKSLNTPKEVREDMLLIFSSFDNRLSNIKTAMTNQEENQNDALVARLEAAESVIHRWDGGNDSSRHSSSSSGNYRSSSFSLSFDESPEEATEFLSAVDEIISLLEDLSSENKPDMVDRADSALQMAMSQLEDEFRRILIRNTVPLDAERLYGSMRRVSLSFADGDVVEDFENFGLVADGDGSGSRRRLFHERGGSIGCDLWVDLINPTAVEDLKEIAERMIRAGYEKECVQVYSSVRRDALDDCLMILGVEKLSIEEVQKIDWKSMDEKMKKWIQAVKITVRVLLVGEKKICDEIFSSSESSKEVCFNETTKSCVMQLLNFGEAVAIGRRSSEKLFRILDMYDALANVLQTLEVMVTDCFVCNETKGVLEALGDAARGTFVEFENNVRNETSKRPTTNGEVHPMIRYVMNYMKLIVDYAVTLNSLLESNESSGVSGDDSTEEMSPLAKRILGLITSLESNLEDKSKLYEDGGLQHVFMMNNIYYIVQKVKDSELGKLLGDDWVRKRRGQIRQYATGYLRASWSRVLSALRDESMGGSSSGSPSYGQRSNNSSKMALKERFRGFNASFEELYRLQTAWKVPDPQLREELRISISEKVIPAYRAFFGRNRSQLEGGRHAGKYIKYTPDDLESYLPDLFEGNQLVIHHPRRKS

SEQ ID NO: 70035 - protein, 637 aa, Arabidopsis thaliana
  peptide (1)..(637): Ceres Seq. ID no. 2135107
  misc_feature: Pfam Name: Exo70 Pfam Description: Exo70 exocyst complex subunit
  misc_feature (24)..(635): Homolog of NCBI NO: 30682979 NR Description: exocyst subunit EXO70 family [Arabidopsis >gi|9294634|dbj|BAB02973.1| gb|AAD25781.1~gene_id:MAG2.5~strong
  misc_feature (189)..(637): Homolog of NCBI NO: 15218495 NR Description: unknown protein; protein id: At1g72470.1
  misc_feature (74)..(137): Homolog of NCBI NO: 15218495 NR Description: unknown protein; protein id: At1g72470.1
  misc_feature (34)..(631): Homolog of NCBI NO: 15221040 NR Description: hypothetical protein; protein id: At1g54090.1, by cDNA: gi_20260593 [Arabidopsis thaliana]
  misc_feature (70)..(626): Homolog of NCBI NO: 100226 NR Description: tomato leucine zipper-containing protein - tomato protein of unknown function [Lycopersicon esculentum]
  misc_feature (1)..(51): Homolog of NCBI NO: 100226 NR Description: tomato leucine zipper-containing protein - tomato protein of unknown function [Lycopersicon esculentum]
  misc_feature (166)..(635): Homolog of NCBI NO: 23270388 NR Description: unknown protein [Arabidopsis thaliana]
  misc_feature (62)..(627): Homolog of NCBI NO: 34909792 NR Description: P0403C05.2 [Oryza sativa (japonica
  misc_feature (1)..(636): Homolog of NCBI NO: 38346639 NR Description: OSJNBa0072D21.9 [Oryza sativa (japonica
  misc_feature (1)..(627): Homolog of NCBI NO: 19386798 NR Description: putative leucine zipper protein [Oryza sativa
MLLIFSSFDNRLSNIKTAMTNQEENQNDALVARLEAAESVIHRWDGGNDSSRHSSSSSGNYRSSSFSLSFDESPEEATEFLSAVDEIISLLEDLSSENKPDMVDRADSALQMAMSQLEDEFRRILIRNTVPLDAERLYGSMRRVSLSFADGDVVEDFENFGLVADGDGSGSRRRLFHERGGSIGCDLWVDLINPTAVEDLKEIAERMIRAGYEKECVQVYSSVRRDALDDCLMILGVEKLSIEEVQKIDWKSMDEKMKKWIQAVKITVRVLLVGEKKICDEIFSSSESSKEVCFNETTKSCVMQLLNFGEAVAIGRRSSEKLFRILDMYDALANVLQTLEVMVTDCFVCNETKGVLEALGDAARGTFVEFENNVRNETSKRPTTNGEVHPMIRYVMNYMKLIVDYAVTLNSLLESNESSGVSGDDSTEEMSPLAKRILGLITSLESNLEDKSKLYEDGGLQHVFMMNNIYYIVQKVKDSELGKLLGDDWVRKRRGQIRQYATGYLRASWSRVLSALRDESMGGSSSGSPSYGQRSNNSSKMALKERFRGFNASFEELYRLQTAWKVPDPQLREELRISISEKVIPAYRAFFGRNRSQLEGGRHAGKYIKYTPDDLESYLPDLFEGNQLVIHHPRRKS

SEQ ID NO: 70036 - DNA, 2106 bp, Arabidopsis thaliana
  misc_feature (1)..(2106): Ceres Seq. ID no. 2135111
  misc_feature: MA Experiment ID: 20000307 Result: Up-regulated in Transcription
  misc_feature: MA Experiment 20000307 PARAMETER Experiment Name: At_Germinating_Seeds_Sub_P Parameter: Age (hr) Value: 24 vs. 0
  misc_feature: MA Experiment 20000307 PARAMETER Experiment Name: At_Germinating_Seeds_Sub_P Parameter: Organism Value: A. thaliana
  misc_feature: MA Experiment 20000307 PARAMETER Experiment Name: At_Germinating_Seeds_Sub_P Parameter: Plant Line Value: WS
  misc_feature: MA Experiment 20000307 PARAMETER Experiment Name: At_Germinating_Seeds_Sub_P Parameter: Tissue Value: Germinating Seeds
  misc_feature: MA Experiment ID: 20000314 Result: Up-regulated in Transcription
  misc_feature: MA Experiment 20000314 PARAMETER Experiment Name: At_14day_Shoots-Roots_Sub_P Parameter: Age (day) Value: 14
  misc_feature: MA Experiment 20000314 PARAMETER Experiment Name: At_14day_Shoots-Roots_Sub_P Parameter: Organism Value: A. thaliana
  misc_feature: MA Experiment 20000314 PARAMETER Experiment Name: At_14day_Shoots-Roots_Sub_P Parameter: Plant Line Value: WS
  misc_feature: MA Experiment 20000314 PARAMETER Experiment Name: At_14day_Shoots-Roots_Sub_P Parameter: Tissue Value: Roots vs. Whole Plant
  misc_feature: MA Experiment ID: 20000327 Result: Down-regulated in Transcription
  misc_feature: MA Experiment 20000327 PARAMETER Experiment Name: At_42deg_Heat_Sub_P Parameter: Age (day) Value: 14
  misc_feature: MA Experiment 20000327 PARAMETER Experiment Name: At_42deg_Heat_Sub_P Parameter: Organism Value: A. thaliana
  misc_feature: MA Experiment 20000327 PARAMETER Experiment Name: At_42deg_Heat_Sub_P Parameter: Plant Line Value: WS
  misc_feature: MA Experiment 20000327 PARAMETER Experiment Name: At_42deg_Heat_Sub_P Parameter: Temperature (deg C) Value: 42 vs. 22
  misc_feature: MA Experiment 20000327 PARAMETER Experiment Name: At_42deg_Heat_Sub_P Parameter: Timepoint (hr) Value: 1
  misc_feature: MA Experiment 20000327 PARAMETER Experiment Name: At_42deg_Heat_Sub_P Parameter: Tissue Value: Aerial
  misc_feature: MA Experiment ID: 20000328 Result: Down-regulated in Transcription
  misc_feature: MA Experiment 20000328 PARAMETER Experiment Name: At_42deg_Heat_Sub_P Parameter: Age (day) Value: 14
  misc_feature: MA Experiment 20000328 PARAMETER Experiment Name: At_42deg_Heat_Sub_P Parameter: Organism Value: A. thaliana
  misc_feature: MA Experiment 20000328 PARAMETER Experiment Name: At_42deg_Heat_Sub_P Parameter: Plant Line Value: WS
  misc_feature: MA Experiment 20000328 PARAMETER Experiment Name: At_42deg_Heat_Sub_P Parameter: Temperature (deg C) Value: 42 vs. 22
  misc_feature: MA Experiment 20000328 PARAMETER Experiment Name: At_42deg_Heat_Sub_P Parameter: Timepoint (hr) Value: 6
  misc_feature: MA Experiment 20000328 PARAMETER Experiment Name: At_42deg_Heat_Sub_P Parameter: Tissue Value: Aerial
  misc_feature: MA Experiment ID: 20000332 Result: Down-regulated in Transcription
  misc_feature: MA Experiment 20000332 PARAMETER Experiment Name: At_4deg_Cold_Sub_P Parameter: Age (day) Value: 14
  misc_feature: MA Experiment 20000332 PARAMETER Experiment Name: At_4deg_Cold_Sub_P Parameter: Organism Value: A. thaliana
  misc_feature: MA Experiment 20000332 PARAMETER Experiment Name: At_4deg_Cold_Sub_P Parameter: Plant Line Value: WS
  misc_feature: MA Experiment 20000332 PARAMETER Experiment Name: At_4deg_Cold_Sub_P Parameter: Temperature (deg C) Value: 4 vs. 22
  misc_feature: MA Experiment 20000332 PARAMETER Experiment Name: At_4deg_Cold_Sub_P Parameter: Timepoint (hr) Value: 2
  misc_feature: MA Experiment 20000332 PARAMETER Experiment Name: At_4deg_Cold_Sub_P Parameter: Tissue Value: Aerial
  misc_feature: MA Experiment ID: 20000355 Result: Up-regulated in Transcription
  misc_feature: MA Experiment 20000355 PARAMETER Experiment Name: At_Siliques_Sub_P Parameter: Age (day) Value: 21
  misc_feature: MA Experiment 20000355 PARAMETER Experiment Name: At_Siliques_Sub_P Parameter: Organism Value: A. thaliana
  misc_feature: MA Experiment 20000355 PARAMETER Experiment Name: At_Siliques_Sub_P Parameter: Plant Line Value: WS
  misc_feature: MA Experiment 20000355 PARAMETER Experiment Name: At_Siliques_Sub_P Parameter: Tissue Value: Less Than 5mm Siliques vs. Whole Plant
  misc_feature: MA Experiment ID: 20000440 Result: Up-regulated in Transcription
  misc_feature: MA Experiment 20000440 PARAMETER Experiment Name: At_Closed-Flower__Sub_P Parameter: Tissue Value: Closed Flower vs. Whole Plant
atggagattccactctcgcgttaccagagcataagattagacgagattcgagactcttcttccaatcccaaggttctcactttcccgcgaaaattctcgttacgaggaagaagatggaagaacccatttggaagactcagttgttcttctgtagttcaaggtctgaaaccaaaaccaaagctgaaaccagaaccaattagaatcgaggttaaggaatcgaaagatcagattttggatgatacccagatcagtaaatctggtgtaacgatttgtagtcagatagagaagttggttttgtgtaatagattcagagaagcttttgaattgtttgagattctggagattcgctgtagttttaaggttggtgttagtacttatgatgctttagtggaagcttgtattcgtttgaaatcgattcggtgtgttaaaagggtttatgggtttatgatgagtaatgggtttgagccggagcagtatatgatgaacagaatcttgttgatgcatgtcaagtgtgggatgattattgatgcacgtaggttgtttgatgaaatccctgagagaaatttgtattcttattactcgattatctctgggtttgttaattttgggaattatgttgaagcttttgagttgtttaagatgatgtgggaggagctttctgattgtgagactcatacgtttgcggtgatgctacgggcctcggctggcttagggtctatttatgtggggaaacagttacacgtttgtgcgttgaagttaggagttgttgataatacctttgtctcgtgtggattgattgatatgtatagcaagtgtggggatattgaagatgctcgatgtgcttttgagtgtatgcccgagaaaactactgttgcttggaacaacgttattgcgggttatgcgcttcatggttatagtgaggaagctctgtgtttgttgtatgacatgcgagactcaggtgtgtctattgatcagttcacactttcgataatgataagaatttctacaaagcttgcaaagcttgagcttactaagcaggcacacgctagtttaattcgaaacggttttgaatcggaaatcgttgcaaacacagctcttgtagacttttatagcaaatggggtagagtagatactgctagatatgtttttgataaattgccgagaaaaaatataatctcatggaacgctttgatgggtggatatgcaaatcatggtagaggaactgatgctgttaagttgtttgagaaaatgattgcagcaaacgtcgctccaaaccatgtcacatttcttgcagttctatcagcttgtgcctattcaggtttatctgagcaaggttgggagatttttctatcgatgagtgaggttcatgggatcaaaccaagggcgatgcattatgcctgcatgattgagctgttgggtagagacggtttattagatgaagccattgcgtttatccgaagagctcctttgaaaaccacggtgaacatgtgggcagcactcttgaatgcctgtaggatgcaggaaaacttagagcttggaagagtggttgctgaaaaactctatggaatgggacccgagaagctcggaaactacgttgtgatgtataatatgtacaacagtatgggaaaaactgcagaagctgcaggggttttggagacattggagagcaaaggattaagcatgatgccggcttgtacttgggttgaggttggagatcagactcacagctttctttcaggagataggtttgattcttacaatgagacggtgaaaaggcagatataccaaaaagtggatgaactaatggaagagatttccgagtatgggtactcagaggaggagcaacaccttcttccagacgtagatgaaaaggaagaagagcgagtagggcgatatcacagcgagaaactagccatagcttacggattggtgaatacgccggaatggaatccattgcagattactcagaaccataggatatgcaaaaattgccacaaggtggttgagttcatatctttggttacaggacgagagatggtagtgagagacgcgagccggttccatcattttaaagaagggaagtgttcttgtggaggttattggtga

SEQ ID NO: 70037 - protein, 701 aa, Arabidopsis thaliana
  peptide (1)..(701): Ceres Seq. ID no. 2135112
  misc_feature (190)..(224): Pfam Name: PPR repeat Pfam Description: PPR repeat
  misc_feature (22)..(701): Homolog of NCBI NO: 38636769 NR Description: putative pentatricopeptide (PPR)
  misc_feature (85)..(701): Homolog of NCBI NO: 15232837 NR Description: hypothetical protein; protein id: At3g02010.1 thaliana] >gi|6091739|gb|AAF03451.1|AC010797_27 hypothetical [Arabidopsis thaliana] >gi|6513930|gb|AAF14834.1|AC011664_16
  misc_feature (164)..(701): Homolog of NCBI NO: 34906110 NR Description: P0020E09.15 [Oryza sativa (japonica
  misc_feature (126)..(701): Homolog of NCBI NO: 15229561 NR Description: hypothetical protein; protein id: At3g24000.1 thaliana] >gi|9294669|dbj|BAB03018.1| contains similarity to
  misc_feature (126)..(700): Homolog of NCBI NO: 37534806 NR Description: putative PPR-repeat containing protein [Oryza
  misc_feature (157)..(701): Homolog of NCBI NO: 18483237 NR Description: putative vegetative storage protein [Sorghum
  misc_feature (105)..(701): Homolog of NCBI NO: 34894002 NR Description: P0672D08.11 [Oryza sativa (japonica >gi|15128441|dbj|BAB62625.1| hypothetical protein~similar to thaliana chromosome 3, F28J7.34 [Oryza sativa (japonica F28J7.34
  misc_feature (99)..(701): Homolog of NCBI NO: 15231358 NR Description: hypothetical protein; protein id: At3g13770.1
  misc_feature (94)..(701): Homolog of NCBI NO: 34915012 NR Description: P0458A05.10 [Oryza sativa (japonica
  misc_feature (125)..(701): Homolog of NCBI NO: 34897884 NR Description: Similar to Arabidopsis thaliana DNA chromosome 4,
MEIPLSRYQSIRLDEIRDSSSNPKVLTFPRKFSLRGRRWKNPFGRLSCSSVVQGLKPKPKLKPEPIRIEVKESKDQILDDTQISKSGVTICSQIEKLVLCNRFREAFELFEILEIRCSFKVGVSTYDALVEACIRLKSIRCVKRVYGFMMSNGFEPEQYMMNRILLMHVKCGMIIDARRLFDEIPERNLYSYYSIISGFVNFGNYVEAFELFKMMWEELSDCETHTFAVMLRASAGLGSIYVGKQLHVCALKLGVVDNTFVSCGLIDMYSKCGDIEDARCAFECMPEKTTVAWNNVIAGYALHGYSEEALCLLYDMRDSGVSIDQFTLSIMIRISTKLAKLELTKQAHASLIRNGFESEIVANTALVDFYSKWGRVDTARYVFDKLPRKNIISWNALMGGYANHGRGTDAVKLFEKMIAANVAPNHVTFLAVLSACAYSGLSEQGWEIFLSMSEVHGIKPRAMHYACMIELLGRDGLLDEAIAFIRRAPLKTTVNMWAALLNACRMQENLELGRVVAEKLYGMGPEKLGNYVVMYNMYNSMGKTAEAAGVLETLESKGLSMMPACTWVEVGDQTHSFLSGDRFDSYNETVKRQIYQKVDELMEEISEYGYSEEEQHLLPDVDEKEEERVGRYHSEKLAIAYGLVNTPEWNPLQITQNHRICKNCHKVVEFISLVTGREMVVRDASRFHHFKEGKCSCGGYW

SEQ ID NO: 70038 - protein, 553 aa, Arabidopsis thaliana
  peptide (1)..(553): Ceres Seq. ID no. 2135113
  misc_feature (42)..(76): Pfam Name: PPR repeat Pfam Description: PPR repeat
  misc_feature (1)..(553): Homolog of NCBI NO: 38636769 NR Description: putative pentatricopeptide (PPR)
  misc_feature (1)..(553): Homolog of NCBI NO: 15232837 NR Description: hypothetical protein; protein id: At3g02010.1 thaliana] >gi|6091739|gb|AAF03451.1|AC010797_27 hypothetical [Arabidopsis thaliana] >gi|6513930|gb|AAF14834.1|AC011664_16
  misc_feature (16)..(553): Homolog of NCBI NO: 34906110 NR Description: P0020E09.15 [Oryza sativa (japonica
  misc_feature (1)..(553): Homolog of NCBI NO: 15229561 NR Description: hypothetical protein; protein id: At3g24000.1 thaliana] >gi|9294669|dbj|BAB03018.1| contains similarity to
  misc_feature (1)..(552): Homolog of NCBI NO: 37534806 NR Description: putative PPR-repeat containing protein [Oryza
  misc_feature (9)..(553): Homolog of NCBI NO: 18483237 NR Description: putative vegetative storage protein [Sorghum
  misc_feature (1)..(553): Homolog of NCBI NO: 34894002 NR Description: P0672D08.11 [Oryza sativa (japonica >gi|15128441|dbj|BAB62625.1| hypothetical protein~similar to thaliana chromosome 3, F28J7.34 [Oryza sativa (japonica F28J7.34
  misc_feature (1)..(553): Homolog of NCBI NO: 15231358 NR Description: hypothetical protein; protein id: At3g13770.1
  misc_feature (1)..(553): Homolog of NCBI NO: 34915012 NR Description: P0458A05.10 [Oryza sativa (japonica
  misc_feature (1)..(553): Homolog of NCBI NO: 34897884 NR Description: Similar to Arabidopsis thaliana DNA chromosome 4,
MMSNGFEPEQYMMNRILLMHVKCGMIIDARRLFDEIPERNLYSYYSIISGFVNFGNYVEAFELFKMMWEELSDCETHTFAVMLRASAGLGSIYVGKQLHVCALKLGVVDNTFVSCGLIDMYSKCGDIEDARCAFECMPEKTTVAWNNVIAGYALHGYSEEALCLLYDMRDSGVSIDQFTLSIMIRISTKLAKLELTKQAHASLIRNGFESEIVANTALVDFYSKWGRVDTARYVFDKLPRKNIISWNALMGGYANHGRGTDAVKLFEKMIAANVAPNHVTFLAVLSACAYSGLSEQGWEIFLSMSEVHGIKPRAMHYACMIELLGRDGLLDEAIAFIRRAPLKTTVNMWAALLNACRMQENLELGRVVAEKLYGMGPEKLGNYVVMYNMYNSMGKTAEAAGVLETLESKGLSMMPACTWVEVGDQTHSFLSGDRFDSYNETVKRQIYQKVDELMEEISEYGYSEEEQHLLPDVDEKEEERVGRYHSEKLAIAYGLVNTPEWNPLQITQNHRICKNCHKVVEFISLVTGREMVVRDASRFHHFKEGKCSCGGYW

SEQ ID NO: 70039 - protein, 552 aa, Arabidopsis thaliana
  peptide (1)..(552): Ceres Seq. ID no. 2135114
  misc_feature (41)..(75): Pfam Name: PPR repeat Pfam Description: PPR repeat
  misc_feature (1)..(552): Homolog of NCBI NO: 38636769 NR Description: putative pentatricopeptide (PPR)
  misc_feature (1)..(552): Homolog of NCBI NO: 15232837 NR Description: hypothetical protein; protein id: At3g02010.1 thaliana] >gi|6091739|gb|AAF03451.1|AC010797_27 hypothetical [Arabidopsis thaliana] >gi|6513930|gb|AAF14834.1|AC011664_16
  misc_feature (15)..(552): Homolog of NCBI NO: 34906110 NR Description: P0020E09.15 [Oryza sativa (japonica
  misc_feature (1)..(552): Homolog of NCBI NO: 15229561 NR Description: hypothetical protein; protein id: At3g24000.1 thaliana] >gi|9294669|dbj|BAB03018.1| contains similarity to
  misc_feature (1)..(551): Homolog of NCBI NO: 37534806 NR Description: putative PPR-repeat containing protein [Oryza
  misc_feature (8)..(552): Homolog of NCBI NO: 18483237 NR Description: putative vegetative storage protein [Sorghum
  misc_feature (1)..(552): Homolog of NCBI NO: 34894002 NR Description: P0672D08.11 [Oryza sativa (japonica >gi|15128441|dbj|BAB62625.1| hypothetical protein~similar to thaliana chromosome 3, F28J7.34 [Oryza sativa (japonica F28J7.34
  misc_feature (1)..(552): Homolog of NCBI NO: 15231358 NR Description: hypothetical protein; protein id: At3g13770.1
  misc_feature (1)..(552): Homolog of NCBI NO: 34915012 NR Description: P0458A05.10 [Oryza sativa (japonica
  misc_feature (1)..(552): Homolog of NCBI NO: 34897884 NR Description: Similar to Arabidopsis thaliana DNA chromosome 4,
MSNGFEPEQYMMNRILLMHVKCGMIIDARRLFDEIPERNLYSYYSIISGFVNFGNYVEAFELFKMMWEELSDCETHTFAVMLRASAGLGSIYVGKQLHVCALKLGVVDNTFVSCGLIDMYSKCGDIEDARCAFECMPEKTTVAWNNVIAGYALHGYSEEALCLLYDMRDSGVSIDQFTLSIMIRISTKLAKLELTKQAHASLIRNGFESEIVANTALVDFYSKWGRVDTARYVFDKLPRKNIISWNALMGGYANHGRGTDAVKLFEKMIAANVAPNHVTFLAVLSACAYSGLSEQGWEIFLSMSEVHGIKPRAMHYACMIELLGRDGLLDEAIAFIRRAPLKTTVNMWAALLNACRMQENLELGRVVAEKLYGMGPEKLGNYVVMYNMYNSMGKTAEAAGVLETLESKGLSMMPACTWVEVGDQTHSFLSGDRFDSYNETVKRQIYQKVDELMEEISEYGYSEEEQHLLPDVDEKEEERVGRYHSEKLAIAYGLVNTPEWNPLQITQNHRICKNCHKVVEFISLVTGREMVVRDASRFHHFKEGKCSCGGYW

SEQ ID NO: 70040 - DNA, 1854 bp, Arabidopsis thaliana
  misc_feature (1)..(1854): Ceres Seq. ID no. 2136569
  misc_feature: MA Experiment ID: 20000315 Result: Down-regulated in Transcription
  misc_feature: MA Experiment 20000315 PARAMETER Experiment Name: At_14day_Shoots-Roots_Sub_P Parameter: Age (day) Value: 14
  misc_feature: MA Experiment 20000315 PARAMETER Experiment Name: At_14day_Shoots-Roots_Sub_P Parameter: Organism Value: A. thaliana
  misc_feature: MA Experiment 20000315 PARAMETER Experiment Name: At_14day_Shoots-Roots_Sub_P Parameter: Plant Line Value: WS
  misc_feature: MA Experiment 20000315 PARAMETER Experiment Name: At_14day_Shoots-Roots_Sub_P Parameter: Tissue Value: Shoots vs. Whole Plant
  misc_feature: MA Experiment ID: 20000328 Result: Down-regulated in Transcription
  misc_feature: MA Experiment 20000328 PARAMETER Experiment Name: At_42deg_Heat_Sub_P Parameter: Age (day) Value: 14
  misc_feature: MA Experiment 20000328 PARAMETER Experiment Name: At_42deg_Heat_Sub_P Parameter: Organism Value: A. thaliana
  misc_feature: MA Experiment 20000328 PARAMETER Experiment Name: At_42deg_Heat_Sub_P Parameter: Plant Line Value: WS
  misc_feature: MA Experiment 20000328 PARAMETER Experiment Name: At_42deg_Heat_Sub_P Parameter: Temperature (deg C) Value: 42 vs. 22
  misc_feature: MA Experiment 20000328 PARAMETER Experiment Name: At_42deg_Heat_Sub_P Parameter: Timepoint (hr) Value: 6
  misc_feature: MA Experiment 20000328 PARAMETER Experiment Name: At_42deg_Heat_Sub_P Parameter: Tissue Value: Aerial
  misc_feature: MA Experiment ID: 20001807 Result: Down-regulated in Transcription
  misc_feature: MA Experiment 20001807 PARAMETER Experiment Name: At_50mM_NH4NO3_L-to-H_Sub_P Parameter: Timepoint (hr) Value: 6
  misc_feature: MA Experiment 20001807 PARAMETER Experiment Name: At_50mM_NH4NO3_L-to-H_Sub_P Parameter: Tissue Value: Leaf
  misc_feature: MA Experiment 20001807 PARAMETER Experiment Name: At_50mM_NH4NO3_L-to-H_Sub_P Parameter: Treatment Value: 50mM NH4NO3 vs 100mM Mannitol
  misc_feature: Pfam Name: Pkinase Pfam Description: Protein kinase domain
atggctctgcttattatcactgccttagtttttagtagtttatggtcatctgtgtcaccagatgctcaaggggatgcattatttgcgttgaggagctcgttacgtgcatctcctgaacagcttagtgattggaaccagaatcaagtcgatccttgtacttggtctcaagttatttgtgatgacaagaaacatgttacttctgtaaccttgtcttacatgaacttctcctcgggaacactgtcttcaggaataggaatcttgacaactctcaagactcttacattgaagggaaatggaataatgggtggaataccagaatccattggaaatctgtctagcttgaccagcttagatttggaggataatcacttaactgatcgcattccatccactctcggtaatctcaagaatctacagttcttgaccttgagtaggaataaccttaatggttctatcccggattcacttacaggtctatcaaaactgataaatattctgctcgactcaaataatctcagtggtgagattcctcagagtttattcaaaatcccaaaatacaatttcacagcaaacaacttgagctgtggtggcactttcccgcaaccttgtgtaaccgagtccagtccttcaggtgattcaagcagtagaaaaactggaatcatcgctggagttgttagcggaatagcggttattctactaggattcttcttctttttcttctgcaaggataaacataaaggatataaacgagacgtatttgtggatgttgcaggaacgaactttaaaaaaggtttgatttcaggtgaagtggacagaaggattgcttttggacagttgagaagatttgcatggagagagcttcagttggctacagatgagttcagtgaaaagaatgttctcggacaaggaggctttgggaaagtttacaaaggattgctttcggatggcaccaaagtcgctgtaaaaagattgactgattttgaacgtccaggaggagatgaagctttccagagagaagttgagatgataagtgtagctgttcataggaatctgcttcgccttatcggcttttgtacaacacaaactgaacgacttttggtgtatcctttcatgcagaatctaagtgttgcatattgcttaagagagattaaacccggggatccagttctggattggttcaggaggaaacagattgcgttaggtgcagcacgaggactcgaatatcttcatgaacattgcaacccgaagatcatacacagagatgtgaaagctgcaaatgtgttactagatgaagactttgaagcagtggttggtgattttggtttagccaagttggtagatgttagaaggactaatgtaaccactcaggtccgaggaacaatgggtcatattgcaccagaatgtatatccacagggaaatcgtcagagaaaaccgatgttttcgggtacggaattatgcttctggagcttgtaactggacaaagagcaattgatttctcgcggttagaggaagaagatgatgtcttattgctagaccatgtgaagaaactggaaagagagaagagattagaagacatagtagataagaagcttgatgaggattatataaaggaagaagttgaaatgatgatacaagtagctctgctatgcacacaagcagcaccggaagaacgaccagcgatgtcggaagtagtaagaatgctagaaggagaagggcttgcagagagatgggaagagtggcagaatcttgaagtgacgagacaagaagagtttcagaggttgcagaggagatttgattggggtgaagattccattaataatcaagatgctattgaattatctggtggaagatag

SEQ ID NO: 70041 - protein, 617 aa, Arabidopsis thaliana
  peptide (1)..(617): Ceres Seq. ID no. 2136570
  misc_feature: Pfam Name: Pkinase Pfam Description: Protein kinase domain
  misc_feature (4)..(617): Homolog of NCBI NO: 11358729 NR Description: protein serine/threonine kinase-like protein -
  misc_feature (4)..(617): Homolog of NCBI NO: 22326703 NR Description: protein serine/threonine kinase-like protein; id: At5g10290.1, supported by cDNA: gi_20260259 [Arabidopsis
  misc_feature (4)..(617): Homolog of NCBI NO: 20260260 NR Description: protein serine/threonine kinase-like protein
  misc_feature (1)..(617): Homolog of NCBI NO: 5596996 NR Description: putative protein serine /threonine kinase
  misc_feature (16)..(617): Homolog of NCBI NO: 21740899 NR Description: OSJNBa0036B21.13 [Oryza sativa (japonica
  misc_feature (3)..(617): Homolog of NCBI NO: 15217584 NR Description: protein kinase, putative; protein id:
  misc_feature (3)..(617): Homolog of NCBI NO: 15081616 NR Description: At1g71830/F14O23_24 [Arabidopsis thaliana]
  misc_feature (2)..(617): Homolog of NCBI NO: 24935324 NR Description: somatic embryogenesis receptor kinase 1 [Medicago >gi|24935326|gb|AAN64294.1| somatic embryogenesis receptor kinase
  misc_feature (2)..(617): Homolog of NCBI NO: 13897310 NR Description: SERK2 protein [Zea mays]
  misc_feature (7)..(617): Homolog of NCBI NO: 13897308 NR Description: SERK1 protein [Zea mays]
MALLIITALVFSSLWSSVSPDAQGDALFALRSSLRASPEQLSDWNQNQVDPCTWSQVICDDKKHVTSVTLSYMNFSSGTLSSGIGILTTLKTLTLKGNGIMGGIPESIGNLSSLTSLDLEDNHLTDRIPSTLGNLKNLQFLTLSRNNLNGSIPDSLTGLSKLINILLDSNNLSGEIPQSLFKIPKYNFTANNLSCGGTFPQPCVTESSPSGDSSSRKTGIIAGVVSGIAVILLGFFFFFFCKDKHKGYKRDVFVDVAGTNFKKGLISGEVDRRIAFGQLRRFAWRELQLATDEFSEKNVLGQGGFGKVYKGLLSDGTKVAVKRLTDFERPGGDEAFQREVEMISVAVHRNLLRLIGFCTTQTERLLVYPFMQNLSVAYCLREIKPGDPVLDWFRRKQIALGAARGLEYLHEHCNPKIIHRDVKAANVLLDEDFEAVVGDFGLAKLVDVRRTNVTTQVRGTMGHIAPECISTGKSSEKTDVFGYGIMLLELVTGQRAIDFSRLEEEDDVLLLDHVKKLEREKRLEDIVDKKLDEDYIKEEVEMMIQVALLCTQAAPEERPAMSEVVRMLEGEGLAERWEEWQNLEVTRQEEFQRLQRRFDWGEDSINNQDAIELSGGR

SEQ ID NO: 70042 - protein, 545 aa, Arabidopsis thaliana
  peptide (1)..(545): Ceres Seq. ID no. 2136571
  misc_feature: Pfam Name: Pkinase Pfam Description: Protein kinase domain
  misc_feature (1)..(545): Homolog of NCBI NO: 11358729 NR Description: protein serine/threonine kinase-like protein -
  misc_feature (1)..(545): Homolog of NCBI NO: 22326703 NR Description: protein serine/threonine kinase-like protein; id: At5g10290.1, supported by cDNA: gi_20260259 [Arabidopsis
  misc_feature (1)..(545): Homolog of NCBI NO: 20260260 NR Description: protein serine/threonine kinase-like protein
  misc_feature (1)..(545): Homolog of NCBI NO: 5596996 NR Description: putative protein serine /threonine kinase
  misc_feature (1)..(545): Homolog of NCBI NO: 21740899 NR Description: OSJNBa0036B21.13 [Oryza sativa (japonica
  misc_feature (1)..(545): Homolog of NCBI NO: 15217584 NR Description: protein kinase, putative; protein id:
  misc_feature (1)..(545): Homolog of NCBI NO: 15081616 NR Description: At1g71830/F14O23_24 [Arabidopsis thaliana]
  misc_feature (1)..(545): Homolog of NCBI NO: 24935324 NR Description: somatic embryogenesis receptor kinase 1 [Medicago >gi|24935326|gb|AAN64294.1| somatic embryogenesis receptor kinase
  misc_feature (1)..(545): Homolog of NCBI NO: 13897310 NR Description: SERK2 protein [Zea mays]
  misc_feature (1)..(545): Homolog of NCBI NO: 13897308 NR Description: SERK1 protein [Zea mays]
MNFSSGTLSSGIGILTTLKTLTLKGNGIMGGIPESIGNLSSLTSLDLEDNHLTDRIPSTLGNLKNLQFLTLSRNNLNGSIPDSLTGLSKLINILLDSNNLSGEIPQSLFKIPKYNFTANNLSCGGTFPQPCVTESSPSGDSSSRKTGIIAGVVSGIAVILLGFFFFFFCKDKHKGYKRDVFVDVAGTNFKKGLISGEVDRRIAFGQLRRFAWRELQLATDEFSEKNVLGQGGFGKVYKGLLSDGTKVAVKRLTDFERPGGDEAFQREVEMISVAVHRNLLRLIGFCTTQTERLLVYPFMQNLSVAYCLREIKPGDPVLDWFRRKQIALGAARGLEYLHEHCNPKIIHRDVKAANVLLDEDFEAVVGDFGLAKLVDVRRTNVTTQVRGTMGHIAPECISTGKSSEKTDVFGYGIMLLELVTGQRAIDFSRLEEEDDVLLLDHVKKLEREKRLEDIVDKKLDEDYIKEEVEMMIQVALLCTQAAPEERPAMSEVVRMLEGEGLAERWEEWQNLEVTRQEEFQRLQRRFDWGEDSINNQDAIELSGGR

SEQ ID NO: 70043 - protein, 517 aa, Arabidopsis thaliana
  peptide (1)..(517): Ceres Seq. ID no. 2136572
  misc_feature: Pfam Name: Pkinase Pfam Description: Protein kinase domain
  misc_feature (1)..(517): Homolog of NCBI NO: 11358729 NR Description: protein serine/threonine kinase-like protein -
  misc_feature (1)..(517): Homolog of NCBI NO: 22326703 NR Description: protein serine/threonine kinase-like protein; id: At5g10290.1, supported by cDNA: gi_20260259 [Arabidopsis
  misc_feature (1)..(517): Homolog of NCBI NO: 20260260 NR Description: protein serine/threonine kinase-like protein
  misc_feature (1)..(517): Homolog of NCBI NO: 5596996 NR Description: putative protein serine /threonine kinase
  misc_feature (1)..(517): Homolog of NCBI NO: 21740899 NR Description: OSJNBa0036B21.13 [Oryza sativa (japonica
  misc_feature (1)..(517): Homolog of NCBI NO: 15217584 NR Description: protein kinase, putative; protein id:
  misc_feature (1)..(517): Homolog of NCBI NO: 15081616 NR Description: At1g71830/F14O23_24 [Arabidopsis thaliana]
  misc_feature (1)..(517): Homolog of NCBI NO: 24935324 NR Description: somatic embryogenesis receptor kinase 1 [Medicago >gi|24935326|gb|AAN64294.1| somatic embryogenesis receptor kinase
  misc_feature (1)..(517): Homolog of NCBI NO: 13897310 NR Description: SERK2 protein [Zea mays]
  misc_feature (1)..(517): Homolog of NCBI NO: 13897308 NR Description: SERK1 protein [Zea mays]
MGGIPESIGNLSSLTSLDLEDNHLTDRIPSTLGNLKNLQFLTLSRNNLNGSIPDSLTGLSKLINILLDSNNLSGEIPQSLFKIPKYNFTANNLSCGGTFPQPCVTESSPSGDSSSRKTGIIAGVVSGIAVILLGFFFFFFCKDKHKGYKRDVFVDVAGTNFKKGLISGEVDRRIAFGQLRRFAWRELQLATDEFSEKNVLGQGGFGKVYKGLLSDGTKVAVKRLTDFERPGGDEAFQREVEMISVAVHRNLLRLIGFCTTQTERLLVYPFMQNLSVAYCLREIKPGDPVLDWFRRKQIALGAARGLEYLHEHCNPKIIHRDVKAANVLLDEDFEAVVGDFGLAKLVDVRRTNVTTQVRGTMGHIAPECISTGKSSEKTDVFGYGIMLLELVTGQRAIDFSRLEEEDDVLLLDHVKKLEREKRLEDIVDKKLDEDYIKEEVEMMIQVALLCTQAAPEERPAMSEVVRMLEGEGLAERWEEWQNLEVTRQEEFQRLQRRFDWGEDSINNQDAIELSGGR

SEQ ID NO: 70044 - DNA, 2145 bp, Arabidopsis thaliana
  misc_feature (1)..(2145): Ceres Seq. ID no. 2137262
  misc_feature: MA Experiment ID: 20000265 Result: Up-regulated in Transcription
  misc_feature: MA Experiment 20000265 PARAMETER Experiment Name: At_Open_Flower_P Parameter: Age (day) Value: 21
  misc_feature: MA Experiment 20000265 PARAMETER Experiment Name: At_Open_Flower_P Parameter: Plant Line Value: WS
  misc_feature: MA Experiment 20000265 PARAMETER Experiment Name: At_Open_Flower_P Parameter: Tissue Value: Closed Flower vs. Whole Plant
atgggctgcaattgcaccaaaggaacacggcctgataatgataacgtcgataacagcaacagcattgtcagcaatgtcaatgtcaaggagagaagaagcaagcctaagaaaacccccaagaagaagaaaaaatcaaaatctgcttcttcgagcaaagacaacaatgtaggattcgaggaacgaagcaacgacaataaagaagcctccttgacgttgttgatacccattgatgccaagaaggatgatgagtccgagaagaaggtgaatctcgagagaaagtcttctagattggtgtttcagagacggcccaccggtattgaggttggtgccaacaacatagggacattgcagcaacctaagatgactagaatatgcagtgttagtaatggagaaagaggagctcaggttatggctggttggccttcatggttagcttctgttgctggcgaagctatcaatggatggattccacgaaaggctgattctttcgagaagttggaaaagattggacaagggacgtatagcagtgtgtacaaagcccgggacctagagacgaaccaattagttgcactgaagaaagtgcggtttgctaatatggatcccgacagtgttcggttcatggctagagaaataatcatccttcgaaggcttgaccatcctaatgttatgaagcttgagggtttgatcacttcaagagtatcaggaagtatgtatcttatatttgaatacatggaacacgatcttgctggcctagcttcaacccctgggattaacttctctgaggcacagattaagtgctatatgaaacagctgcttcatggtcttgaacattgtcatagccgaggtgtattgcatcgtgacatcaagggctctaatctgctgcttgaccataacaacaatctcaaaattggagatttcggtcttgccaatttttaccaaggtcaccagaagcagcctctcactagccgcgttgtaactttgtggtatcgtccacctgaactattacttggttcaacagactatggtgttacagtagatctgtggagcacaggatgcatactagctgaactctttactgggaaacctatcatgcccggtagaaccgaggtagaacaactacacaagatcttcaaactctgtggatcaccttctgaagagtattggaaaatatcaaaattgccacatgccaccatctttaaacctcaacaaccttacaagcggtgtgtagctgaaacatttaagagtcttccatcttcagctttggccctagttgaggttcttttagctgtagaaccagatgctcgtggaaccacagcttctgcccttgaaagcgagttctttactacatcgcctttggcaagtgacccatcaagtttaccaaagtaccaaccgagaaaggaaattgatgtgaaggctcaagaggaggaggcaaaacgaaagaaagacactagcagtaaacagaatgattcaaaacaagtatctagagaatctaaagctgtgccggctccagactccaatgccgagtctctgacatcaatacaaaaacgtcaagggcagcataaccaggtaagcaatagtgacaagttcaatcctggtgaagatgcagctagcttccggatagaaccactgaagagtggaactgcaaaagacggtcacactcgttatggtgtgtcctcggtgaatagaaatggagagaatgttatgatgggctcgagtcggtctcctagaaaagaactgaggacacaacggtcttttgtccaacgcggaacagcccaattgtcaagattctcaaactcggtagctgctagagatggatcacatttcgctatagcaaatccacggtggtttgaagatagttataacaataataacggaaggcaaaacggaggtgcttggtcccaacgtttggtggttaaacacaaagagtttacaaaacacaaagaatctataacggttaacggtgaaaagaaagagagaatgcactgctcagggcctttggtttctgcaggaggaaacttagatgaaatgttgaaagaacatgaaaggcagattcagttagcggttcgcaaagctcgggtggataagaagacgaatagaggcgataacagacagactcaagcgtttcttgctgcaaatggcaggtga

SEQ ID NO: 70045 - protein, 714 aa, Arabidopsis thaliana
  peptide (1)..(714): Ceres Seq. ID no. 2137263
  misc_feature (163)..(447): Pfam Name: Protein kinase domain Pfam Description: Protein kinase domain
  misc_feature (43)..(714): Homolog of NCBI NO: 15223647 NR Description: CRK1 protein, putative; protein id: At1g57700.1
  misc_feature (127)..(700): Homolog of NCBI NO: 34903662 NR Description: putative CRK1 protein [Oryza sativa (japonica group)] >gi|20804521|dbj|BAB92215.1| putative CRK1 protein [Oryza
  misc_feature (36)..(712): Homolog of NCBI NO: 15219169 NR Description: cell division-related protein, putative; protein At1g53050.1 [Arabidopsis thaliana] >gi|25405618|pir||A96571
  misc_feature (36)..(712): Homolog of NCBI NO: 28393523 NR Description: putative cell division-related protein
  misc_feature (1)..(535): Homolog of NCBI NO: 7488162 NR Description: probable protein kinase T5L19.140 (EC 2.7.1.-) - thaliana >gi|4539004|emb|CAB39625.1| putative protein kinase thaliana] >gi|7267697|emb|CAB78124.1| putative protein kinase
  misc_feature (646)..(703): Homolog of NCBI NO: 7488162 NR Description: probable protein kinase T5L19.140 (EC 2.7.1.-) - thaliana >gi|4539004|emb|CAB39625.1| putative protein kinase thaliana] >gi|7267697|emb|CAB78124.1| putative protein kinase
  misc_feature (1)..(614): Homolog of NCBI NO: 15217521 NR Description: putative protein kinase; protein id: At1g71530.1
  misc_feature (646)..(714): Homolog of NCBI NO: 15217521 NR Description: putative protein kinase; protein id: At1g71530.1
  misc_feature (65)..(575): Homolog of NCBI NO: 15217643 NR Description: protein kinase, putative; protein id: At1g33770.1
  misc_feature (641)..(699): Homolog of NCBI NO: 15217643 NR Description: protein kinase, putative; protein id: At1g33770.1
MGCNCTKGTRPDNDNVDNSNSIVSNVNVKERRSKPKKTPKKKKKSKSASSSKDNNVGFEERSNDNKEASLTLLIPIDAKKDDESEKKVNLERKSSRLVFQRRPTGIEVGANNIGTLQQPKMTRICSVSNGERGAQVMAGWPSWLASVAGEAINGWIPRKADSFEKLEKIGQGTYSSVYKARDLETNQLVALKKVRFANMDPDSVRFMAREIIILRRLDHPNVMKLEGLITSRVSGSMYLIFEYMEHDLAGLASTPGINFSEAQIKCYMKQLLHGLEHCHSRGVLHRDIKGSNLLLDHNNNLKIGDFGLANFYQGHQKQPLTSRVVTLWYRPPELLLGSTDYGVTVDLWSTGCILAELFTGKPIMPGRTEVEQLHKIFKLCGSPSEEYWKISKLPHATIFKPQQPYKRCVAETFKSLPSSALALVEVLLAVEPDARGTTASALESEFFTTSPLASDPSSLPKYQPRKEIDVKAQEEEAKRKKDTSSKQNDSKQVSRESKAVPAPDSNAESLTSIQKRQGQHNQVSNSDKFNPGEDAASFRIEPLKSGTAKDGHTRYGVSSVNRNGENVMMGSSRSPRKELRTQRSFVQRGTAQLSRFSNSVAARDGSHFAIANPRWFEDSYNNNNGRQNGGAWSQRLVVKHKEFTKHKESITVNGEKKERMHCSGPLVSAGGNLDEMLKEHERQIQLAVRKARVDKKTNRGDNRQTQAFLAANGR

SEQ ID NO: 70046 - protein, 594 aa, Arabidopsis thaliana
  peptide (1)..(594): Ceres Seq. ID no. 2137264
  misc_feature (43)..(327): Pfam Name: Protein kinase domain Pfam Description: Protein kinase domain
  misc_feature (1)..(594): Homolog of NCBI NO: 15223647 NR Description: CRK1 protein, putative; protein id: At1g57700.1
  misc_feature (7)..(580): Homolog of NCBI NO: 34903662 NR Description: putative CRK1 protein [Oryza sativa (japonica group)] >gi|20804521|dbj|BAB92215.1| putative CRK1 protein [Oryza
  misc_feature (1)..(592): Homolog of NCBI NO: 15219169 NR Description: cell division-related protein, putative; protein At1g53050.1 [Arabidopsis thaliana] >gi|25405618|pir||A96571
  misc_feature (1)..(592): Homolog of NCBI NO: 28393523 NR Description: putative cell division-related protein
  misc_feature (1)..(415): Homolog of NCBI NO: 7488162 NR Description: probable protein kinase T5L19.140 (EC 2.7.1.-) - thaliana >gi|4539004|emb|CAB39625.1| putative protein kinase thaliana] >gi|7267697|emb|CAB78124.1| putative protein kinase
  misc_feature (526)..(583): Homolog of NCBI NO: 7488162 NR Description: probable protein kinase T5L19.140 (EC 2.7.1.-) - thaliana >gi|4539004|emb|CAB39625.1| putative protein kinase thaliana] >gi|7267697|emb|CAB78124.1| putative protein kinase
  misc_feature (1)..(494): Homolog of NCBI NO: 15217521 NR Description: putative protein kinase; protein id: At1g71530.1
  misc_feature (526)..(594): Homolog of NCBI NO: 15217521 NR Description: putative protein kinase; protein id: At1g71530.1
  misc_feature (1)..(455): Homolog of NCBI NO: 15217643 NR Description: protein kinase, putative; protein id: At1g33770.1
  misc_feature (521)..(579): Homolog of NCBI NO: 15217643 NR Description: protein kinase, putative; protein id: At1g33770.1
MTRICSVSNGERGAQVMAGWPSWLASVAGEAINGWIPRKADSFEKLEKIGQGTYSSVYKARDLETNQLVALKKVRFANMDPDSVRFMAREIIILRRLDHPNVMKLEGLITSRVSGSMYLIFEYMEHDLAGLASTPGINFSEAQIKCYMKQLLHGLEHCHSRGVLHRDIKGSNLLLDHNNNLKIGDFGLANFYQGHQKQPLTSRVVTLWYRPPELLLGSTDYGVTVDLWSTGCILAELFTGKPIMPGRTEVEQLHKIFKLCGSPSEEYWKISKLPHATIFKPQQPYKRCVAETFKSLPSSALALVEVLLAVEPDARGTTASALESEFFTTSPLASDPSSLPKYQPRKEIDVKAQEEEAKRKKDTSSKQNDSKQVSRESKAVPAPDSNAESLTSIQKRQGQHNQVSNSDKFNPGEDAASFRIEPLKSGTAKDGHTRYGVSSVNRNGENVMMGSSRSPRKELRTQRSFVQRGTAQLSRFSNSVAARDGSHFAIANPRWFEDSYNNNNGRQNGGAWSQRLVVKHKEFTKHKESITVNGEKKERMHCSGPLVSAGGNLDEMLKEHERQIQLAVRKARVDKKTNRGDNRQTQAFLAANGR

SEQ ID NO: 70047 - protein, 578 aa, Arabidopsis thaliana
  peptide (1)..(578): Ceres Seq. ID no. 2137265
  misc_feature (27)..(311): Pfam Name: Protein kinase domain Pfam Description: Protein kinase domain
  misc_feature (1)..(578): Homolog of NCBI NO: 15223647 NR Description: CRK1 protein, putative; protein id: At1g57700.1
  misc_feature (1)..(564): Homolog of NCBI NO: 34903662 NR Description: putative CRK1 protein [Oryza sativa (japonica group)] >gi|20804521|dbj|BAB92215.1| putative CRK1 protein [Oryza
  misc_feature (1)..(576): Homolog of NCBI NO: 15219169 NR Description: cell division-related protein, putative; protein At1g53050.1 [Arabidopsis thaliana] >gi|25405618|pir||A96571
  misc_feature (1)..(576): Homolog of NCBI NO: 28393523 NR Description: putative cell division-related protein
  misc_feature (1)..(399): Homolog of NCBI NO: 7488162 NR Description: probable protein kinase T5L19.140 (EC 2.7.1.-) - thaliana >gi|4539004|emb|CAB39625.1| putative protein kinase thaliana] >gi|7267697|emb|CAB78124.1| putative protein kinase
  misc_feature (510)..(567): Homolog of NCBI NO: 7488162 NR Description: probable protein kinase T5L19.140 (EC 2.7.1.-) - thaliana >gi|4539004|emb|CAB39625.1| putative protein kinase thaliana] >gi|7267697|emb|CAB78124.1| putative protein kinase
  misc_feature (1)..(478): Homolog of NCBI NO: 15217521 NR Description: putative protein kinase; protein id: At1g71530.1
  misc_feature (510)..(578): Homolog of NCBI NO: 15217521 NR Description: putative protein kinase; protein id: At1g71530.1
  misc_feature (1)..(439): Homolog of NCBI NO: 15217643 NR Description: protein kinase, putative; protein id: At1g33770.1
  misc_feature (505)..(563): Homolog of NCBI NO: 15217643 NR Description: protein kinase, putative; protein id: At1g33770.1
MAGWPSWLASVAGEAINGWIPRKADSFEKLEKIGQGTYSSVYKARDLETNQLVALKKVRFANMDPDSVRFMAREIIILRRLDHPNVMKLEGLITSRVSGSMYLIFEYMEHDLAGLASTPGINFSEAQIKCYMKQLLHGLEHCHSRGVLHRDIKGSNLLLDHNNNLKIGDFGLANFYQGHQKQPLTSRVVTLWYRPPELLLGSTDYGVTVDLWSTGCILAELFTGKPIMPGRTEVEQLHKIFKLCGSPSEEYWKISKLPHATIFKPQQPYKRCVAETFKSLPSSALALVEVLLAVEPDARGTTASALESEFFTTSPLASDPSSLPKYQPRKEIDVKAQEEEAKRKKDTSSKQNDSKQVSRESKAVPAPDSNAESLTSIQKRQGQHNQVSNSDKFNPGEDAASFRIEPLKSGTAKDGHTRYGVSSVNRNGENVMMGSSRSPRKELRTQRSFVQRGTAQLSRFSNSVAARDGSHFAIANPRWFEDSYNNNNGRQNGGAWSQRLVVKHKEFTKHKESITVNGEKKERMHCSGPLVSAGGNLDEMLKEHERQIQLAVRKARVDKKTNRGDNRQTQAFLAANGR

SEQ ID NO: 70048 - DNA, 2724 bp, Arabidopsis thaliana
  misc_feature (1)..(2724): Ceres Seq. ID no. 2138123
  misc_feature: MA Experiment ID: 20000227 Result: Up-regulated in Transcription
  misc_feature: MA Experiment 20000227 PARAMETER Experiment Name: At_Root-Tips-vs-Tops_P Parameter: Tissue Value: Root Tips vs. Root Tops
  misc_feature: MA Experiment ID: 20000234 Result: Up-regulated in Transcription
  misc_feature: MA Experiment 20000234 PARAMETER Experiment Name: At_Siliques_P Parameter: Age (day) Value: 21
  misc_feature: MA Experiment 20000234 PARAMETER Experiment Name: At_Siliques_P Parameter: Organism Value: A. thaliana
  misc_feature: MA Experiment 20000234 PARAMETER Experiment Name: At_Siliques_P Parameter: Plant Line Value: WS
  misc_feature: MA Experiment 20000234 PARAMETER Experiment Name: At_Siliques_P Parameter: Tissue Value: Less Than 5mm Siliques vs. Whole Plant
  misc_feature: MA Experiment ID: 20000235 Result: Up-regulated in Transcription
  misc_feature: MA Experiment 20000235 PARAMETER Experiment Name: At_Siliques_P Parameter: Age (day) Value: 21
  misc_feature: MA Experiment 20000235 PARAMETER Experiment Name: At_Siliques_P Parameter: Organism Value: A. thaliana
  misc_feature: MA Experiment 20000235 PARAMETER Experiment Name: At_Siliques_P Parameter: Plant Line Value: WS
  misc_feature: MA Experiment 20000235 PARAMETER Experiment Name: At_Siliques_P Parameter: Tissue Value: 5-10mm Siliques vs. Whole Plant
  misc_feature: MA Experiment ID: 20000495 Result: Up-regulated in Transcription
  misc_feature: MA Experiment 20000495 PARAMETER Experiment Name: At_Guard_Cells_P Parameter: Harvest Date Value: 8/2/2002
  misc_feature: MA Experiment 20000495 PARAMETER Experiment Name: At_Guard_Cells_P Parameter: Organism Value: A. thaliana
  misc_feature: MA Experiment 20000495 PARAMETER Experiment Name: At_Guard_Cells_P Parameter: Tissue Value: Guard Cells vs. Leaves
atgaagctcccttgcacgattcgatcaataacaagctctcattttcgcaatagctttagaaatgtgagctctgtgatcgattctgcacaagaagaatgtagaatcgctgaagataagcaattcgtcgatgctgtcaaaagaatcgtgcgagggaaacggagctgggagatcgcattgagcagtgagctagtctcgagaagattgaagactgttcatgttgaagagattctgattggaaccattgatgatcccaaattgggtttgaggtttttcaatttcctcggtttgcatcgaggattcgaccattccacggcgtcgttttgtattttgatccatgctctggtcaaagctaatctcttctggcctgcttcatcactgttgcagacgcttctgcttcgtgcgctgaagccaagtgacgtttttaatgtgctttttagttgttatgaaaaatgtaagcttagttcaagctcgagttttgatttgttgattcagcattatgtacgaagtaggagagttctagatggagttttggtgtttaagatgatgataacgaaagttagtttactgcctgaagtgagaactttgagtgctcttttacatgggttggttaagtttaggcattttggtttggcaatggagttgttcaacgatatggtcagcgtggggattcgtcctgatgtttacatttacacaggagttatacgtagcttgtgtgagttgaaagatctctctcgagctaaagaaatgattgctcatatggaggcaacaggatgtgatgtgaatatagttccatataatgtgttgatagatgggctttgtaagaagcagaaggtttgggaggctgttgggataaagaaggatttagctggaaaagatctgaaaccagatgttgtgacatattgtacattagtctacgggttatgtaaagtgcaagaatttgagatcggattggagatgatggatgagatgttatgtttgaggttcagtcctagtgaagctgcggtttcaagtttggtagaggggttaaggaagaggggaaagattgaagaggcgcttaacttggttaaaagagtagtagattttggtgtctcacctaatttatttgtgtataacgcattgattgactcattgtgcaaaggtagaaagttccacgaagctgagttgctttttgataggatggggaaaattgggttgcgtcctaatgatgtgacctattcaattttgattgatatgttttgcagaagagggaaactggatacggcacttagtttcctgggggaaatggttgatacgggtttgaaactaagtgtgtatccatacaattctttgattaacgggcactgcaagttcggtgacattagtgcagcagagggtttcatggcagagatgattaataaaaagttggagccaacagtggtaacatacacatcattaatgggtggatattgcagcaaagggaaaataaacaaggcccttaggctctatcatgagatgacagggaagggtattgcgccgagtatctatacattcaccacgcttttatcgggtctattccgtgctgggttgattcgtgatgcagtaaagctgtttaacgagatggcagaatggaatgttaagccaaacagagtgacttataatgtcatgattgaaggttattgcgaggaaggagacatgtctaaagcctttgagttcctgaaagaaatgaccgagaaaggtattgtgcctgatacatacagttatagaccgttgatacacgggctatgtctcacaggtcaagcttcggaagccaaagtgttcgtggatggccttcacaagggaaattgtgagctgaatgagatatgttataccggactcttacacggattttgcagagaaggaaaattagaagaggcgttaagcgtttgtcaggagatggtacaaagaggggtggatttggaccttgtgtgctatggtgttcttatagatggaagtttaaagcacaaagatcgaaagttgttttttggacttttaaaggagatgcatgatagaggactaaagcctgatgatgtgatttatacaagtatgattgatgcaaagagcaaaaccggagatttcaaggaagcatttggaatatgggatttgatgataaacgaagggtgtgtacctaatgaagtcacgtacactgctgttatcaacggattatgcaaagccgggtttgttaatgaagccgaggttctttgttcaaaaatgcagcctgtcagttcggttcctaaccaagtaacgtatggttgttttctcgacattctcaccaaaggagaagtagacatgcagaaagctgtggagctccataatgcaatcttgaaagggcttttagcaaacaccgctacatataatatgttgatccgcggtttttgtagacaagggagaatagaagaagcttctgagctcatcacaaggatgataggcgatggagtttcccctgattgtataacctacacaacaatgatcaatgagctttgtaggagaaacgatgtgaagaaagcgattgagttatggaactcgatgacggaaaagggtataaggccagatagagtagcgtataacaccctaatacacggttgttgtgtggcgggagaaatggggaaggcgaccgagttgaggaatgagatgttgagacaaggcttgatacctaacaacaaaaccagtagaacaactacttcgaatgacactagttctaaatcctaa

SEQ ID NO: 70049 - protein, 907 aa, Arabidopsis thaliana
  peptide (1)..(907): Ceres Seq. ID no. 2138124
  misc_feature (578)..(612): Pfam Name: PPR repeat Pfam Description: PPR repeat
  misc_feature (793)..(901): Homolog of NCBI NO: 34394343 NR Description: putative fertility restorer homologue [Oryza
  misc_feature (246)..(894): Homolog of NCBI NO: 34394343 NR Description: putative fertility restorer homologue [Oryza
  misc_feature (85)..(888): Homolog of NCBI NO: 15241049 NR Description: putative protein; protein id: At5g55840.1
  misc_feature (180)..(893): Homolog of NCBI NO: 15241049 NR Description: putative protein; protein id: At5g55840.1
  misc_feature (54)..(900): Homolog of NCBI NO: 34895906 NR Description: P0030H07.18 [Oryza sativa (japonica
  misc_feature (55)..(851): Homolog of NCBI NO: 34394343 NR Description: putative fertility restorer homologue [Oryza
  misc_feature (157)..(894): Homolog of NCBI NO: 15241491 NR Description: putative protein; protein id: At5g14770.1
  misc_feature (167)..(853): Homolog of NCBI NO: 15231338 NR Description: hypothetical protein; protein id: At3g06920.1 thaliana] >gi|6728999|gb|AAF26996.1|AC016827_7 hypothetical
  misc_feature (96)..(891): Homolog of NCBI NO: 15221621 NR Description: unknown protein; protein id: At1g62910.1
  misc_feature (93)..(884): Homolog of NCBI NO: 8777358 NR Description: salt-inducible protein-like [Arabidopsis thaliana]
MKLPCTIRSITSSHFRNSFRNVSSVIDSAQEECRIAEDKQFVDAVKRIVRGKRSWEIALSSELVSRRLKTVHVEEILIGTIDDPKLGLRFFNFLGLHRGFDHSTASFCILIHALVKANLFWPASSLLQTLLLRALKPSDVFNVLFSCYEKCKLSSSSSFDLLIQHYVRSRRVLDGVLVFKMMITKVSLLPEVRTLSALLHGLVKFRHFGLAMELFNDMVSVGIRPDVYIYTGVIRSLCELKDLSRAKEMIAHMEATGCDVNIVPYNVLIDGLCKKQKVWEAVGIKKDLAGKDLKPDVVTYCTLVYGLCKVQEFEIGLEMMDEMLCLRFSPSEAAVSSLVEGLRKRGKIEEALNLVKRVVDFGVSPNLFVYNALIDSLCKGRKFHEAELLFDRMGKIGLRPNDVTYSILIDMFCRRGKLDTALSFLGEMVDTGLKLSVYPYNSLINGHCKFGDISAAEGFMAEMINKKLEPTVVTYTSLMGGYCSKGKINKALRLYHEMTGKGIAPSIYTFTTLLSGLFRAGLIRDAVKLFNEMAEWNVKPNRVTYNVMIEGYCEEGDMSKAFEFLKEMTEKGIVPDTYSYRPLIHGLCLTGQASEAKVFVDGLHKGNCELNEICYTGLLHGFCREGKLEEALSVCQEMVQRGVDLDLVCYGVLIDGSLKHKDRKLFFGLLKEMHDRGLKPDDVIYTSMIDAKSKTGDFKEAFGIWDLMINEGCVPNEVTYTAVINGLCKAGFVNEAEVLCSKMQPVSSVPNQVTYGCFLDILTKGEVDMQKAVELHNAILKGLLANTATYNMLIRGFCRQGRIEEASELITRMIGDGVSPDCITYTTMINELCRRNDVKKAIELWNSMTEKGIRPDRVAYNTLIHGCCVAGEMGKATELRNEMLRQGLIPNNKTSRTTTSNDTSSKS

SEQ ID NO: 70050 - protein, 727 aa, Arabidopsis thaliana
  peptide (1)..(727): Ceres Seq. ID no. 2138125
  misc_feature (398)..(432): Pfam Name: PPR repeat Pfam Description: PPR repeat
  misc_feature (1)..(720): Homolog of NCBI NO: 34895906 NR Description: P0030H07.18 [Oryza sativa (japonica
  misc_feature (1)..(671): Homolog of NCBI NO: 34394343 NR Description: putative fertility restorer homologue [Oryza
  misc_feature (613)..(721): Homolog of NCBI NO: 34394343 NR Description: putative fertility restorer homologue [Oryza
  misc_feature (66)..(714): Homolog of NCBI NO: 34394343 NR Description: putative fertility restorer homologue [Oryza
  misc_feature (1)..(708): Homolog of NCBI NO: 15241049 NR Description: putative protein; protein id: At5g55840.1
  misc_feature (1)..(713): Homolog of NCBI NO: 15241049 NR Description: putative protein; protein id: At5g55840.1
  misc_feature (1)..(714): Homolog of NCBI NO: 15241491 NR Description: putative protein; protein id: At5g14770.1
  misc_feature (1)..(673): Homolog of NCBI NO: 15231338 NR Description: hypothetical protein; protein id: At3g06920.1 thaliana] >gi|6728999|gb|AAF26996.1|AC016827_7 hypothetical
  misc_feature (1)..(711): Homolog of NCBI NO: 15221621 NR Description: unknown protein; protein id: At1g62910.1
  misc_feature (1)..(704): Homolog of NCBI NO: 8777358 NR Description: salt-inducible protein-like [Arabidopsis thaliana]
MMITKVSLLPEVRTLSALLHGLVKFRHFGLAMELFNDMVSVGIRPDVYIYTGVIRSLCELKDLSRAKEMIAHMEATGCDVNIVPYNVLIDGLCKKQKVWEAVGIKKDLAGKDLKPDVVTYCTLVYGLCKVQEFEIGLEMMDEMLCLRFSPSEAAVSSLVEGLRKRGKIEEALNLVKRVVDFGVSPNLFVYNALIDSLCKGRKFHEAELLFDRMGKIGLRPNDVTYSILIDMFCRRGKLDTALSFLGEMVDTGLKLSVYPYNSLINGHCKFGDISAAEGFMAEMINKKLEPTVVTYTSLMGGYCSKGKINKALRLYHEMTGKGIAPSIYTFTTLLSGLFRAGLIRDAVKLFNEMAEWNVKPNRVTYNVMIEGYCEEGDMSKAFEFLKEMTEKGIVPDTYSYRPLIHGLCLTGQASEAKVFVDGLHKGNCELNEICYTGLLHGFCREGKLEEALSVCQEMVQRGVDLDLVCYGVLIDGSLKHKDRKLFFGLLKEMHDRGLKPDDVIYTSMIDAKSKTGDFKEAFGIWDLMINEGCVPNEVTYTAVINGLCKAGFVNEAEVLCSKMQPVSSVPNQVTYGCFLDILTKGEVDMQKAVELHNAILKGLLANTATYNMLIRGFCRQGRIEEASELITRMIGDGVSPDCITYTTMINELCRRNDVKKAIELWNSMTEKGIRPDRVAYNTLIHGCCVAGEMGKATELRNEMLRQGLIPNNKTSRTTTSNDTSSKS

SEQ ID NO: 70051 - protein, 726 aa, Arabidopsis thaliana
  peptide (1)..(726): Ceres Seq. ID no. 2138126
  misc_feature (397)..(431): Pfam Name: PPR repeat Pfam Description: PPR repeat
  misc_feature (1)..(719): Homolog of NCBI NO: 34895906 NR Description: P0030H07.18 [Oryza sativa (japonica
  misc_feature (1)..(670): Homolog of NCBI NO: 34394343 NR Description: putative fertility restorer homologue [Oryza
  misc_feature (612)..(720): Homolog of NCBI NO: 34394343 NR Description: putative fertility restorer homologue [Oryza
  misc_feature (65)..(713): Homolog of NCBI NO: 34394343 NR Description: putative fertility restorer homologue [Oryza
  misc_feature (1)..(707): Homolog of NCBI NO: 15241049 NR Description: putative protein; protein id: At5g55840.1
  misc_feature (1)..(712): Homolog of NCBI NO: 15241049 NR Description: putative protein; protein id: At5g55840.1
  misc_feature (1)..(713): Homolog of NCBI NO: 15241491 NR Description: putative protein; protein id: At5g14770.1
  misc_feature (1)..(672): Homolog of NCBI NO: 15231338 NR Description: hypothetical protein; protein id: At3g06920.1 thaliana] >gi|6728999|gb|AAF26996.1|AC016827_7 hypothetical
  misc_feature (1)..(710): Homolog of NCBI NO: 15221621 NR Description: unknown protein; protein id: At1g62910.1
  misc_feature (1)..(703): Homolog of NCBI NO: 8777358 NR Description: salt-inducible protein-like [Arabidopsis thaliana]
MITKVSLLPEVRTLSALLHGLVKFRHFGLAMELFNDMVSVGIRPDVYIYTGVIRSLCELKDLSRAKEMIAHMEATGCDVNIVPYNVLIDGLCKKQKVWEAVGIKKDLAGKDLKPDVVTYCTLVYGLCKVQEFEIGLEMMDEMLCLRFSPSEAAVSSLVEGLRKRGKIEEALNLVKRVVDFGVSPNLFVYNALIDSLCKGRKFHEAELLFDRMGKIGLRPNDVTYSILIDMFCRRGKLDTALSFLGEMVDTGLKLSVYPYNSLINGHCKFGDISAAEGFMAEMINKKLEPTVVTYTSLMGGYCSKGKINKALRLYHEMTGKGIAPSIYTFTTLLSGLFRAGLIRDAVKLFNEMAEWNVKPNRVTYNVMIEGYCEEGDMSKAFEFLKEMTEKGIVPDTYSYRPLIHGLCLTGQASEAKVFVDGLHKGNCELNEICYTGLLHGFCREGKLEEALSVCQEMVQRGVDLDLVCYGVLIDGSLKHKDRKLFFGLLKEMHDRGLKPDDVIYTSMIDAKSKTGDFKEAFGIWDLMINEGCVPNEVTYTAVINGLCKAGFVNEAEVLCSKMQPVSSVPNQVTYGCFLDILTKGEVDMQKAVELHNAILKGLLANTATYNMLIRGFCRQGRIEEASELITRMIGDGVSPDCITYTTMINELCRRNDVKKAIELWNSMTEKGIRPDRVAYNTLIHGCCVAGEMGKATELRNEMLRQGLIPNNKTSRTTTSNDTSSKS

SEQ ID NO: 70052 - DNA, 981 bp, Arabidopsis thaliana
  misc_feature (1)..(981): Ceres Seq. ID no. 2138218
  misc_feature: MA Experiment ID: 20000171 Result: Down-regulated in Transcription
  misc_feature: MA Experiment 20000171 PARAMETER Experiment Name: At_42deg_Heat_P Parameter: Age (day) Value: 14
  misc_feature: MA Experiment 20000171 PARAMETER Experiment Name: At_42deg_Heat_P Parameter: Organism Value: A. thaliana
  misc_feature: MA Experiment 20000171 PARAMETER Experiment Name: At_42deg_Heat_P Parameter: Plant Line Value: WS
  misc_feature: MA Experiment 20000171 PARAMETER Experiment Name: At_42deg_Heat_P Parameter: Temperature (deg C) Value: 42 vs. 22
  misc_feature: MA Experiment 20000171 PARAMETER Experiment Name: At_42deg_Heat_P Parameter: Timepoint (hr) Value: 1
  misc_feature: MA Experiment 20000171 PARAMETER Experiment Name: At_42deg_Heat_P Parameter: Tissue Value: Aerial
  misc_feature: MA Experiment ID: 20000173 Result: Down-regulated in Transcription
  misc_feature: MA Experiment 20000173 PARAMETER Experiment Name: At_42deg_Heat_P Parameter: Age (day) Value: 14
  misc_feature: MA Experiment 20000173 PARAMETER Experiment Name: At_42deg_Heat_P Parameter: Organism Value: A. thaliana
  misc_feature: MA Experiment 20000173 PARAMETER Experiment Name: At_42deg_Heat_P Parameter: Plant Line Value: WS
  misc_feature: MA Experiment 20000173 PARAMETER Experiment Name: At_42deg_Heat_P Parameter: Temperature (deg C) Value: 42 vs. 22
  misc_feature: MA Experiment 20000173 PARAMETER Experiment Name: At_42deg_Heat_P Parameter: Timepoint (hr) Value: 6
  misc_feature: MA Experiment 20000173 PARAMETER Experiment Name: At_42deg_Heat_P Parameter: Tissue Value: Aerial
  misc_feature: MA Experiment ID: 20000179 Result: Up-regulated in Transcription
  misc_feature: MA Experiment 20000179 PARAMETER Experiment Name: At_Germinating_Seeds_P Parameter: Age (hr) Value: 6 vs. 0
  misc_feature: MA Experiment 20000179 PARAMETER Experiment Name: At_Germinating_Seeds_P Parameter: Tissue Value: Germinating Seeds
  misc_feature: MA Experiment ID: 20000180 Result: Up-regulated in Transcription
  misc_feature: MA Experiment 20000180 PARAMETER Experiment Name: At_Germinating_Seeds_P Parameter: Age (hr) Value: 24 vs. 0
  misc_feature: MA Experiment 20000180 PARAMETER Experiment Name: At_Germinating_Seeds_P Parameter: Tissue Value: Germinating Seeds
  misc_feature: MA Experiment ID: 20000439 Result: Up-regulated in Transcription
  misc_feature: MA Experiment 20000439 PARAMETER Experiment Name: At_Roots__P Parameter: Age (day) Value: 14 vs. 21
  misc_feature: MA Experiment 20000439 PARAMETER Experiment Name: At_Roots__P Parameter: Organism Value: A. thaliana
  misc_feature: MA Experiment 20000439 PARAMETER Experiment Name: At_Roots__P Parameter: Tissue Value: Roots vs. Whole Plant
  misc_feature: MA Experiment ID: 20001247 Result: Up-regulated in Transcription
  misc_feature: MA Experiment 20001247 PARAMETER Experiment Name: At_Far-red-induction_P Parameter: Age (day) Value: 7
  misc_feature: MA Experiment 20001247 PARAMETER Experiment Name: At_Far-red-induction_P Parameter: Light Value: Far-red vs. White
  misc_feature: MA Experiment 20001247 PARAMETER Experiment Name: At_Far-red-induction_P Parameter: Organism Value: A. thaliana
  misc_feature: MA Experiment 20001247 PARAMETER Experiment Name: At_Far-red-induction_P Parameter: Plant Line Value: Columbia
  misc_feature: MA Experiment 20001247 PARAMETER Experiment Name: At_Far-red-induction_P Parameter: Timepoint (hr) Value: 1
  misc_feature: MA Experiment 20001247 PARAMETER Experiment Name: At_Far-red-induction_P Parameter: Tissue Value: Whole Plant
  misc_feature: MA Experiment ID: 20001248 Result: Down-regulated in Transcription
  misc_feature: MA Experiment 20001248 PARAMETER Experiment Name: At_Far-red-induction_P Parameter: Age (day) Value: 7
  misc_feature: MA Experiment 20001248 PARAMETER Experiment Name: At_Far-red-induction_P Parameter: Light Value: Far-red vs. White
  misc_feature: MA Experiment 20001248 PARAMETER Experiment Name: At_Far-red-induction_P Parameter: Organism Value: A. thaliana
  misc_feature: MA Experiment 20001248 PARAMETER Experiment Name: At_Far-red-induction_P Parameter: Plant Line Value: Columbia
  misc_feature: MA Experiment 20001248 PARAMETER Experiment Name: At_Far-red-induction_P Parameter: Timepoint (hr) Value: 4
  misc_feature: MA Experiment 20001248 PARAMETER Experiment Name: At_Far-red-induction_P Parameter: Tissue Value: Whole Plant
  misc_feature: MA Experiment ID: 20001911 Result: Down-regulated in Transcription
  misc_feature: MA Experiment 20001911 PARAMETER Experiment Name: At_Drought_Reproduction_P Parameter: Age (day) Value: 40
  misc_feature: MA Experiment 20001911 PARAMETER Experiment Name: At_Drought_Reproduction_P Parameter: Organism Value: A. thaliana
  misc_feature: MA Experiment 20001911 PARAMETER Experiment Name: At_Drought_Reproduction_P Parameter: Plant Line Value: WS
  misc_feature: MA Experiment 20001911 PARAMETER Experiment Name: At_Drought_Reproduction_P Parameter: Timepoint (day) Value: 10
  misc_feature: MA Experiment 20001911 PARAMETER Experiment Name: At_Drought_Reproduction_P Parameter: Tissue Value: Flowers
  misc_feature: MA Experiment 20001911 PARAMETER Experiment Name: At_Drought_Reproduction_P Parameter: Treatment Value: Drought vs. No Drought
atgactaatggcggtagaggttccggcggcggtggtggtggcggcggcagggagtcaggcggtcgtgatttggaaattagacctggtggtatgttggttcagaaacgtaacccggatttggatcctgtcggacctccaccaccaccgatgatcagagttagaatcaagtacggtgccgtctaccatgagatcaatattagtcctcaagcttcttttggggagctaaagaagatgttgactggaccaacgggtattcatcatcaagatcagaagctaatgtataaagataaagagagggattcgaaggcgttcctcgatgtttcgggagtgaaagataaatctaagatggtgcttatagaagacccgcttagccaagagaaacggtttttggagatgaggaagattgctaaaaccgaaaaggcgtctaaagcgatatcggatattagccttgaagttgataggctcggcggacgagtttcggcttttgagatggtaactaaaaaaggagggaagattgcggagaaagatcttgtaacggttatcgaattgctgatgaatgagttgattaagttggatgcgattgtagctgaaggagatgtcaagttacaaagaaagatgcaggtgaagagagtgcagaattatgtggaaacactcgatgccttgaaggtgaaaaactccatggctaatgggcaacagaaacagtcaagtactgctcagagacttgcaccgattcaagaacataacaatgaagagagacaagaacagaaaccgatacaatcgctcatggacatgccgatacaatacaaagagaagaagcaagagattgaagaggagcctaggaattcaggggaaggaccatttgtgttagattcttctgctaaatgggaaacattcgatcatcatcccgtgacgccattgagctcgactactgcgaaaaataacgcgatcccgcccaggtttaattgggaattctttgattga

SEQ ID NO: 70053 - protein, 326 aa, Arabidopsis thaliana
  peptide (1)..(326): Ceres Seq. ID no. 2138219
  misc_feature (144)..(222): Pfam Name: BAG domain Pfam Description: BAG domain
  misc_feature (1)..(326): Homolog of NCBI NO: 15242267 NR Description: putative protein; protein id: At5g52060.1 thaliana] >gi|10177741|dbj|BAB11054.1| contains similarity to
  misc_feature (14)..(299): Homolog of NCBI NO: 21537107 NR Description: unknown [Arabidopsis thaliana]
  misc_feature (14)..(299): Homolog of NCBI NO: 15240726 NR Description: putative protein; protein id: At5g07220.1, by cDNA: 12022., supported by cDNA: gi_16226482 [Arabidopsis
  misc_feature (15)..(299): Homolog of NCBI NO: 30697630 NR Description: BAG domain containing protein [Arabidopsis
  misc_feature (15)..(299): Homolog of NCBI NO: 21553443 NR Description: unknown [Arabidopsis thaliana]
  misc_feature (15)..(299): Homolog of NCBI NO: 30697627 NR Description: BAG domain containing protein [Arabidopsis
  misc_feature (4)..(256): Homolog of NCBI NO: 25553557 NR Description: OSJNBa0038F22.4 [Oryza sativa (japonica
  misc_feature (4)..(256): Homolog of NCBI NO: 34898024 NR Description: ESTs AU082174(S13676),AU032395(R3986) correspond a region of the predicted gene.~Similar to Arabidopsis thaliana
  misc_feature (84)..(314): Homolog of NCBI NO: 10334497 NR Description: hypothetical protein [Cicer arietinum]
  misc_feature (15)..(299): Homolog of NCBI NO: 10176928 NR Description: contains similarity to unknown
MTNGGRGSGGGGGGGGRESGGRDLEIRPGGMLVQKRNPDLDPVGPPPPPMIRVRIKYGAVYHEINISPQASFGELKKMLTGPTGIHHQDQKLMYKDKERDSKAFLDVSGVKDKSKMVLIEDPLSQEKRFLEMRKIAKTEKASKAISDISLEVDRLGGRVSAFEMVTKKGGKIAEKDLVTVIELLMNELIKLDAIVAEGDVKLQRKMQVKRVQNYVETLDALKVKNSMANGQQKQSSTAQRLAPIQEHNNEERQEQKPIQSLMDMPIQYKEKKQEIEEEPRNSGEGPFVLDSSAKWETFDHHPVTPLSSTTAKNNAIPPRFNWEFFD

SEQ ID NO: 70054 - protein, 296 aa, Arabidopsis thaliana
  peptide (1)..(296): Ceres Seq. ID no. 2138220
  misc_feature (114)..(192): Pfam Name: BAG domain Pfam Description: BAG domain
  misc_feature (1)..(296): Homolog of NCBI NO: 15242267 NR Description: putative protein; protein id: At5g52060.1 thaliana] >gi|10177741|dbj|BAB11054.1| contains similarity to
  misc_feature (1)..(269): Homolog of NCBI NO: 21537107 NR Description: unknown [Arabidopsis thaliana]
  misc_feature (1)..(269): Homolog of NCBI NO: 15240726 NR Description: putative protein; protein id: At5g07220.1, by cDNA: 12022., supported by cDNA: gi_16226482 [Arabidopsis
  misc_feature (1)..(269): Homolog of NCBI NO: 30697630 NR Description: BAG domain containing protein [Arabidopsis
  misc_feature (1)..(269): Homolog of NCBI NO: 21553443 NR Description: unknown [Arabidopsis thaliana]
  misc_feature (1)..(269): Homolog of NCBI NO: 30697627 NR Description: BAG domain containing protein [Arabidopsis
  misc_feature (1)..(226): Homolog of NCBI NO: 25553557 NR Description: OSJNBa0038F22.4 [Oryza sativa (japonica
  misc_feature (1)..(226): Homolog of NCBI NO: 34898024 NR Description: ESTs AU082174(S13676),AU032395(R3986) correspond a region of the predicted gene.~Similar to Arabidopsis thaliana
  misc_feature (54)..(284): Homolog of NCBI NO: 10334497 NR Description: hypothetical protein [Cicer arietinum]
  misc_feature (1)..(269): Homolog of NCBI NO: 10176928 NR Description: contains similarity to unknown
MLVQKRNPDLDPVGPPPPPMIRVRIKYGAVYHEINISPQASFGELKKMLTGPTGIHHQDQKLMYKDKERDSKAFLDVSGVKDKSKMVLIEDPLSQEKRFLEMRKIAKTEKASKAISDISLEVDRLGGRVSAFEMVTKKGGKIAEKDLVTVIELLMNELIKLDAIVAEGDVKLQRKMQVKRVQNYVETLDALKVKNSMANGQQKQSSTAQRLAPIQEHNNEERQEQKPIQSLMDMPIQYKEKKQEIEEEPRNSGEGPFVLDSSAKWETFDHHPVTPLSSTTAKNNAIPPRFNWEFFD

SEQ ID NO: 70055 - protein, 277 aa, Arabidopsis thaliana
  peptide (1)..(277): Ceres Seq. ID no. 2138221
  misc_feature (95)..(173): Pfam Name: BAG domain Pfam Description: BAG domain
  misc_feature (1)..(277): Homolog of NCBI NO: 15242267 NR Description: putative protein; protein id: At5g52060.1 thaliana] >gi|10177741|dbj|BAB11054.1| contains similarity to
  misc_feature (1)..(250): Homolog of NCBI NO: 21537107 NR Description: unknown [Arabidopsis thaliana]
  misc_feature (1)..(250): Homolog of NCBI NO: 15240726 NR Description: putative protein; protein id: At5g07220.1, by cDNA: 12022., supported by cDNA: gi_16226482 [Arabidopsis
  misc_feature (1)..(250): Homolog of NCBI NO: 30697630 NR Description: BAG domain containing protein [Arabidopsis
  misc_feature (1)..(250): Homolog of NCBI NO: 21553443 NR Description: unknown [Arabidopsis thaliana]
  misc_feature (1)..(250): Homolog of NCBI NO: 30697627 NR Description: BAG domain containing protein [Arabidopsis
  misc_feature (1)..(207): Homolog of NCBI NO: 25553557 NR Description: OSJNBa0038F22.4 [Oryza sativa (japonica
  misc_feature (1)..(207): Homolog of NCBI NO: 34898024 NR Description: ESTs AU082174(S13676),AU032395(R3986) correspond a region of the predicted gene.~Similar to Arabidopsis thaliana
  misc_feature (35)..(265): Homolog of NCBI NO: 10334497 NR Description: hypothetical protein [Cicer arietinum]
  misc_feature (1)..(250): Homolog of NCBI NO: 10176928 NR Description: contains similarity to unknown
MIRVRIKYGAVYHEINISPQASFGELKKMLTGPTGIHHQDQKLMYKDKERDSKAFLDVSGVKDKSKMVLIEDPLSQEKRFLEMRKIAKTEKASKAISDISLEVDRLGGRVSAFEMVTKKGGKIAEKDLVTVIELLMNELIKLDAIVAEGDVKLQRKMQVKRVQNYVETLDALKVKNSMANGQQKQSSTAQRLAPIQEHNNEERQEQKPIQSLMDMPIQYKEKKQEIEEEPRNSGEGPFVLDSSAKWETFDHHPVTPLSSTTAKNNAIPPRFNWEFFD

SEQ ID NO: 70056 - DNA, 1170 bp, Arabidopsis thaliana
  misc_feature (1)..(1170): Ceres Seq. ID no. 2139038
  misc_feature: MA Experiment ID: 20000264 Result: Up-regulated in Transcription
  misc_feature: MA Experiment 20000264 PARAMETER Experiment Name: At_Open_Flower_P Parameter: Age (day) Value: 21
  misc_feature: MA Experiment 20000264 PARAMETER Experiment Name: At_Open_Flower_P Parameter: Plant Line Value: WS
  misc_feature: MA Experiment 20000264 PARAMETER Experiment Name: At_Open_Flower_P Parameter: Tissue Value: Open Flower vs. Whole Plant
  misc_feature: MA Experiment ID: 20000286 Result: Up-regulated in Transcription
  misc_feature: MA Experiment 20000286 PARAMETER Experiment Name: At_Open_Flower_P Parameter: Age (day) Value: 21
  misc_feature: MA Experiment 20000286 PARAMETER Experiment Name: At_Open_Flower_P Parameter: Plant Line Value: WS
  misc_feature: MA Experiment 20000286 PARAMETER Experiment Name: At_Open_Flower_P Parameter: Tissue Value: Half Open vs. Whole Plant
  misc_feature: MA Experiment ID: 20000794 Result: Up-regulated in Transcription
  misc_feature: MA Experiment 20000794 PARAMETER Experiment Name: At_Petals_P Parameter: Age (day) Value: 23-25 days
  misc_feature: MA Experiment 20000794 PARAMETER Experiment Name: At_Petals_P Parameter: Plant Line Value: WS
  misc_feature: MA Experiment 20000794 PARAMETER Experiment Name: At_Petals_P Parameter: Tissue Value: Petals vs. Whole plant
  misc_feature: MA Experiment ID: 20001910 Result: Up-regulated in Transcription
  misc_feature: MA Experiment 20001910 PARAMETER Experiment Name: At_Drought_Reproduction_P Parameter: Age (day) Value: 37
  misc_feature: MA Experiment 20001910 PARAMETER Experiment Name: At_Drought_Reproduction_P Parameter: Organism Value: A. thaliana
  misc_feature: MA Experiment 20001910 PARAMETER Experiment Name: At_Drought_Reproduction_P Parameter: Plant Line Value: WS
  misc_feature: MA Experiment 20001910 PARAMETER Experiment Name: At_Drought_Reproduction_P Parameter: Timepoint (day) Value: 7
  misc_feature: MA Experiment 20001910 PARAMETER Experiment Name: At_Drought_Reproduction_P Parameter: Tissue Value: Flowers
  misc_feature: MA Experiment 20001910 PARAMETER Experiment Name: At_Drought_Reproduction_P Parameter: Treatment Value: Drought vs. No Drought
  misc_feature: Pfam Name: Pkinase Pfam Description: Protein kinase domain
atgatgaagctttgtccttgtttcatcaacccgcatcagcttggacctaattcgcctagagattcatttgacgaaggtcttacagcttatagaggccatagccgtaaactttttgcactgttcacatttcgctcacatcggaaaggaagctgcaggcagaagtatataacggaagagataaagaagtatgggaacgtgaagaactgcggtcgaatcttcaaattcaaggagctaatagctgcaaccgacaatttcagcatggattgtatgattggtgaaggcggttttggaagagtctacaaagggtttctcaccagcctcaatcaggtggtggctgtaaagaggcttgataggaatgggttgcaaggaacaagagagttctttgcagaagtaatggtattgagtctggctcaacatccaaaccttgtcaatctcattggctattgcgtcgaagacgagcaacgagtcctcgtttatgaattcatgcctaacggatctttggaagatcatttgttcgacttaccagaagggtcaccaagtctagactggttcaccagaatgcggatagtgcacggagcagcgaaagggctcgagtacttgcacgactacgcagatcctcctgtgatctaccgcgatttcaaagcttcaaacatattgttacaatctgacttcaactcaaagctatcggatttcgggttagctagacttggaccaactgaaggcaaagatcatgtgtccacaagagtcatgggaacatacggatactgtgcccctgaatatgcgatgaccggtcaactcactgctaaatccgatgtctacagtttcggtgttgtccttcttgagatcatttccggaagacgagctattgatggcgatagaccaactgaagaacaaaacttgatctcttgggcggaaccgttgttgaaagatagaaggatgtttgcgcagattgtggatccaaatctagatgggaactacccagtaaaagggttgcatcaagctctagcgattgcagcgatgtgtttgcaagaagaagcagagactaggccattgatgggagatgtggtcacagcacttgagttcttggctaagcctatagaggtggttgataacactaacactactcctgcctctcctactcagacatcatcatctgattcatcaaactaa

SEQ ID NO: 70057 - protein, 389 aa, Arabidopsis thaliana
  peptide (1)..(389): Ceres Seq. ID no. 2139039
  misc_feature: Pfam Name: Pkinase Pfam Description: Protein kinase domain
  misc_feature (1)..(389): Homolog of NCBI NO: 30696629 NR Description: protein kinase, putative [Arabidopsis thaliana]
  misc_feature (1)..(303): Homolog of NCBI NO: 7434288 NR Description: probable serine/threonine-specific protein kinase
  misc_feature (293)..(389): Homolog of NCBI NO: 7434288 NR Description: probable serine/threonine-specific protein kinase
  misc_feature (45)..(363): Homolog of NCBI NO: 11994140 NR Description: receptor protein kinase-like protein [Arabidopsis
  misc_feature (45)..(363): Homolog of NCBI NO: 15232294 NR Description: protein kinase, putative; protein id: At3g20530.1
  misc_feature (45)..(363): Homolog of NCBI NO: 28392990 NR Description: putative protein kinase [Arabidopsis thaliana]
  misc_feature (15)..(388): Homolog of NCBI NO: 34907210 NR Description: putative serine/threonine kinase PBS1 protein
  misc_feature (65)..(363): Homolog of NCBI NO: 34394036 NR Description: putative protein serine/threonine kinase BNK1
  misc_feature (2)..(363): Homolog of NCBI NO: 15238886 NR Description: protein kinase -like protein; protein id:
  misc_feature (52)..(382): Homolog of NCBI NO: 11259782 NR Description: protein kinase-like - Arabidopsis thaliana
MMKLCPCFINPHQLGPNSPRDSFDEGLTAYRGHSRKLFALFTFRSHRKGSCRQKYITEEIKKYGNVKNCGRIFKFKELIAATDNFSMDCMIGEGGFGRVYKGFLTSLNQVVAVKRLDRNGLQGTREFFAEVMVLSLAQHPNLVNLIGYCVEDEQRVLVYEFMPNGSLEDHLFDLPEGSPSLDWFTRMRIVHGAAKGLEYLHDYADPPVIYRDFKASNILLQSDFNSKLSDFGLARLGPTEGKDHVSTRVMGTYGYCAPEYAMTGQLTAKSDVYSFGVVLLEIISGRRAIDGDRPTEEQNLISWAEPLLKDRRMFAQIVDPNLDGNYPVKGLHQALAIAAMCLQEEAETRPLMGDVVTALEFLAKPIEVVDNTNTTPASPTQTSSSDSSN

SEQ ID NO: 70058 - protein, 388 aa, Arabidopsis thaliana
  peptide (1)..(388): Ceres Seq. ID no. 2139040
  misc_feature: Pfam Name: Pkinase Pfam Description: Protein kinase domain
  misc_feature (1)..(388): Homolog of NCBI NO: 30696629 NR Description: protein kinase, putative [Arabidopsis thaliana]
  misc_feature (1)..(302): Homolog of NCBI NO: 7434288 NR Description: probable serine/threonine-specific protein kinase
  misc_feature (292)..(388): Homolog of NCBI NO: 7434288 NR Description: probable serine/threonine-specific protein kinase
  misc_feature (44)..(362): Homolog of NCBI NO: 11994140 NR Description: receptor protein kinase-like protein [Arabidopsis
  misc_feature (44)..(362): Homolog of NCBI NO: 15232294 NR Description: protein kinase, putative; protein id: At3g20530.1
  misc_feature (44)..(362): Homolog of NCBI NO: 28392990 NR Description: putative protein kinase [Arabidopsis thaliana]
  misc_feature (14)..(387): Homolog of NCBI NO: 34907210 NR Description: putative serine/threonine kinase PBS1 protein
  misc_feature (64)..(362): Homolog of NCBI NO: 34394036 NR Description: putative protein serine/threonine kinase BNK1
  misc_feature (1)..(362): Homolog of NCBI NO: 15238886 NR Description: protein kinase -like protein; protein id:
  misc_feature (51)..(381): Homolog of NCBI NO: 11259782 NR Description: protein kinase-like - Arabidopsis thaliana
MKLCPCFINPHQLGPNSPRDSFDEGLTAYRGHSRKLFALFTFRSHRKGSCRQKYITEEIKKYGNVKNCGRIFKFKELIAATDNFSMDCMIGEGGFGRVYKGFLTSLNQVVAVKRLDRNGLQGTREFFAEVMVLSLAQHPNLVNLIGYCVEDEQRVLVYEFMPNGSLEDHLFDLPEGSPSLDWFTRMRIVHGAAKGLEYLHDYADPPVIYRDFKASNILLQSDFNSKLSDFGLARLGPTEGKDHVSTRVMGTYGYCAPEYAMTGQLTAKSDVYSFGVVLLEIISGRRAIDGDRPTEEQNLISWAEPLLKDRRMFAQIVDPNLDGNYPVKGLHQALAIAAMCLQEEAETRPLMGDVVTALEFLAKPIEVVDNTNTTPASPTQTSSSDSSN

SEQ ID NO: 70059 - protein, 303 aa, Arabidopsis thaliana
  peptide (1)..(303): Ceres Seq. ID no. 2139041
  misc_feature: Pfam Name: Pkinase Pfam Description: Protein kinase domain
  misc_feature (1)..(303): Homolog of NCBI NO: 30696629 NR Description: protein kinase, putative [Arabidopsis thaliana]
  misc_feature (1)..(217): Homolog of NCBI NO: 7434288 NR Description: probable serine/threonine-specific protein kinase
  misc_feature (207)..(303): Homolog of NCBI NO: 7434288 NR Description: probable serine/threonine-specific protein kinase
  misc_feature (1)..(277): Homolog of NCBI NO: 11994140 NR Description: receptor protein kinase-like protein [Arabidopsis
  misc_feature (1)..(277): Homolog of NCBI NO: 15232294 NR Description: protein kinase, putative; protein id: At3g20530.1
  misc_feature (1)..(277): Homolog of NCBI NO: 28392990 NR Description: putative protein kinase [Arabidopsis thaliana]
  misc_feature (1)..(302): Homolog of NCBI NO: 34907210 NR Description: putative serine/threonine kinase PBS1 protein
  misc_feature (1)..(277): Homolog of NCBI NO: 34394036 NR Description: putative protein serine/threonine kinase BNK1
  misc_feature (1)..(277): Homolog of NCBI NO: 15238886 NR Description: protein kinase -like protein; protein id:
  misc_feature (1)..(296): Homolog of NCBI NO: 11259782 NR Description: protein kinase-like - Arabidopsis thaliana
MDCMIGEGGFGRVYKGFLTSLNQVVAVKRLDRNGLQGTREFFAEVMVLSLAQHPNLVNLIGYCVEDEQRVLVYEFMPNGSLEDHLFDLPEGSPSLDWFTRMRIVHGAAKGLEYLHDYADPPVIYRDFKASNILLQSDFNSKLSDFGLARLGPTEGKDHVSTRVMGTYGYCAPEYAMTGQLTAKSDVYSFGVVLLEIISGRRAIDGDRPTEEQNLISWAEPLLKDRRMFAQIVDPNLDGNYPVKGLHQALAIAAMCLQEEAETRPLMGDVVTALEFLAKPIEVVDNTNTTPASPTQTSSSDSSN

SEQ ID NO: 70060 - DNA, 531 bp, Arabidopsis thaliana
  misc_feature (1)..(531): Ceres Seq. ID no. 2139394
  misc_feature: MA Experiment ID: 20000173 Result: Down-regulated in Transcription
  misc_feature: MA Experiment 20000173 PARAMETER Experiment Name: At_42deg_Heat_P Parameter: Age (day) Value: 14
  misc_feature: MA Experiment 20000173 PARAMETER Experiment Name: At_42deg_Heat_P Parameter: Organism Value: A. thaliana
  misc_feature: MA Experiment 20000173 PARAMETER Experiment Name: At_42deg_Heat_P Parameter: Plant Line Value: WS
  misc_feature: MA Experiment 20000173 PARAMETER Experiment Name: At_42deg_Heat_P Parameter: Temperature (deg C) Value: 42 vs. 22
  misc_feature: MA Experiment 20000173 PARAMETER Experiment Name: At_42deg_Heat_P Parameter: Timepoint (hr) Value: 6
  misc_feature: MA Experiment 20000173 PARAMETER Experiment Name: At_42deg_Heat_P Parameter: Tissue Value: Aerial
  misc_feature: MA Experiment ID: 20000180 Result: Down-regulated in Transcription
  misc_feature: MA Experiment 20000180 PARAMETER Experiment Name: At_Germinating_Seeds_P Parameter: Age (hr) Value: 24 vs. 0
  misc_feature: MA Experiment 20000180 PARAMETER Experiment Name: At_Germinating_Seeds_P Parameter: Tissue Value: Germinating Seeds
  misc_feature: MA Experiment ID: 20000184 Result: Down-regulated in Transcription
  misc_feature: MA Experiment 20000184 PARAMETER Experiment Name: At_Shoots__P Parameter: Age (day) Value: 7
  misc_feature: MA Experiment 20000184 PARAMETER Experiment Name: At_Shoots__P Parameter: Tissue Value: Shoots vs. Whole Plant
  misc_feature: MA Experiment ID: 20000234 Result: Up-regulated in Transcription
  misc_feature: MA Experiment 20000234 PARAMETER Experiment Name: At_Siliques_P Parameter: Age (day) Value: 21
  misc_feature: MA Experiment 20000234 PARAMETER Experiment Name: At_Siliques_P Parameter: Organism Value: A. thaliana
  misc_feature: MA Experiment 20000234 PARAMETER Experiment Name: At_Siliques_P Parameter: Plant Line Value: WS
  misc_feature: MA Experiment 20000234 PARAMETER Experiment Name: At_Siliques_P Parameter: Tissue Value: Less Than 5mm Siliques vs. Whole Plant
  misc_feature: MA Experiment ID: 20001247 Result: Down-regulated in Transcription
  misc_feature: MA Experiment 20001247 PARAMETER Experiment Name: At_Far-red-induction_P Parameter: Age (day) Value: 7
  misc_feature: MA Experiment 20001247 PARAMETER Experiment Name: At_Far-red-induction_P Parameter: Light Value: Far-red vs. White
  misc_feature: MA Experiment 20001247 PARAMETER Experiment Name: At_Far-red-induction_P Parameter: Organism Value: A. thaliana
  misc_feature: MA Experiment 20001247 PARAMETER Experiment Name: At_Far-red-induction_P Parameter: Plant Line Value: Columbia
  misc_feature: MA Experiment 20001247 PARAMETER Experiment Name: At_Far-red-induction_P Parameter: Timepoint (hr) Value: 1
  misc_feature: MA Experiment 20001247 PARAMETER Experiment Name: At_Far-red-induction_P Parameter: Tissue Value: Whole Plant
  misc_feature: MA Experiment ID: 20001560 Result: Up-regulated in Transcription
  misc_feature: MA Experiment 20001560 PARAMETER Experiment Name: At_Drought_Soil_Dry_P Parameter: Age (day) Value: 28
  misc_feature: MA Experiment 20001560 PARAMETER Experiment Name: At_Drought_Soil_Dry_P Parameter: Organism Value: A. thaliana
  misc_feature: MA Experiment 20001560 PARAMETER Experiment Name: At_Drought_Soil_Dry_P Parameter: Plant Line Value: WS
  misc_feature: MA Experiment 20001560 PARAMETER Experiment Name: At_Drought_Soil_Dry_P Parameter: Post Timepoint (hr) Value: None
  misc_feature: MA Experiment 20001560 PARAMETER Experiment Name: At_Drought_Soil_Dry_P Parameter: Post-Treatment Value: None
  misc_feature: MA Experiment 20001560 PARAMETER Experiment Name: At_Drought_Soil_Dry_P Parameter: Timepoint (day) Value: 14
  misc_feature: MA Experiment 20001560 PARAMETER Experiment Name: At_Drought_Soil_Dry_P Parameter: Treatment Value: Drought vs. No Drought
atggaggagactatactggtcggtgatgacctaatgacgggtcctccatctcctgttatccctcctgaaattgcttcacatgtgcttgaaggtgttgatttgtgcgatgggattttgaggaatctattcctgtgtttgcaaatcaatgatattgaaccattttgccaagatgagcttgcattgtatcgacaatgtgctgaaaagagggacaaaatattgagagttagacttcaagagagcgaacacaagttaggattgtctatgcccattgaactcgctaaggaaaggattacgcagcttgaagctgaagccacatcttttgagaggcacttgattctagcaagtggagctgaaggaatagaaggatttcgccggagatggagtttacacggtcggatgacggataccaaaaaaagactggagtcactgaagcagggaatggagaacaggaacaaggttgaacatgaacataaccaacaccatgatcagtccccaaaaccttctgctccaaaaagatggttcttttggtga

SEQ ID NO: 70061 - protein, 176 aa, Arabidopsis thaliana
  peptide (1)..(176): Ceres Seq. ID no. 2139395
  misc_feature (1)..(176): Homolog of NCBI NO: 21741739 NR Description: OSJNBa0073L04.19 [Oryza sativa (japonica
  misc_feature (1)..(145): Homolog of NCBI NO: 15233419 NR Description: hypothetical protein; protein id: At4g04190.1
  misc_feature (137)..(176): Homolog of NCBI NO: 15233419 NR Description: hypothetical protein; protein id: At4g04190.1
MEETILVGDDLMTGPPSPVIPPEIASHVLEGVDLCDGILRNLFLCLQINDIEPFCQDELALYRQCAEKRDKILRVRLQESEHKLGLSMPIELAKERITQLEAEATSFERHLILASGAEGIEGFRRRWSLHGRMTDTKKRLESLKQGMENRNKVEHEHNQHHDQSPKPSAPKRWFFW

SEQ ID NO: 70062 - protein, 165 aa, Arabidopsis thaliana
  peptide (1)..(165): Ceres Seq. ID no. 2139396
  misc_feature (1)..(165): Homolog of NCBI NO: 21741739 NR Description: OSJNBa0073L04.19 [Oryza sativa (japonica
  misc_feature (1)..(134): Homolog of NCBI NO: 15233419 NR Description: hypothetical protein; protein id: At4g04190.1
  misc_feature (126)..(165): Homolog of NCBI NO: 15233419 NR Description: hypothetical protein; protein id: At4g04190.1
MTGPPSPVIPPEIASHVLEGVDLCDGILRNLFLCLQINDIEPFCQDELALYRQCAEKRDKILRVRLQESEHKLGLSMPIELAKERITQLEAEATSFERHLILASGAEGIEGFRRRWSLHGRMTDTKKRLESLKQGMENRNKVEHEHNQHHDQSPKPSAPKRWFFW

SEQ ID NO: 70063 - protein, 89 aa, Arabidopsis thaliana
  peptide (1)..(89): Ceres Seq. ID no. 2139397
  misc_feature (1)..(89): Homolog of NCBI NO: 21741739 NR Description: OSJNBa0073L04.19 [Oryza sativa (japonica
  misc_feature (1)..(58): Homolog of NCBI NO: 15233419 NR Description: hypothetical protein; protein id: At4g04190.1
  misc_feature (50)..(89): Homolog of NCBI NO: 15233419 NR Description: hypothetical protein; protein id: At4g04190.1
MPIELAKERITQLEAEATSFERHLILASGAEGIEGFRRRWSLHGRMTDTKKRLESLKQGMENRNKVEHEHNQHHDQSPKPSAPKRWFFW

SEQ ID NO: 70064 - DNA, 1719 bp, Arabidopsis thaliana
  misc_feature (1)..(1719): Ceres Seq. ID no. 2139789
  misc_feature: MA Experiment ID: 20000184 Result: Up-regulated in Transcription
  misc_feature: MA Experiment 20000184 PARAMETER Experiment Name: At_Shoots__P Parameter: Age (day) Value: 7
  misc_feature: MA Experiment 20000184 PARAMETER Experiment Name: At_Shoots__P Parameter: Tissue Value: Shoots vs. Whole Plant
atgagcaccagcggcaacgaaagttccggcgaccaagcctccacccttgacgatatcatgaagctgcttcaagagctctccgacaagaccgagcgacagcaaaccgcagtaacttctttatctgataagttcgtttcttttcaggaacagtgcagtgggcagctcgcggcgctcaccaccagccattctgaaataaggacagctcacaacgcgtacgcagatcgagttgacttcctgtctgccggagtgtcacgtaccgctggagttcgctcacgccttgattttcaaggagacatcagttcgagcatccaaacttcacaggcaggagcaggtcagcagactccgccacctcagttacctctcgtctctcaagttgaagttggggcaacttcaaaccagaaccaggttgtactgactaccccggcaaatcccgaccttcctattgatggagttaccgcaccaactccatcattatttcgagtagagccctcccttagacgtccgacctcagagtctccccaggagccggatggtcagctcgatgacgaaaacgacgttccaaaggttgtcccgcctccaattaccgaagaattgtctggtccaaatagtcccgaagtccctgataatcagacacctcacgactggggggcagactggagagaaccaatccgagactacatcctcaacggggtactccctaccgacaagtgggacgctcgaaagctgaagaccacttgtgctcgtttctgcgtagcagatggcattttatacagaagaatcatctcggctccggatgctatttgtattttcggggaacaaactcggactgtcataaaagaaatccacgatggaacttgtggaaaccactctggaggtcgctctttggcctttaaatgtcagaagcacgcaccgtatatccttcaacccgccgaacttctcacttcggtatcgtcaccttatccattcatgaaatggtctatggacaacattggaccacttcacgtttcaactcggggagtcagattcctacttgttctaaccgactatttctcgaagtgggttaaagctgcagcctactcaaacataactcagtttgaagttttttgtgcaaggtggcaaatccgcctcagtcggtcaacacctcgcaacccgcaagggaatggtcaggccgaggcgatgaataaaacgatcatctcgaacctcaaaaaaaaactaaatgagtataagggagcttggttcggagagttacaaaacgtgttatgggcaatccgtacaactcctaggagagctaccggtgagacccccttcgctctctttcatggaatggaagcagttatcccagccgagatcaaagtcccgagtacgagaagagtacaaaatccccagaacgaggctgcgaacaaccaaatgatggttgatatgattgatattatcgacgaacgacgcaaccaagcgttagttcggatgcaaaactatcataacgccgcagctcgatactataactcaaatgtccgaaacagatcattcgaggtcggaactctggtccttcgccgaatccagcaaaacacggctgaaaaaggagctggaaaattggggatcagttgggaaggtccttacaaaatcactcacatagtccggaacggggtctatcgtctcattaacatggaaggcaaaatagttcgcagagcatggaatgccgctcatctcaaacgtttttag

SEQ ID NO: 70065 - protein, 572 aa, Arabidopsis thaliana
  peptide (1)..(572): Ceres Seq. ID no. 2139790
  misc_feature (317)..(373): Pfam Name: Integrase core domain Pfam Description: Integrase core domain
  misc_feature (136)..(373): Homolog of NCBI NO: 25411604 NR Description: probable retroelement pol polyprotein [imported] Arabidopsis thaliana >gi|4115365|gb|AAD03367.1| putative
  misc_feature (364)..(572): Homolog of NCBI NO: 25411604 NR Description: probable retroelement pol polyprotein [imported] Arabidopsis thaliana >gi|4115365|gb|AAD03367.1| putative
  misc_feature (1)..(74): Homolog of NCBI NO: 25411604 NR Description: probable retroelement pol polyprotein [imported] Arabidopsis thaliana >gi|4115365|gb|AAD03367.1| putative
  misc_feature (161)..(548): Homolog of NCBI NO: 25411421 NR Description: probable retroelement gag/pol polyprotein - Arabidopsis thaliana >gi|4557066|gb|AAD22505.1| putative
  misc_feature (1)..(94): Homolog of NCBI NO: 25411421 NR Description: probable retroelement gag/pol polyprotein - Arabidopsis thaliana >gi|4557066|gb|AAD22505.1| putative
  misc_feature (164)..(302): Homolog of NCBI NO: 25405445 NR Description: hypothetical protein F11M15.5 [imported] - thaliana >gi|4836930|gb|AAD30632.1|AC006085_5 Hypothetical
  misc_feature (1)..(79): Homolog of NCBI NO: 25405445 NR Description: hypothetical protein F11M15.5 [imported] - thaliana >gi|4836930|gb|AAD30632.1|AC006085_5 Hypothetical
  misc_feature (298)..(373): Homolog of NCBI NO: 25405445 NR Description: hypothetical protein F11M15.5 [imported] - thaliana >gi|4836930|gb|AAD30632.1|AC006085_5 Hypothetical
  misc_feature (365)..(572): Homolog of NCBI NO: 30686804 NR Description: retrotransposon gag protein family [Arabidopsis
  misc_feature (185)..(301): Homolog of NCBI NO: 30686804 NR Description: retrotransposon gag protein family [Arabidopsis
MSTSGNESSGDQASTLDDIMKLLQELSDKTERQQTAVTSLSDKFVSFQEQCSGQLAALTTSHSEIRTAHNAYADRVDFLSAGVSRTAGVRSRLDFQGDISSSIQTSQAGAGQQTPPPQLPLVSQVEVGATSNQNQVVLTTPANPDLPIDGVTAPTPSLFRVEPSLRRPTSESPQEPDGQLDDENDVPKVVPPPITEELSGPNSPEVPDNQTPHDWGADWREPIRDYILNGVLPTDKWDARKLKTTCARFCVADGILYRRIISAPDAICIFGEQTRTVIKEIHDGTCGNHSGGRSLAFKCQKHAPYILQPAELLTSVSSPYPFMKWSMDNIGPLHVSTRGVRFLLVLTDYFSKWVKAAAYSNITQFEVFCARWQIRLSRSTPRNPQGNGQAEAMNKTIISNLKKKLNEYKGAWFGELQNVLWAIRTTPRRATGETPFALFHGMEAVIPAEIKVPSTRRVQNPQNEAANNQMMVDMIDIIDERRNQALVRMQNYHNAAARYYNSNVRNRSFEVGTLVLRRIQQNTAEKGAGKLGISWEGPYKITHIVRNGVYRLINMEGKIVRRAWNAAHLKRF

SEQ ID NO: 70066 - protein, 553 aa, Arabidopsis thaliana
  peptide (1)..(553): Ceres Seq. ID no. 2139791
  misc_feature (298)..(354): Pfam Name: Integrase core domain Pfam Description: Integrase core domain
  misc_feature (117)..(354): Homolog of NCBI NO: 25411604 NR Description: probable retroelement pol polyprotein [imported] Arabidopsis thaliana >gi|4115365|gb|AAD03367.1| putative
  misc_feature (345)..(553): Homolog of NCBI NO: 25411604 NR Description: probable retroelement pol polyprotein [imported] Arabidopsis thaliana >gi|4115365|gb|AAD03367.1| putative
  misc_feature (1)..(55): Homolog of NCBI NO: 25411604 NR Description: probable retroelement pol polyprotein [imported] Arabidopsis thaliana >gi|4115365|gb|AAD03367.1| putative
  misc_feature (142)..(529): Homolog of NCBI NO: 25411421 NR Description: probable retroelement gag/pol polyprotein - Arabidopsis thaliana >gi|4557066|gb|AAD22505.1| putative
  misc_feature (1)..(75): Homolog of NCBI NO: 25411421 NR Description: probable retroelement gag/pol polyprotein - Arabidopsis thaliana >gi|4557066|gb|AAD22505.1| putative
  misc_feature (145)..(283): Homolog of NCBI NO: 25405445 NR Description: hypothetical protein F11M15.5 [imported] - thaliana >gi|4836930|gb|AAD30632.1|AC006085_5 Hypothetical
  misc_feature (1)..(60): Homolog of NCBI NO: 25405445 NR Description: hypothetical protein F11M15.5 [imported] - thaliana >gi|4836930|gb|AAD30632.1|AC006085_5 Hypothetical
  misc_feature (279)..(354): Homolog of NCBI NO: 25405445 NR Description: hypothetical protein F11M15.5 [imported] - thaliana >gi|4836930|gb|AAD30632.1|AC006085_5 Hypothetical
  misc_feature (346)..(553): Homolog of NCBI NO: 30686804 NR Description: retrotransposon gag protein family [Arabidopsis
  misc_feature (166)..(282): Homolog of NCBI NO: 30686804 NR Description: retrotransposon gag protein family [Arabidopsis
MKLLQELSDKTERQQTAVTSLSDKFVSFQEQCSGQLAALTTSHSEIRTAHNAYADRVDFLSAGVSRTAGVRSRLDFQGDISSSIQTSQAGAGQQTPPPQLPLVSQVEVGATSNQNQVVLTTPANPDLPIDGVTAPTPSLFRVEPSLRRPTSESPQEPDGQLDDENDVPKVVPPPITEELSGPNSPEVPDNQTPHDWGADWREPIRDYILNGVLPTDKWDARKLKTTCARFCVADGILYRRIISAPDAICIFGEQTRTVIKEIHDGTCGNHSGGRSLAFKCQKHAPYILQPAELLTSVSSPYPFMKWSMDNIGPLHVSTRGVRFLLVLTDYFSKWVKAAAYSNITQFEVFCARWQIRLSRSTPRNPQGNGQAEAMNKTIISNLKKKLNEYKGAWFGELQNVLWAIRTTPRRATGETPFALFHGMEAVIPAEIKVPSTRRVQNPQNEAANNQMMVDMIDIIDERRNQALVRMQNYHNAAARYYNSNVRNRSFEVGTLVLRRIQQNTAEKGAGKLGISWEGPYKITHIVRNGVYRLINMEGKIVRRAWNAAHLKRF

SEQ ID NO: 70067 - DNA, 3294 bp, Arabidopsis thaliana
  misc_feature (1)..(3294): Ceres Seq. ID no. 2140457
  misc_feature: MA Experiment ID: 20000171 Result: Up-regulated in Transcription
  misc_feature: MA Experiment 20000171 PARAMETER Experiment Name: At_42deg_Heat_P Parameter: Age (day) Value: 14
  misc_feature: MA Experiment 20000171 PARAMETER Experiment Name: At_42deg_Heat_P Parameter: Organism Value: A. thaliana
  misc_feature: MA Experiment 20000171 PARAMETER Experiment Name: At_42deg_Heat_P Parameter: Plant Line Value: WS
  misc_feature: MA Experiment 20000171 PARAMETER Experiment Name: At_42deg_Heat_P Parameter: Temperature (deg C) Value: 42 vs. 22
  misc_feature: MA Experiment 20000171 PARAMETER Experiment Name: At_42deg_Heat_P Parameter: Timepoint (hr) Value: 1
  misc_feature: MA Experiment 20000171 PARAMETER Experiment Name: At_42deg_Heat_P Parameter: Tissue Value: Aerial
  misc_feature: MA Experiment ID: 20000173 Result: Up-regulated in Transcription
  misc_feature: MA Experiment 20000173 PARAMETER Experiment Name: At_42deg_Heat_P Parameter: Age (day) Value: 14
  misc_feature: MA Experiment 20000173 PARAMETER Experiment Name: At_42deg_Heat_P Parameter: Organism Value: A. thaliana
  misc_feature: MA Experiment 20000173 PARAMETER Experiment Name: At_42deg_Heat_P Parameter: Plant Line Value: WS
  misc_feature: MA Experiment 20000173 PARAMETER Experiment Name: At_42deg_Heat_P Parameter: Temperature (deg C) Value: 42 vs. 22
  misc_feature: MA Experiment 20000173 PARAMETER Experiment Name: At_42deg_Heat_P Parameter: Timepoint (hr) Value: 6
  misc_feature: MA Experiment 20000173 PARAMETER Experiment Name: At_42deg_Heat_P Parameter: Tissue Value: Aerial
  misc_feature: MA Experiment ID: 20001247 Result: Up-regulated in Transcription
  misc_feature: MA Experiment 20001247 PARAMETER Experiment Name: At_Far-red-induction_P Parameter: Age (day) Value: 7
  misc_feature: MA Experiment 20001247 PARAMETER Experiment Name: At_Far-red-induction_P Parameter: Light Value: Far-red vs. White
  misc_feature: MA Experiment 20001247 PARAMETER Experiment Name: At_Far-red-induction_P Parameter: Organism Value: A. thaliana
  misc_feature: MA Experiment 20001247 PARAMETER Experiment Name: At_Far-red-induction_P Parameter: Plant Line Value: Columbia
  misc_feature: MA Experiment 20001247 PARAMETER Experiment Name: At_Far-red-induction_P Parameter: Timepoint (hr) Value: 1
  misc_feature: MA Experiment 20001247 PARAMETER Experiment Name: At_Far-red-induction_P Parameter: Tissue Value: Whole Plant
atgacggaaccagaaagattaggaggaatctccctgagttttccggtgaatgaagaagatacggtaacgacaacatcaccaaagactcttccacggaggctccgtcgtcgtcttctcgaaccgaagagtcctgtctccgccgcagagatcgattccaaactcagagaagctgatctccgtcgtcagcaatattatgaatcactatcgagtaaggcacgacctaagatgagaagtccgagatcaggaagtatagaggagcttagtcagagacttgaatcaaagcttaatgctgctgaacaaaagaggttaagtattttggagaaggagctggctcgtttggctaagatggatgaagctagacaagctgcgaagaatggacttgagcaacgagttgagaaagagcgtgatgagttagagagtaaggttgaagaaagggttttgaaggctgagaagaataggatgcttttgtttaaagctatggctcaacgaagagcggcgaagaggcagcgtgctgcgcagagtttgatgaagaaagctattcaggagacgaggtataaggagagtgtgcgtgctgcgatttatcagaagagagcagctgcagagagtaagcggatggggattttggaagcggaaaggagaagagcgaatgcgagattgactcgggtgtttggtgctgctagttctgtgcggagtcaaaaggaagctgagagaaggaaaatgaaggaccgtttagaagagcggcttcaaagggcaaagaagctgaaagcgcaatatatgaggcgaaggagaggtatggatagttgttcatcttcaagatcagaaacaatgcgaaagaaccaagtgcatcttgttaggatgttagtaagatgctggaggagatttgctaaatacaagaaatctacttttgtcttggctagagcatatcatgagttggggatcaatgaaaaatccattgagtcagtaccatttgagcagtttgccattcaaatgaactcagtttctgtaattcaaacggtcaaagcattgcttgatcgcttggagatccgactcactctatctaaggcatccaatgtggagaacattaatcatcttcttaagcacatctttccgcctgttcgaagagggaaatcacccagtcccatgagtaaaggcgagcaaaattcacccaattccaagatgggatatcaaaaacttaaaaagattgcgagatatccagctagaatttttctttgtgcctacatgatcaagcaacatcccggtgcaatttttagaggaagaggtgaacatgagattgcgcttgtggaatctgcaacttgtcttattcgggagtttgaactgctggtgaaagttatattggaaggaccagaatctaccctcccgggcaatgtatctttcgtagctcaacgtccaaaaaaattcagatctcagctagaagcatttgataaagcttggtgctcttaccttgagggttttgtagtctggaaaattaatgatgctaagcttctagaaaaagatttagccagaactcaagagtctgagctgtctgaggtatcaaaacatacttcctctcccaaaataatagacagtggcttgaatcagaagacggtaaaggcatcttctccaactaatcgggctttattctctgaaactgatggagcacgagaatcaaaagcacctgcagattcgcatcttccatcttcatcttcaccttcaccgggctcatcgaatttgtcaccctctttgaactctgggagcgaggccatttctactccaaacgtggtagctaatagctttgatgcagcgttggctagtgagaacgaagtaattgtaaatgaaattgtccatgacaatagcagtagttttgctgatagcctcgaccctaacactggggatacaagcaaccttcaggtgagggttaaggagacaatggaaaaggctttctgggatggtgtcatggaatccatgaaacagtcgcagccagacttcagctgggttattaaactcatgaaagaagtcagggatgaactctgtgagatatctcccaaagactggagacaagagattgttcaaactatcgatacggatgtgctgtcacagttactggcttctggtaatgtcgacatgggttatcttggaaatattcttgagttttcccttggcattttgctgaaactctctgctccagctaatgaagaggaaatcagggttactcaccataaactaatgacagaacttggagagatagttccaactgatggccattcgaattcgtcatatgcagtcttaatggttaaggggctacgctttgttttgcagcagattcagattctaaagaaggaaatcagcaaatctcgtttgaaactcttggagccacttcttaagggacctgctggtctggaatatctgaagaagtcattttccagtcggcatggttccccagaccaagcgtcttcctcgctaccattgacaaaacgttggcttttaagtgttcgaggagaagcagagagggagtggaaagaacacaaagatgctctttctgctgtcataaataaccactctggatcatcaggcctcccttcgaccaccatgcgaactggtggcaatgtctcctctgtttcaaaagtcaataccccttcatctccatttccaggaatcgaactgtcagagtgcaagggagaaactgtggatcttcttgttcgcattggcctgttaaaaatggtgagcgaaatcggtggtcttactttagaaactgtccctgaaacatttcaacttaacctatctaggctgagagatgttcaatcccaaatccagaaaatcactcttgtctccatcagtgttttgatcctccagcaaacactagtaagcgaaaactcatcctcgattgacatggaggctattacacggacttgcataaaccgtctttacgagatgctagacgcaaaacctgatgcaggtctttcagaaatcatggaaacactctccgagcttcttgattctaacgatgcagagacaaagaaacaagtaatcgcaaacatgcttgtgaaaagcttacaagcaggagacgcagtgttcacacatgtatcacagaccatatacctagccattagagccgcggttttggccggaaacaacacgaagagaaagcagttggtggaaacaatgctaagaaagatcggagcagcttctctctcggacaaggtcatagaggtttcagacattcttgttcttgtggcaacagtgtcacgttctgttcatggattgtggtatgaagaattgctaaagaaaccgaattaa

SEQ ID NO: 70068 - protein, 1097 aa, Arabidopsis thaliana
  peptide (1)..(1097): Ceres Seq. ID no. 2140458
  misc_feature (612)..(1096): Pfam Name: T-complex protein 11 Pfam Description: T-complex protein 11
  misc_feature (523)..(802): Homolog of NCBI NO: 7023926 NR Description: unnamed protein product [Homo sapiens]
  misc_feature (523)..(802): Homolog of NCBI NO: 31377739 NR Description: hypothetical protein FLJ11336 [Homo sapiens]
  misc_feature (9)..(549): Homolog of NCBI NO: 15219971 NR Description: unknown protein; protein id: At1g22930.1
  misc_feature (18)..(549): Homolog of NCBI NO: 39545651 NR Description: OJ000114_01.6 [Oryza sativa (japonica
  misc_feature (306)..(380): Homolog of NCBI NO: 39545653 NR Description: OJ000114_01.8 [Oryza sativa (japonica
  misc_feature (355)..(716): Homolog of NCBI NO: 39545653 NR Description: OJ000114_01.8 [Oryza sativa (japonica
  misc_feature (497)..(1092): Homolog of NCBI NO: 39545653 NR Description: OJ000114_01.8 [Oryza sativa (japonica
  misc_feature (497)..(1092): Homolog of NCBI NO: 39545651 NR Description: OJ000114_01.6 [Oryza sativa (japonica
  misc_feature (489)..(1093): Homolog of NCBI NO: 15219971 NR Description: unknown protein; protein id: At1g22930.1
  misc_feature (535)..(821): Homolog of NCBI NO: 38648893 NR Description: Unknown (protein for MGC:73347) [Danio rerio]
MTEPERLGGISLSFPVNEEDTVTTTSPKTLPRRLRRRLLEPKSPVSAAEIDSKLREADLRRQQYYESLSSKARPKMRSPRSGSIEELSQRLESKLNAAEQKRLSILEKELARLAKMDEARQAAKNGLEQRVEKERDELESKVEERVLKAEKNRMLLFKAMAQRRAAKRQRAAQSLMKKAIQETRYKESVRAAIYQKRAAAESKRMGILEAERRRANARLTRVFGAASSVRSQKEAERRKMKDRLEERLQRAKKLKAQYMRRRRGMDSCSSSRSETMRKNQVHLVRMLVRCWRRFAKYKKSTFVLARAYHELGINEKSIESVPFEQFAIQMNSVSVIQTVKALLDRLEIRLTLSKASNVENINHLLKHIFPPVRRGKSPSPMSKGEQNSPNSKMGYQKLKKIARYPARIFLCAYMIKQHPGAIFRGRGEHEIALVESATCLIREFELLVKVILEGPESTLPGNVSFVAQRPKKFRSQLEAFDKAWCSYLEGFVVWKINDAKLLEKDLARTQESELSEVSKHTSSPKIIDSGLNQKTVKASSPTNRALFSETDGARESKAPADSHLPSSSSPSPGSSNLSPSLNSGSEAISTPNVVANSFDAALASENEVIVNEIVHDNSSSFADSLDPNTGDTSNLQVRVKETMEKAFWDGVMESMKQSQPDFSWVIKLMKEVRDELCEISPKDWRQEIVQTIDTDVLSQLLASGNVDMGYLGNILEFSLGILLKLSAPANEEEIRVTHHKLMTELGEIVPTDGHSNSSYAVLMVKGLRFVLQQIQILKKEISKSRLKLLEPLLKGPAGLEYLKKSFSSRHGSPDQASSSLPLTKRWLLSVRGEAEREWKEHKDALSAVINNHSGSSGLPSTTMRTGGNVSSVSKVNTPSSPFPGIELSECKGETVDLLVRIGLLKMVSEIGGLTLETVPETFQLNLSRLRDVQSQIQKITLVSISVLILQQTLVSENSSSIDMEAITRTCINRLYEMLDAKPDAGLSEIMETLSELLDSNDAETKKQVIANMLVKSLQAGDAVFTHVSQTIYLAIRAAVLAGNNTKRKQLVETMLRKIGAASLSDKVIEVSDILVLVATVSRSVHGLWYEELLKKPN

SEQ ID NO: 70069 - protein, 1022 aa, Arabidopsis thaliana
  peptide (1)..(1022): Ceres Seq. ID no. 2140459
  misc_feature (537)..(1021): Pfam Name: T-complex protein 11 Pfam Description: T-complex protein 11
  misc_feature (414)..(1018): Homolog of NCBI NO: 15219971 NR Description: unknown protein; protein id: At1g22930.1
  misc_feature (1)..(474): Homolog of NCBI NO: 15219971 NR Description: unknown protein; protein id: At1g22930.1
  misc_feature (422)..(1017): Homolog of NCBI NO: 39545651 NR Description: OJ000114_01.6 [Oryza sativa (japonica
  misc_feature (1)..(474): Homolog of NCBI NO: 39545651 NR Description: OJ000114_01.6 [Oryza sativa (japonica
  misc_feature (422)..(1017): Homolog of NCBI NO: 39545653 NR Description: OJ000114_01.8 [Oryza sativa (japonica
  misc_feature (231)..(305): Homolog of NCBI NO: 39545653 NR Description: OJ000114_01.8 [Oryza sativa (japonica
  misc_feature (280)..(641): Homolog of NCBI NO: 39545653 NR Description: OJ000114_01.8 [Oryza sativa (japonica
  misc_feature (448)..(727): Homolog of NCBI NO: 7023926 NR Description: unnamed protein product [Homo sapiens]
  misc_feature (448)..(727): Homolog of NCBI NO: 31377739 NR Description: hypothetical protein FLJ11336 [Homo sapiens]
  misc_feature (460)..(746): Homolog of NCBI NO: 38648893 NR Description: Unknown (protein for MGC:73347) [Danio rerio]
MRSPRSGSIEELSQRLESKLNAAEQKRLSILEKELARLAKMDEARQAAKNGLEQRVEKERDELESKVEERVLKAEKNRMLLFKAMAQRRAAKRQRAAQSLMKKAIQETRYKESVRAAIYQKRAAAESKRMGILEAERRRANARLTRVFGAASSVRSQKEAERRKMKDRLEERLQRAKKLKAQYMRRRRGMDSCSSSRSETMRKNQVHLVRMLVRCWRRFAKYKKSTFVLARAYHELGINEKSIESVPFEQFAIQMNSVSVIQTVKALLDRLEIRLTLSKASNVENINHLLKHIFPPVRRGKSPSPMSKGEQNSPNSKMGYQKLKKIARYPARIFLCAYMIKQHPGAIFRGRGEHEIALVESATCLIREFELLVKVILEGPESTLPGNVSFVAQRPKKFRSQLEAFDKAWCSYLEGFVVWKINDAKLLEKDLARTQESELSEVSKHTSSPKIIDSGLNQKTVKASSPTNRALFSETDGARESKAPADSHLPSSSSPSPGSSNLSPSLNSGSEAISTPNVVANSFDAALASENEVIVNEIVHDNSSSFADSLDPNTGDTSNLQVRVKETMEKAFWDGVMESMKQSQPDFSWVIKLMKEVRDELCEISPKDWRQEIVQTIDTDVLSQLLASGNVDMGYLGNILEFSLGILLKLSAPANEEEIRVTHHKLMTELGEIVPTDGHSNSSYAVLMVKGLRFVLQQIQILKKEISKSRLKLLEPLLKGPAGLEYLKKSFSSRHGSPDQASSSLPLTKRWLLSVRGEAEREWKEHKDALSAVINNHSGSSGLPSTTMRTGGNVSSVSKVNTPSSPFPGIELSECKGETVDLLVRIGLLKMVSEIGGLTLETVPETFQLNLSRLRDVQSQIQKITLVSISVLILQQTLVSENSSSIDMEAITRTCINRLYEMLDAKPDAGLSEIMETLSELLDSNDAETKKQVIANMLVKSLQAGDAVFTHVSQTIYLAIRAAVLAGNNTKRKQLVETMLRKIGAASLSDKVIEVSDILVLVATVSRSVHGLWYEELLKKPN

SEQ ID NO: 70070 - protein, 982 aa, Arabidopsis thaliana
  peptide (1)..(982): Ceres Seq. ID no. 2140460
  misc_feature (497)..(981): Pfam Name: T-complex protein 11 Pfam Description: T-complex protein 11
  misc_feature (374)..(978): Homolog of NCBI NO: 15219971 NR Description: unknown protein; protein id: At1g22930.1
  misc_feature (1)..(434): Homolog of NCBI NO: 15219971 NR Description: unknown protein; protein id: At1g22930.1
  misc_feature (382)..(977): Homolog of NCBI NO: 39545651 NR Description: OJ000114_01.6 [Oryza sativa (japonica
  misc_feature (1)..(434): Homolog of NCBI NO: 39545651 NR Description: OJ000114_01.6 [Oryza sativa (japonica
  misc_feature (382)..(977): Homolog of NCBI NO: 39545653 NR Description: OJ000114_01.8 [Oryza sativa (japonica
  misc_feature (191)..(265): Homolog of NCBI NO: 39545653 NR Description: OJ000114_01.8 [Oryza sativa (japonica
  misc_feature (240)..(601): Homolog of NCBI NO: 39545653 NR Description: OJ000114_01.8 [Oryza sativa (japonica
  misc_feature (408)..(687): Homolog of NCBI NO: 7023926 NR Description: unnamed protein product [Homo sapiens]
  misc_feature (408)..(687): Homolog of NCBI NO: 31377739 NR Description: hypothetical protein FLJ11336 [Homo sapiens]
  misc_feature (420)..(706): Homolog of NCBI NO: 38648893 NR Description: Unknown (protein for MGC:73347) [Danio rerio]
MDEARQAAKNGLEQRVEKERDELESKVEERVLKAEKNRMLLFKAMAQRRAAKRQRAAQSLMKKAIQETRYKESVRAAIYQKRAAAESKRMGILEAERRRANARLTRVFGAASSVRSQKEAERRKMKDRLEERLQRAKKLKAQYMRRRRGMDSCSSSRSETMRKNQVHLVRMLVRCWRRFAKYKKSTFVLARAYHELGINEKSIESVPFEQFAIQMNSVSVIQTVKALLDRLEIRLTLSKASNVENINHLLKHIFPPVRRGKSPSPMSKGEQNSPNSKMGYQKLKKIARYPARIFLCAYMIKQHPGAIFRGRGEHEIALVESATCLIREFELLVKVILEGPESTLPGNVSFVAQRPKKFRSQLEAFDKAWCSYLEGFVVWKINDAKLLEKDLARTQESELSEVSKHTSSPKIIDSGLNQKTVKASSPTNRALFSETDGARESKAPADSHLPSSSSPSPGSSNLSPSLNSGSEAISTPNVVANSFDAALASENEVIVNEIVHDNSSSFADSLDPNTGDTSNLQVRVKETMEKAFWDGVMESMKQSQPDFSWVIKLMKEVRDELCEISPKDWRQEIVQTIDTDVLSQLLASGNVDMGYLGNILEFSLGILLKLSAPANEEEIRVTHHKLMTELGEIVPTDGHSNSSYAVLMVKGLRFVLQQIQILKKEISKSRLKLLEPLLKGPAGLEYLKKSFSSRHGSPDQASSSLPLTKRWLLSVRGEAEREWKEHKDALSAVINNHSGSSGLPSTTMRTGGNVSSVSKVNTPSSPFPGIELSECKGETVDLLVRIGLLKMVSEIGGLTLETVPETFQLNLSRLRDVQSQIQKITLVSISVLILQQTLVSENSSSIDMEAITRTCINRLYEMLDAKPDAGLSEIMETLSELLDSNDAETKKQVIANMLVKSLQAGDAVFTHVSQTIYLAIRAAVLAGNNTKRKQLVETMLRKIGAASLSDKVIEVSDILVLVATVSRSVHGLWYEELLKKPN

SEQ ID NO: 70071 - DNA, 3150 bp, Arabidopsis thaliana
  misc_feature (1)..(3150): Ceres Seq. ID no. 2140509
  misc_feature: MA Experiment ID: 20000166 Result: Up-regulated in Transcription
  misc_feature: MA Experiment 20000166 PARAMETER Experiment Name: At_100uM_ABA_P Parameter: Age (day) Value: 14
  misc_feature: MA Experiment 20000166 PARAMETER Experiment Name: At_100uM_ABA_P Parameter: Organism Value: A. thaliana
  misc_feature: MA Experiment 20000166 PARAMETER Experiment Name: At_100uM_ABA_P Parameter: Plant Line Value: WS
  misc_feature: MA Experiment 20000166 PARAMETER Experiment Name: At_100uM_ABA_P Parameter: Timepoint (hr) Value: 1
  misc_feature: MA Experiment 20000166 PARAMETER Experiment Name: At_100uM_ABA_P Parameter: Tissue Value: Aerial
  misc_feature: MA Experiment 20000166 PARAMETER Experiment Name: At_100uM_ABA_P Parameter: Treatment Value: 100uM ABA vs. No Treatment
  misc_feature: MA Experiment ID: 20000184 Result: Down-regulated in Transcription
  misc_feature: MA Experiment 20000184 PARAMETER Experiment Name: At_Shoots__P Parameter: Age (day) Value: 7
  misc_feature: MA Experiment 20000184 PARAMETER Experiment Name: At_Shoots__P Parameter: Tissue Value: Shoots vs. Whole Plant
  misc_feature: MA Experiment ID: 20000185 Result: Up-regulated in Transcription
  misc_feature: MA Experiment 20000185 PARAMETER Experiment Name: At_Roots__P Parameter: Age (day) Value: 7 vs. 21
  misc_feature: MA Experiment 20000185 PARAMETER Experiment Name: At_Roots__P Parameter: Organism Value: A. thaliana
  misc_feature: MA Experiment 20000185 PARAMETER Experiment Name: At_Roots__P Parameter: Tissue Value: Roots vs. Whole Plant
  misc_feature: MA Experiment ID: 20000234 Result: Up-regulated in Transcription
  misc_feature: MA Experiment 20000234 PARAMETER Experiment Name: At_Siliques_P Parameter: Age (day) Value: 21
  misc_feature: MA Experiment 20000234 PARAMETER Experiment Name: At_Siliques_P Parameter: Organism Value: A. thaliana
  misc_feature: MA Experiment 20000234 PARAMETER Experiment Name: At_Siliques_P Parameter: Plant Line Value: WS
  misc_feature: MA Experiment 20000234 PARAMETER Experiment Name: At_Siliques_P Parameter: Tissue Value: Less Than 5mm Siliques vs. Whole Plant
  misc_feature: MA Experiment ID: 20000235 Result: Up-regulated in Transcription
  misc_feature: MA Experiment 20000235 PARAMETER Experiment Name: At_Siliques_P Parameter: Age (day) Value: 21
  misc_feature: MA Experiment 20000235 PARAMETER Experiment Name: At_Siliques_P Parameter: Organism Value: A. thaliana
  misc_feature: MA Experiment 20000235 PARAMETER Experiment Name: At_Siliques_P Parameter: Plant Line Value: WS
  misc_feature: MA Experiment 20000235 PARAMETER Experiment Name: At_Siliques_P Parameter: Tissue Value: 5-10mm Siliques vs. Whole Plant
  misc_feature: MA Experiment ID: 20000265 Result: Up-regulated in Transcription
  misc_feature: MA Experiment 20000265 PARAMETER Experiment Name: At_Open_Flower_P Parameter: Age (day) Value: 21
  misc_feature: MA Experiment 20000265 PARAMETER Experiment Name: At_Open_Flower_P Parameter: Plant Line Value: WS
  misc_feature: MA Experiment 20000265 PARAMETER Experiment Name: At_Open_Flower_P Parameter: Tissue Value: Closed Flower vs. Whole Plant
  misc_feature: MA Experiment ID: 20000267 Result: Up-regulated in Transcription
  misc_feature: MA Experiment 20000267 PARAMETER Experiment Name: At_Drought_P Parameter: Age (day) Value: 7
  misc_feature: MA Experiment 20000267 PARAMETER Experiment Name: At_Drought_P Parameter: Organism Value: A. thaliana
  misc_feature: MA Experiment 20000267 PARAMETER Experiment Name: At_Drought_P Parameter: Plant Line Value: WS
  misc_feature: MA Experiment 20000267 PARAMETER Experiment Name: At_Drought_P Parameter: Timepoint (hr) Value: 6
  misc_feature: MA Experiment 20000267 PARAMETER Experiment Name: At_Drought_P Parameter: Tissue Value: Whole Plant
  misc_feature: MA Experiment 20000267 PARAMETER Experiment Name: At_Drought_P Parameter: Treatment Value: Drought vs. No Drought
  misc_feature: MA Experiment ID: 20000436 Result: Up-regulated in Transcription
  misc_feature: MA Experiment 20000436 PARAMETER Experiment Name: At_Drought_P Parameter: Age (day) Value: 7
  misc_feature: MA Experiment 20000436 PARAMETER Experiment Name: At_Drought_P Parameter: Organism Value: A. thaliana
  misc_feature: MA Experiment 20000436 PARAMETER Experiment Name: At_Drought_P Parameter: Plant Line Value: WS
  misc_feature: MA Experiment 20000436 PARAMETER Experiment Name: At_Drought_P Parameter: Timepoint (hr) Value: 12
  misc_feature: MA Experiment 20000436 PARAMETER Experiment Name: At_Drought_P Parameter: Tissue Value: Whole Plant
  misc_feature: MA Experiment 20000436 PARAMETER Experiment Name: At_Drought_P Parameter: Treatment Value: Drought vs. No Drought
  misc_feature: MA Experiment ID: 20000437 Result: Up-regulated in Transcription
  misc_feature: MA Experiment 20000437 PARAMETER Experiment Name: At_Drought_P Parameter: Age (day) Value: 8
  misc_feature: MA Experiment 20000437 PARAMETER Experiment Name: At_Drought_P Parameter: Organism Value: A. thaliana
  misc_feature: MA Experiment 20000437 PARAMETER Experiment Name: At_Drought_P Parameter: Plant Line Value: WS
  misc_feature: MA Experiment 20000437 PARAMETER Experiment Name: At_Drought_P Parameter: Timepoint (hr) Value: 24
  misc_feature: MA Experiment 20000437 PARAMETER Experiment Name: At_Drought_P Parameter: Tissue Value: Whole Plant
  misc_feature: MA Experiment 20000437 PARAMETER Experiment Name: At_Drought_P Parameter: Treatment Value: Drought vs. No Drought
  misc_feature: MA Experiment ID: 20000439 Result: Up-regulated in Transcription
  misc_feature: MA Experiment 20000439 PARAMETER Experiment Name: At_Roots__P Parameter: Age (day) Value: 14 vs. 21
  misc_feature: MA Experiment 20000439 PARAMETER Experiment Name: At_Roots__P Parameter: Organism Value: A. thaliana
  misc_feature: MA Experiment 20000439 PARAMETER Experiment Name: At_Roots__P Parameter: Tissue Value: Roots vs. Whole Plant
  misc_feature: MA Experiment ID: 20000453 Result: Up-regulated in Transcription
  misc_feature: MA Experiment 20000453 PARAMETER Experiment Name: At_100uM_ABA_P Parameter: Age (day) Value: 15
  misc_feature: MA Experiment 20000453 PARAMETER Experiment Name: At_100uM_ABA_P Parameter: Organism Value: A. thaliana
  misc_feature: MA Experiment 20000453 PARAMETER Experiment Name: At_100uM_ABA_P Parameter: Plant Line Value: WS
  misc_feature: MA Experiment 20000453 PARAMETER Experiment Name: At_100uM_ABA_P Parameter: Timepoint (hr) Value: 24
  misc_feature: MA Experiment 20000453 PARAMETER Experiment Name: At_100uM_ABA_P Parameter: Tissue Value: Aerial
  misc_feature: MA Experiment 20000453 PARAMETER Experiment Name: At_100uM_ABA_P Parameter: Treatment Value: 100uM ABA vs. No Treatment
  misc_feature: MA Experiment ID: 20000794 Result: Up-regulated in Transcription
  misc_feature: MA Experiment 20000794 PARAMETER Experiment Name: At_Petals_P Parameter: Age (day) Value: 23-25 days
  misc_feature: MA Experiment 20000794 PARAMETER Experiment Name: At_Petals_P Parameter: Plant Line Value: WS
  misc_feature: MA Experiment 20000794 PARAMETER Experiment Name: At_Petals_P Parameter: Tissue Value: Petals vs. Whole plant
  misc_feature: MA Experiment ID: 20001554 Result: Up-regulated in Transcription
  misc_feature: MA Experiment 20001554 PARAMETER Experiment Name: At_Drought_Soil_Dry_P Parameter: Age (day) Value: 21
  misc_feature: MA Experiment 20001554 PARAMETER Experiment Name: At_Drought_Soil_Dry_P Parameter: Organism Value: A. thaliana
  misc_feature: MA Experiment 20001554 PARAMETER Experiment Name: At_Drought_Soil_Dry_P Parameter: Plant Line Value: WS
  misc_feature: MA Experiment 20001554 PARAMETER Experiment Name: At_Drought_Soil_Dry_P Parameter: Post Timepoint (hr) Value: None
  misc_feature: MA Experiment 20001554 PARAMETER Experiment Name: At_Drought_Soil_Dry_P Parameter: Post-Treatment Value: None
  misc_feature: MA Experiment 20001554 PARAMETER Experiment Name: At_Drought_Soil_Dry_P Parameter: Timepoint (day) Value: 7
  misc_feature: MA Experiment 20001554 PARAMETER Experiment Name: At_Drought_Soil_Dry_P Parameter: Treatment Value: Drought vs. No Drought
  misc_feature: MA Experiment ID: 20001555 Result: Up-regulated in Transcription
  misc_feature: MA Experiment 20001555 PARAMETER Experiment Name: At_Drought_Soil_Dry_P Parameter: Age (day) Value: 24
  misc_feature: MA Experiment 20001555 PARAMETER Experiment Name: At_Drought_Soil_Dry_P Parameter: Organism Value: A. thaliana
  misc_feature: MA Experiment 20001555 PARAMETER Experiment Name: At_Drought_Soil_Dry_P Parameter: Plant Line Value: WS
  misc_feature: MA Experiment 20001555 PARAMETER Experiment Name: At_Drought_Soil_Dry_P Parameter: Post Timepoint (hr) Value: None
  misc_feature: MA Experiment 20001555 PARAMETER Experiment Name: At_Drought_Soil_Dry_P Parameter: Post-Treatment Value: None
  misc_feature: MA Experiment 20001555 PARAMETER Experiment Name: At_Drought_Soil_Dry_P Parameter: Timepoint (day) Value: 10
  misc_feature: MA Experiment 20001555 PARAMETER Experiment Name: At_Drought_Soil_Dry_P Parameter: Treatment Value: Drought vs. No Drought
  misc_feature: MA Experiment ID: 20001556 Result: Up-regulated in Transcription
  misc_feature: MA Experiment 20001556 PARAMETER Experiment Name: At_Drought_Soil_Dry_P Parameter: Age (day) Value: 26
  misc_feature: MA Experiment 20001556 PARAMETER Experiment Name: At_Drought_Soil_Dry_P Parameter: Organism Value: A. thaliana
  misc_feature: MA Experiment 20001556 PARAMETER Experiment Name: At_Drought_Soil_Dry_P Parameter: Plant Line Value: WS
  misc_feature: MA Experiment 20001556 PARAMETER Experiment Name: At_Drought_Soil_Dry_P Parameter: Post Timepoint (hr) Value: None
  misc_feature: MA Experiment 20001556 PARAMETER Experiment Name: At_Drought_Soil_Dry_P Parameter: Post-Treatment Value: None
  misc_feature: MA Experiment 20001556 PARAMETER Experiment Name: At_Drought_Soil_Dry_P Parameter: Timepoint (day) Value: 12
  misc_feature: MA Experiment 20001556 PARAMETER Experiment Name: At_Drought_Soil_Dry_P Parameter: Treatment Value: Drought vs. No Drought
  misc_feature: MA Experiment ID: 20001757 Result: Down-regulated in Transcription
  misc_feature: MA Experiment 20001757 PARAMETER Experiment Name: At_50mM_NH4NO3_L-to-H_P Parameter: Timepoint (hr) Value: 6
  misc_feature: MA Experiment 20001757 PARAMETER Experiment Name: At_50mM_NH4NO3_L-to-H_P Parameter: Tissue Value: Leaf
  misc_feature: MA Experiment 20001757 PARAMETER Experiment Name: At_50mM_NH4NO3_L-to-H_P Parameter: Treatment Value: 50mM NH4NO3 vs 100mM Mannitol
  misc_feature: MA Experiment ID: 20001904 Result: Up-regulated in Transcription
  misc_feature: MA Experiment 20001904 PARAMETER Experiment Name: At_Drought_Reproduction_P Parameter: Age (day) Value: 37
  misc_feature: MA Experiment 20001904 PARAMETER Experiment Name: At_Drought_Reproduction_P Parameter: Organism Value: A. thaliana
  misc_feature: MA Experiment 20001904 PARAMETER Experiment Name: At_Drought_Reproduction_P Parameter: Plant Line Value: WS
  misc_feature: MA Experiment 20001904 PARAMETER Experiment Name: At_Drought_Reproduction_P Parameter: Timepoint (day) Value: 7
  misc_feature: MA Experiment 20001904 PARAMETER Experiment Name: At_Drought_Reproduction_P Parameter: Tissue Value: Rosettes
  misc_feature: MA Experiment 20001904 PARAMETER Experiment Name: At_Drought_Reproduction_P Parameter: Treatment Value: Drought vs. No Drought
  misc_feature: MA Experiment ID: 20001905 Result: Up-regulated in Transcription
  misc_feature: MA Experiment 20001905 PARAMETER Experiment Name: At_Drought_Reproduction_P Parameter: Age (day) Value: 40
  misc_feature: MA Experiment 20001905 PARAMETER Experiment Name: At_Drought_Reproduction_P Parameter: Organism Value: A. thaliana
  misc_feature: MA Experiment 20001905 PARAMETER Experiment Name: At_Drought_Reproduction_P Parameter: Plant Line Value: WS
  misc_feature: MA Experiment 20001905 PARAMETER Experiment Name: At_Drought_Reproduction_P Parameter: Timepoint (day) Value: 10
  misc_feature: MA Experiment 20001905 PARAMETER Experiment Name: At_Drought_Reproduction_P Parameter: Tissue Value: Rosettes
  misc_feature: MA Experiment 20001905 PARAMETER Experiment Name: At_Drought_Reproduction_P Parameter: Treatment Value: Drought vs. No Drought
atgttcgtgaagaagttggtcgagatagcagccaagaagcctggaggaagttcatcagaaggactgagagctaatgacgttgagccacgtatcgctctgcattacggaatcccttcaggttctcacttgtttgcttatgatccatttcagaagatcctcgccgtttccaccaaggatggtagaatcaagttgtttgggaaagatcagacccaggctttgctagtctctgaagaaacatccacaagcaggtttcttgagtttgttcagaaccaaggaatccttctcaatgtgaattccaagaaccagattgaggtttgggacttagacaagaagcttctatctcatgttcatgttttcaatggcgagatcacttctttccgggttatgcaacataccccttacttttatgttggagattcttctggtaatgtatcagtgtttaagatcgaacaagattctaatcaagttatacaactggagtacaccataccttacctagcatcaaatggctctcccattgaagcttctgaggatacttcagttgtgagcattctaccacagctaacagctgaaagcaagaggattctattggtatttagtagcgggtttatagcgttatgggacatcaaagaaagcaaaccgattctcaaaacaggagtacacggtatggtaaagcaagatacgaagaaagcgacttgtgcttgttgggtttgtccttcaggaagcagagtttcagttggctatagcaatggagatattctaatatggagcattccttccaaaggagaatgctcgccagagagttctgctatgatttgcaagcttaacctcggatacaaatccgaaaagataccaatagcttctctgaaatgggtttatgctgaagggaaggcaagccgggtttatgtcattggatcatcctcaaactcgttgcaggtggttttgttgaatgagcaaaccgaaactcggatgattaagctgggacttcatgtttctgagccttgtgctgatatggagatgatcatagctgatgttaatgaacagagcaagcataaacaagattttctgtttgttcttggaaagtctggacgtgtctatgcttacgatgattatatgattgagaagtatctgattcagtctcagtccaaatcatctccttccctcccaaaggaaactgtggttaagctgccattttcagattcaagcagcattaccgtaggaaaattcctcacaaatccttcacacttactcaatctatcagatgaggattatgctcagctggcgaaagatgctgtgccgtttcttccttttcatacagttccaaaggaaagttcccgttctgcacattttcctggtttcacaaaggttaagaatgtttacatcacaggacactgtgacggaaccattagtgtatgggacatgacctgttcttttcccattcttgtcttgtttctgaaagaacagatagatcaagatgtatcttcacgcggaaatgcggcattgacagctttacattatgacagcaactcaagacttcttgtttctggtgatcataacggaatggttcgcctttataggttcaaacctgagccatacctaacagaaaacagttttatccctttccaaggaagcttaaagaaaggaaataaccatattgttcaaagtgttaagtacatcaagcttactggttccataacctgtattcagaagagccaaaactcaaaacatctcgctattggatcagatcaaggacatgtttctctggttgacattgaggaagcaaatgtgttatacacaaaacacattgcaagtgatatatgtccagggatcatctccttgcaattcgagagttgcattgtgcaaggcttcgagaagaacgtgttagtggttgctatgagagactcgtcggtttttgctctggacagcgacacgggaaatatgattggaaccaacatgattaagcctaaaaagccattcaaggttctgtatatgcagatcctagatggaaagcaagatacttcaggaaatggatttgatacgagcagagagagcacagttgaggagatctcgataaggcagccttcggttttggtttgttcggagaaagctatatatatctactccttggctcacgttgtccagggagtgaagaaggtcctccacaagaaaaagttcagttcttcacccatttgctcagcttccacattctatggaacctctggtgttggtcttacacttgttttcacagatggaactgttgagataaggtctttgccagaactctcccagctaaaacaaacttccattagaggcttcacatattcttcaccaaaaccaaactcgttaccagagattaccatatccgcttcttgggatggagatctagtcatggtgaatggagatgatgaacttattgttagctcagttttacctcaaaaggaaacttttaggcttgtcgagtccatgaatcgagtttacaagaaagataactcggtttgtcacgaaggaatcatcacatcatcatctccaagggaaaagaagagtatgtttggttctgttttcaagactaaatcaaagcgcacaactgatacagaaccagaaagctccaaggaaacgatcgaggagctgtctaaaatcttctctacagctaatttcccctggaacaacaatgttgagaatagtagagagatcaatacaattactagggtggaagatgaagaagagttggacatagatgacattgacattgacgatcatcatcctaatcaacaacaacaagagaagcctaaagaacaagggatattgtcagggcttagtaaacagaagatggcgaataggtttagtaatttcaaaggtaagctgaaacagatggcagctaagaatgagaagagtgttgtaaccaatgacgagaagcatgaggagaaaaacggcgccacagttgatcagatcaagaagaaatacgggtttacctcgtccgatgaaatgggagctgccaaaatggctcagagcaaacttcaagacaacctgaaaaagttacagggaattagcttgaggacgacggaaatggaagatactgcaaagtctttctcctctacggcaaaggaactactaaacgctgttgagttcaataaacagagctcaaaatcttag

SEQ ID NO: 70072 - protein, 1049 aa, Arabidopsis thaliana
  peptide (1)..(1049): Ceres Seq. ID no. 2140510
  misc_feature (597)..(1047): Homolog of NCBI NO: 38345401 NR Description: OSJNBa0017B10.7 [Oryza sativa (japonica
  misc_feature (32)..(316): Homolog of NCBI NO: 38345401 NR Description: OSJNBa0017B10.7 [Oryza sativa (japonica
  misc_feature (1)..(153): Homolog of NCBI NO: 38345401 NR Description: OSJNBa0017B10.7 [Oryza sativa (japonica
  misc_feature (398)..(602): Homolog of NCBI NO: 38345401 NR Description: OSJNBa0017B10.7 [Oryza sativa (japonica
  misc_feature (224)..(554): Homolog of NCBI NO: 34898238 NR Description: P0034A04.30 [Oryza sativa (japonica >gi|29837189|dbj|BAC75571.1| hypothetical protein [Oryza sativa
  misc_feature (3)..(219): Homolog of NCBI NO: 34898238 NR Description: P0034A04.30 [Oryza sativa (japonica >gi|29837189|dbj|BAC75571.1| hypothetical protein [Oryza sativa
  misc_feature (955)..(1045): Homolog of NCBI NO: 34898238 NR Description: P0034A04.30 [Oryza sativa (japonica >gi|29837189|dbj|BAC75571.1| hypothetical protein [Oryza sativa
  misc_feature (227)..(526): Homolog of NCBI NO: 15239173 NR Description: putative protein; protein id: At5g05570.1 thaliana] >gi|10178134|dbj|BAB11546.1|
  misc_feature (1)..(219): Homolog of NCBI NO: 15239173 NR Description: putative protein; protein id: At5g05570.1 thaliana] >gi|10178134|dbj|BAB11546.1|
  misc_feature (4)..(324): Homolog of NCBI NO: 28571169 NR Description: CG17762-PB [Drosophila melanogaster]
MFVKKLVEIAAKKPGGSSSEGLRANDVEPRIALHYGIPSGSHLFAYDPFQKILAVSTKDGRIKLFGKDQTQALLVSEETSTSRFLEFVQNQGILLNVNSKNQIEVWDLDKKLLSHVHVFNGEITSFRVMQHTPYFYVGDSSGNVSVFKIEQDSNQVIQLEYTIPYLASNGSPIEASEDTSVVSILPQLTAESKRILLVFSSGFIALWDIKESKPILKTGVHGMVKQDTKKATCACWVCPSGSRVSVGYSNGDILIWSIPSKGECSPESSAMICKLNLGYKSEKIPIASLKWVYAEGKASRVYVIGSSSNSLQVVLLNEQTETRMIKLGLHVSEPCADMEMIIADVNEQSKHKQDFLFVLGKSGRVYAYDDYMIEKYLIQSQSKSSPSLPKETVVKLPFSDSSSITVGKFLTNPSHLLNLSDEDYAQLAKDAVPFLPFHTVPKESSRSAHFPGFTKVKNVYITGHCDGTISVWDMTCSFPILVLFLKEQIDQDVSSRGNAALTALHYDSNSRLLVSGDHNGMVRLYRFKPEPYLTENSFIPFQGSLKKGNNHIVQSVKYIKLTGSITCIQKSQNSKHLAIGSDQGHVSLVDIEEANVLYTKHIASDICPGIISLQFESCIVQGFEKNVLVVAMRDSSVFALDSDTGNMIGTNMIKPKKPFKVLYMQILDGKQDTSGNGFDTSRESTVEEISIRQPSVLVCSEKAIYIYSLAHVVQGVKKVLHKKKFSSSPICSASTFYGTSGVGLTLVFTDGTVEIRSLPELSQLKQTSIRGFTYSSPKPNSLPEITISASWDGDLVMVNGDDELIVSSVLPQKETFRLVESMNRVYKKDNSVCHEGIITSSSPREKKSMFGSVFKTKSKRTTDTEPESSKETIEELSKIFSTANFPWNNNVENSREINTITRVEDEEELDIDDIDIDDHHPNQQQQEKPKEQGILSGLSKQKMANRFSNFKGKLKQMAAKNEKSVVTNDEKHEEKNGATVDQIKKKYGFTSSDEMGAAKMAQSKLQDNLKKLQGISLRTTEMEDTAKSFSSTAKELLNAVEFNKQSSKS

SEQ ID NO: 70073 - protein, 921 aa, Arabidopsis thaliana
  peptide (1)..(921): Ceres Seq. ID no. 2140511
  misc_feature (469)..(919): Homolog of NCBI NO: 38345401 NR Description: OSJNBa0017B10.7 [Oryza sativa (japonica
  misc_feature (1)..(188): Homolog of NCBI NO: 38345401 NR Description: OSJNBa0017B10.7 [Oryza sativa (japonica
  misc_feature (1)..(25): Homolog of NCBI NO: 38345401 NR Description: OSJNBa0017B10.7 [Oryza sativa (japonica
  misc_feature (270)..(474): Homolog of NCBI NO: 38345401 NR Description: OSJNBa0017B10.7 [Oryza sativa (japonica
  misc_feature (96)..(426): Homolog of NCBI NO: 34898238 NR Description: P0034A04.30 [Oryza sativa (japonica >gi|29837189|dbj|BAC75571.1| hypothetical protein [Oryza sativa
  misc_feature (1)..(91): Homolog of NCBI NO: 34898238 NR Description: P0034A04.30 [Oryza sativa (japonica >gi|29837189|dbj|BAC75571.1| hypothetical protein [Oryza sativa
  misc_feature (827)..(917): Homolog of NCBI NO: 34898238 NR Description: P0034A04.30 [Oryza sativa (japonica >gi|29837189|dbj|BAC75571.1| hypothetical protein [Oryza sativa
  misc_feature (99)..(398): Homolog of NCBI NO: 15239173 NR Description: putative protein; protein id: At5g05570.1 thaliana] >gi|10178134|dbj|BAB11546.1|
  misc_feature (1)..(91): Homolog of NCBI NO: 15239173 NR Description: putative protein; protein id: At5g05570.1 thaliana] >gi|10178134|dbj|BAB11546.1|
  misc_feature (1)..(196): Homolog of NCBI NO: 28571169 NR Description: CG17762-PB [Drosophila melanogaster]
MQHTPYFYVGDSSGNVSVFKIEQDSNQVIQLEYTIPYLASNGSPIEASEDTSVVSILPQLTAESKRILLVFSSGFIALWDIKESKPILKTGVHGMVKQDTKKATCACWVCPSGSRVSVGYSNGDILIWSIPSKGECSPESSAMICKLNLGYKSEKIPIASLKWVYAEGKASRVYVIGSSSNSLQVVLLNEQTETRMIKLGLHVSEPCADMEMIIADVNEQSKHKQDFLFVLGKSGRVYAYDDYMIEKYLIQSQSKSSPSLPKETVVKLPFSDSSSITVGKFLTNPSHLLNLSDEDYAQLAKDAVPFLPFHTVPKESSRSAHFPGFTKVKNVYITGHCDGTISVWDMTCSFPILVLFLKEQIDQDVSSRGNAALTALHYDSNSRLLVSGDHNGMVRLYRFKPEPYLTENSFIPFQGSLKKGNNHIVQSVKYIKLTGSITCIQKSQNSKHLAIGSDQGHVSLVDIEEANVLYTKHIASDICPGIISLQFESCIVQGFEKNVLVVAMRDSSVFALDSDTGNMIGTNMIKPKKPFKVLYMQILDGKQDTSGNGFDTSRESTVEEISIRQPSVLVCSEKAIYIYSLAHVVQGVKKVLHKKKFSSSPICSASTFYGTSGVGLTLVFTDGTVEIRSLPELSQLKQTSIRGFTYSSPKPNSLPEITISASWDGDLVMVNGDDELIVSSVLPQKETFRLVESMNRVYKKDNSVCHEGIITSSSPREKKSMFGSVFKTKSKRTTDTEPESSKETIEELSKIFSTANFPWNNNVENSREINTITRVEDEEELDIDDIDIDDHHPNQQQQEKPKEQGILSGLSKQKMANRFSNFKGKLKQMAAKNEKSVVTNDEKHEEKNGATVDQIKKKYGFTSSDEMGAAKMAQSKLQDNLKKLQGISLRTTEMEDTAKSFSSTAKELLNAVEFNKQSSKS

SEQ ID NO: 70074 - protein, 827 aa, Arabidopsis thaliana
  peptide (1)..(827): Ceres Seq. ID no. 2140512
  misc_feature (375)..(825): Homolog of NCBI NO: 38345401 NR Description: OSJNBa0017B10.7 [Oryza sativa (japonica
  misc_feature (1)..(94): Homolog of NCBI NO: 38345401 NR Description: OSJNBa0017B10.7 [Oryza sativa (japonica
  misc_feature (176)..(380): Homolog of NCBI NO: 38345401 NR Description: OSJNBa0017B10.7 [Oryza sativa (japonica
  misc_feature (2)..(332): Homolog of NCBI NO: 34898238 NR Description: P0034A04.30 [Oryza sativa (japonica >gi|29837189|dbj|BAC75571.1| hypothetical protein [Oryza sativa
  misc_feature (733)..(823): Homolog of NCBI NO: 34898238 NR Description: P0034A04.30 [Oryza sativa (japonica >gi|29837189|dbj|BAC75571.1| hypothetical protein [Oryza sativa
  misc_feature (5)..(304): Homolog of NCBI NO: 15239173 NR Description: putative protein; protein id: At5g05570.1 thaliana] >gi|10178134|dbj|BAB11546.1|
  misc_feature (1)..(102): Homolog of NCBI NO: 28571169 NR Description: CG17762-PB [Drosophila melanogaster]
  misc_feature (1)..(102): Homolog of NCBI NO: 28571173 NR Description: CG17762-PC [Drosophila melanogaster]
  misc_feature (1)..(102): Homolog of NCBI NO: 28571175 NR Description: CG17762-PD [Drosophila melanogaster]
  misc_feature (1)..(92): Homolog of NCBI NO: 21541550 NR Description: b-tomosyn [Mus musculus]
MVKQDTKKATCACWVCPSGSRVSVGYSNGDILIWSIPSKGECSPESSAMICKLNLGYKSEKIPIASLKWVYAEGKASRVYVIGSSSNSLQVVLLNEQTETRMIKLGLHVSEPCADMEMIIADVNEQSKHKQDFLFVLGKSGRVYAYDDYMIEKYLIQSQSKSSPSLPKETVVKLPFSDSSSITVGKFLTNPSHLLNLSDEDYAQLAKDAVPFLPFHTVPKESSRSAHFPGFTKVKNVYITGHCDGTISVWDMTCSFPILVLFLKEQIDQDVSSRGNAALTALHYDSNSRLLVSGDHNGMVRLYRFKPEPYLTENSFIPFQGSLKKGNNHIVQSVKYIKLTGSITCIQKSQNSKHLAIGSDQGHVSLVDIEEANVLYTKHIASDICPGIISLQFESCIVQGFEKNVLVVAMRDSSVFALDSDTGNMIGTNMIKPKKPFKVLYMQILDGKQDTSGNGFDTSRESTVEEISIRQPSVLVCSEKAIYIYSLAHVVQGVKKVLHKKKFSSSPICSASTFYGTSGVGLTLVFTDGTVEIRSLPELSQLKQTSIRGFTYSSPKPNSLPEITISASWDGDLVMVNGDDELIVSSVLPQKETFRLVESMNRVYKKDNSVCHEGIITSSSPREKKSMFGSVFKTKSKRTTDTEPESSKETIEELSKIFSTANFPWNNNVENSREINTITRVEDEEELDIDDIDIDDHHPNQQQQEKPKEQGILSGLSKQKMANRFSNFKGKLKQMAAKNEKSVVTNDEKHEEKNGATVDQIKKKYGFTSSDEMGAAKMAQSKLQDNLKKLQGISLRTTEMEDTAKSFSSTAKELLNAVEFNKQSSKS

SEQ ID NO: 70075 - DNA, 1323 bp, Arabidopsis thaliana
  misc_feature (1)..(1323): Ceres Seq. ID no. 2141877
  misc_feature: MA Experiment ID: 20000173 Result: Down-regulated in Transcription
  misc_feature: MA Experiment 20000173 PARAMETER Experiment Name: At_42deg_Heat_P Parameter: Age (day) Value: 14
  misc_feature: MA Experiment 20000173 PARAMETER Experiment Name: At_42deg_Heat_P Parameter: Organism Value: A. thaliana
  misc_feature: MA Experiment 20000173 PARAMETER Experiment Name: At_42deg_Heat_P Parameter: Plant Line Value: WS
  misc_feature: MA Experiment 20000173 PARAMETER Experiment Name: At_42deg_Heat_P Parameter: Temperature (deg C) Value: 42 vs. 22
  misc_feature: MA Experiment 20000173 PARAMETER Experiment Name: At_42deg_Heat_P Parameter: Timepoint (hr) Value: 6
  misc_feature: MA Experiment 20000173 PARAMETER Experiment Name: At_42deg_Heat_P Parameter: Tissue Value: Aerial
  misc_feature: MA Experiment ID: 20000179 Result: Up-regulated in Transcription
  misc_feature: MA Experiment 20000179 PARAMETER Experiment Name: At_Germinating_Seeds_P Parameter: Age (hr) Value: 6 vs. 0
  misc_feature: MA Experiment 20000179 PARAMETER Experiment Name: At_Germinating_Seeds_P Parameter: Tissue Value: Germinating Seeds
  misc_feature: MA Experiment ID: 20000185 Result: Up-regulated in Transcription
  misc_feature: MA Experiment 20000185 PARAMETER Experiment Name: At_Roots__P Parameter: Age (day) Value: 7 vs. 21
  misc_feature: MA Experiment 20000185 PARAMETER Experiment Name: At_Roots__P Parameter: Organism Value: A. thaliana
  misc_feature: MA Experiment 20000185 PARAMETER Experiment Name: At_Roots__P Parameter: Tissue Value: Roots vs. Whole Plant
  misc_feature: MA Experiment ID: 20000234 Result: Up-regulated in Transcription
  misc_feature: MA Experiment 20000234 PARAMETER Experiment Name: At_Siliques_P Parameter: Age (day) Value: 21
  misc_feature: MA Experiment 20000234 PARAMETER Experiment Name: At_Siliques_P Parameter: Organism Value: A. thaliana
  misc_feature: MA Experiment 20000234 PARAMETER Experiment Name: At_Siliques_P Parameter: Plant Line Value: WS
  misc_feature: MA Experiment 20000234 PARAMETER Experiment Name: At_Siliques_P Parameter: Tissue Value: Less Than 5mm Siliques vs. Whole Plant
  misc_feature: MA Experiment ID: 20000437 Result: Down-regulated in Transcription
  misc_feature: MA Experiment 20000437 PARAMETER Experiment Name: At_Drought_P Parameter: Age (day) Value: 8
  misc_feature: MA Experiment 20000437 PARAMETER Experiment Name: At_Drought_P Parameter: Organism Value: A. thaliana
  misc_feature: MA Experiment 20000437 PARAMETER Experiment Name: At_Drought_P Parameter: Plant Line Value: WS
  misc_feature: MA Experiment 20000437 PARAMETER Experiment Name: At_Drought_P Parameter: Timepoint (hr) Value: 24
  misc_feature: MA Experiment 20000437 PARAMETER Experiment Name: At_Drought_P Parameter: Tissue Value: Whole Plant
  misc_feature: MA Experiment 20000437 PARAMETER Experiment Name: At_Drought_P Parameter: Treatment Value: Drought vs. No Drought
  misc_feature: MA Experiment ID: 20000573 Result: Down-regulated in Transcription
  misc_feature: MA Experiment 20000573 PARAMETER Experiment Name: At_100uM_ABA_Mutants__P Parameter: Organism Value: A. thaliana
  misc_feature: MA Experiment 20000573 PARAMETER Experiment Name: At_100uM_ABA_Mutants__P Parameter: Plant Line Value: CS22 vs. Ler wt
  misc_feature: MA Experiment 20000573 PARAMETER Experiment Name: At_100uM_ABA_Mutants__P Parameter: Timepoint (hr) Value: N/A
  misc_feature: MA Experiment 20000573 PARAMETER Experiment Name: At_100uM_ABA_Mutants__P Parameter: Tissue Value: Whole Plant
  misc_feature: MA Experiment 20000573 PARAMETER Experiment Name: At_100uM_ABA_Mutants__P Parameter: Treatment Value: None
  misc_feature: MA Experiment ID: 20000574 Result: Down-regulated in Transcription
  misc_feature: MA Experiment 20000574 PARAMETER Experiment Name: At_100uM_ABA_Mutants__P Parameter: Organism Value: A. thaliana
  misc_feature: MA Experiment 20000574 PARAMETER Experiment Name: At_100uM_ABA_Mutants__P Parameter: Plant Line Value: CS23 vs. Ler wt
  misc_feature: MA Experiment 20000574 PARAMETER Experiment Name: At_100uM_ABA_Mutants__P Parameter: Timepoint (hr) Value: N/A
  misc_feature: MA Experiment 20000574 PARAMETER Experiment Name: At_100uM_ABA_Mutants__P Parameter: Tissue Value: Whole Plant
  misc_feature: MA Experiment 20000574 PARAMETER Experiment Name: At_100uM_ABA_Mutants__P Parameter: Treatment Value: None
  misc_feature: MA Experiment ID: 20001911 Result: Down-regulated in Transcription
  misc_feature: MA Experiment 20001911 PARAMETER Experiment Name: At_Drought_Reproduction_P Parameter: Age (day) Value: 40
  misc_feature: MA Experiment 20001911 PARAMETER Experiment Name: At_Drought_Reproduction_P Parameter: Organism Value: A. thaliana
  misc_feature: MA Experiment 20001911 PARAMETER Experiment Name: At_Drought_Reproduction_P Parameter: Plant Line Value: WS
  misc_feature: MA Experiment 20001911 PARAMETER Experiment Name: At_Drought_Reproduction_P Parameter: Timepoint (day) Value: 10
  misc_feature: MA Experiment 20001911 PARAMETER Experiment Name: At_Drought_Reproduction_P Parameter: Tissue Value: Flowers
  misc_feature: MA Experiment 20001911 PARAMETER Experiment Name: At_Drought_Reproduction_P Parameter: Treatment Value: Drought vs. No Drought
  misc_feature: Pfam Name: Pkinase Pfam Description: Protein kinase domain
atggaaggagaatccaaaggattaatcgttgggatctcactaggtttggtgattggtgttgtcttagctatctcagctttgttctgctttaggtatcatagaaaaaagtctcagattgtgaatagtggatcacgaagaagtgcaaccattcccatcagagagaatggagctgattcgtgtaatataatgtcggattcgaccattggtccggattcacctgtgaaatcttctaagaatgggaggtctgtttggcttgaagggtttagtaagaggagtaatgtcatctctgcttctggcattttggaatattcttacagggatttgcagaaagcgacgtgtaatttcacgactttgataggccaaggagcatttggacctgtctacaaagctcaaatgtctactggtgagatcgtggctgtgaaagttctagccactgattctaaacagggcgaaaaagagtttcagacagaggttatgttattgggaaggttgcatcaccgtaacctagtgaacttgattggatactgtgcagagaaaggccaacacatgcttatatatgtttacatgagtaaaggaagcttagcttctcatttatacagcgaaaaacatgaaccgctgagctgggatttgagagtatatattgctttagacgtggcacgtggtctagagtatcttcatgatggggctgttcctcctgtaatccacagagatatcaaatcttccaacatcttgctggatcaatctatgagagctcgggttgctgactttggcctctccagagaagaaatggtagacaaacatgcagctaacatcagaggaacatttggctacctcgatcccgaatacatttcaacaagaacattcaccaagaaaagcgatgtctatggcttcggagttttgcttttcgagcttatagcaggaagaaatcctcaacaaggtctaatggaattggttgagctggcggctatgaatgcagaggaaaaagtcggatgggaagagatagtagattcaagattagatgggagatatgatttacaagaagtgaatgaagtagcagcttttgcttacaaatgcatctctcgtgcacctagaaaacgtcctaacatgagggacattgttcaggttttgactcgtgttattaaagtgagacattgcagaaagcggcagaagaattctccgtcgccgtctccacggcttcctcctcctcctccgatagtggaggagtcagaaggtgagttaactgcaaacggatcattacgatcagaaattcatcggagggataattccttggacagtagtatagctgaagacgtgattttgtaa

SEQ ID NO: 70076 - protein, 440 aa, Arabidopsis thaliana
  peptide (1)..(440): Ceres Seq. ID no. 2141878
  misc_feature: Pfam Name: Pkinase Pfam Description: Protein kinase domain
  misc_feature (1)..(440): Homolog of NCBI NO: 30696480 NR Description: protein kinase family [Arabidopsis thaliana]
  misc_feature (1)..(422): Homolog of NCBI NO: 38636770 NR Description: putative serine/threonine-specific protein kinase
  misc_feature (1)..(228): Homolog of NCBI NO: 30696478 NR Description: protein kinase family [Arabidopsis thaliana]
  misc_feature (8)..(379): Homolog of NCBI NO: 1076634 NR Description: serine/threonine-specific protein kinase NPK15
  misc_feature (1)..(396): Homolog of NCBI NO: 11358843 NR Description: serine/threonine-specific protein kinase-like
  misc_feature (1)..(396): Homolog of NCBI NO: 18417765 NR Description: serine/threonine-specific protein kinase-like protein id: At5g15730.1, supported by cDNA: 25636. [Arabidopsis
  misc_feature (63)..(228): Homolog of NCBI NO: 15912249 NR Description: AT5g54590/MRB17_9 [Arabidopsis thaliana]
  misc_feature (103)..(377): Homolog of NCBI NO: 38345516 NR Description: OSJNBa0039K24.19 [Oryza sativa (japonica
  misc_feature (9)..(394): Homolog of NCBI NO: 15241880 NR Description: receptor-like protein kinase precursor - like;
  misc_feature (108)..(396): Homolog of NCBI NO: 18408845 NR Description: F12A21.14; protein id: At1g67720.1 [Arabidopsis
MEGESKGLIVGISLGLVIGVVLAISALFCFRYHRKKSQIVNSGSRRSATIPIRENGADSCNIMSDSTIGPDSPVKSSKNGRSVWLEGFSKRSNVISASGILEYSYRDLQKATCNFTTLIGQGAFGPVYKAQMSTGEIVAVKVLATDSKQGEKEFQTEVMLLGRLHHRNLVNLIGYCAEKGQHMLIYVYMSKGSLASHLYSEKHEPLSWDLRVYIALDVARGLEYLHDGAVPPVIHRDIKSSNILLDQSMRARVADFGLSREEMVDKHAANIRGTFGYLDPEYISTRTFTKKSDVYGFGVLLFELIAGRNPQQGLMELVELAAMNAEEKVGWEEIVDSRLDGRYDLQEVNEVAAFAYKCISRAPRKRPNMRDIVQVLTRVIKVRHCRKRQKNSPSPSPRLPPPPPIVEESEGELTANGSLRSEIHRRDNSLDSSIAEDVIL

SEQ ID NO: 70077 - protein, 378 aa, Arabidopsis thaliana
  peptide (1)..(378): Ceres Seq. ID no. 2141879
  misc_feature: Pfam Name: Pkinase Pfam Description: Protein kinase domain
  misc_feature (1)..(378): Homolog of NCBI NO: 30696480 NR Description: protein kinase family [Arabidopsis thaliana]
  misc_feature (1)..(360): Homolog of NCBI NO: 38636770 NR Description: putative serine/threonine-specific protein kinase
  misc_feature (1)..(166): Homolog of NCBI NO: 30696478 NR Description: protein kinase family [Arabidopsis thaliana]
  misc_feature (1)..(317): Homolog of NCBI NO: 1076634 NR Description: serine/threonine-specific protein kinase NPK15
  misc_feature (1)..(334): Homolog of NCBI NO: 11358843 NR Description: serine/threonine-specific protein kinase-like
  misc_feature (1)..(334): Homolog of NCBI NO: 18417765 NR Description: serine/threonine-specific protein kinase-like protein id: At5g15730.1, supported by cDNA: 25636. [Arabidopsis
  misc_feature (1)..(166): Homolog of NCBI NO: 15912249 NR Description: AT5g54590/MRB17_9 [Arabidopsis thaliana]
  misc_feature (41)..(315): Homolog of NCBI NO: 38345516 NR Description: OSJNBa0039K24.19 [Oryza sativa (japonica
  misc_feature (1)..(332): Homolog of NCBI NO: 15241880 NR Description: receptor-like protein kinase precursor - like;
  misc_feature (46)..(334): Homolog of NCBI NO: 18408845 NR Description: F12A21.14; protein id: At1g67720.1 [Arabidopsis
MSDSTIGPDSPVKSSKNGRSVWLEGFSKRSNVISASGILEYSYRDLQKATCNFTTLIGQGAFGPVYKAQMSTGEIVAVKVLATDSKQGEKEFQTEVMLLGRLHHRNLVNLIGYCAEKGQHMLIYVYMSKGSLASHLYSEKHEPLSWDLRVYIALDVARGLEYLHDGAVPPVIHRDIKSSNILLDQSMRARVADFGLSREEMVDKHAANIRGTFGYLDPEYISTRTFTKKSDVYGFGVLLFELIAGRNPQQGLMELVELAAMNAEEKVGWEEIVDSRLDGRYDLQEVNEVAAFAYKCISRAPRKRPNMRDIVQVLTRVIKVRHCRKRQKNSPSPSPRLPPPPPIVEESEGELTANGSLRSEIHRRDNSLDSSIAEDVIL

SEQ ID NO: 70078 - protein, 309 aa, Arabidopsis thaliana
  peptide (1)..(309): Ceres Seq. ID no. 2141880
  misc_feature: Pfam Name: Pkinase Pfam Description: Protein kinase domain
  misc_feature (1)..(309): Homolog of NCBI NO: 30696480 NR Description: protein kinase family [Arabidopsis thaliana]
  misc_feature (1)..(291): Homolog of NCBI NO: 38636770 NR Description: putative serine/threonine-specific protein kinase
  misc_feature (1)..(97): Homolog of NCBI NO: 30696478 NR Description: protein kinase family [Arabidopsis thaliana]
  misc_feature (1)..(248): Homolog of NCBI NO: 1076634 NR Description: serine/threonine-specific protein kinase NPK15
  misc_feature (1)..(265): Homolog of NCBI NO: 11358843 NR Description: serine/threonine-specific protein kinase-like
  misc_feature (1)..(265): Homolog of NCBI NO: 18417765 NR Description: serine/threonine-specific protein kinase-like protein id: At5g15730.1, supported by cDNA: 25636. [Arabidopsis
  misc_feature (1)..(97): Homolog of NCBI NO: 15912249 NR Description: AT5g54590/MRB17_9 [Arabidopsis thaliana]
  misc_feature (1)..(246): Homolog of NCBI NO: 38345516 NR Description: OSJNBa0039K24.19 [Oryza sativa (japonica
  misc_feature (1)..(263): Homolog of NCBI NO: 15241880 NR Description: receptor-like protein kinase precursor - like;
  misc_feature (1)..(265): Homolog of NCBI NO: 18408845 NR Description: F12A21.14; protein id: At1g67720.1 [Arabidopsis
MSTGEIVAVKVLATDSKQGEKEFQTEVMLLGRLHHRNLVNLIGYCAEKGQHMLIYVYMSKGSLASHLYSEKHEPLSWDLRVYIALDVARGLEYLHDGAVPPVIHRDIKSSNILLDQSMRARVADFGLSREEMVDKHAANIRGTFGYLDPEYISTRTFTKKSDVYGFGVLLFELIAGRNPQQGLMELVELAAMNAEEKVGWEEIVDSRLDGRYDLQEVNEVAAFAYKCISRAPRKRPNMRDIVQVLTRVIKVRHCRKRQKNSPSPSPRLPPPPPIVEESEGELTANGSLRSEIHRRDNSLDSSIAEDVIL

SEQ ID NO: 70079 - DNA, 1587 bp, Arabidopsis thaliana
  misc_feature (1)..(1587): Ceres Seq. ID no. 2142136
  misc_feature: MA Experiment ID: 20000307 Result: Up-regulated in Transcription
  misc_feature: MA Experiment 20000307 PARAMETER Experiment Name: At_Germinating_Seeds_Sub_P Parameter: Age (hr) Value: 24 vs. 0
  misc_feature: MA Experiment 20000307 PARAMETER Experiment Name: At_Germinating_Seeds_Sub_P Parameter: Organism Value: A. thaliana
  misc_feature: MA Experiment 20000307 PARAMETER Experiment Name: At_Germinating_Seeds_Sub_P Parameter: Plant Line Value: WS
  misc_feature: MA Experiment 20000307 PARAMETER Experiment Name: At_Germinating_Seeds_Sub_P Parameter: Tissue Value: Germinating Seeds
  misc_feature: MA Experiment ID: 20000315 Result: Down-regulated in Transcription
  misc_feature: MA Experiment 20000315 PARAMETER Experiment Name: At_14day_Shoots-Roots_Sub_P Parameter: Age (day) Value: 14
  misc_feature: MA Experiment 20000315 PARAMETER Experiment Name: At_14day_Shoots-Roots_Sub_P Parameter: Organism Value: A. thaliana
  misc_feature: MA Experiment 20000315 PARAMETER Experiment Name: At_14day_Shoots-Roots_Sub_P Parameter: Plant Line Value: WS
  misc_feature: MA Experiment 20000315 PARAMETER Experiment Name: At_14day_Shoots-Roots_Sub_P Parameter: Tissue Value: Shoots vs. Whole Plant
  misc_feature: MA Experiment ID: 20000327 Result: Up-regulated in Transcription
  misc_feature: MA Experiment 20000327 PARAMETER Experiment Name: At_42deg_Heat_Sub_P Parameter: Age (day) Value: 14
  misc_feature: MA Experiment 20000327 PARAMETER Experiment Name: At_42deg_Heat_Sub_P Parameter: Organism Value: A. thaliana
  misc_feature: MA Experiment 20000327 PARAMETER Experiment Name: At_42deg_Heat_Sub_P Parameter: Plant Line Value: WS
  misc_feature: MA Experiment 20000327 PARAMETER Experiment Name: At_42deg_Heat_Sub_P Parameter: Temperature (deg C) Value: 42 vs. 22
  misc_feature: MA Experiment 20000327 PARAMETER Experiment Name: At_42deg_Heat_Sub_P Parameter: Timepoint (hr) Value: 1
  misc_feature: MA Experiment 20000327 PARAMETER Experiment Name: At_42deg_Heat_Sub_P Parameter: Tissue Value: Aerial
  misc_feature: MA Experiment ID: 20000355 Result: Up-regulated in Transcription
  misc_feature: MA Experiment 20000355 PARAMETER Experiment Name: At_Siliques_Sub_P Parameter: Age (day) Value: 21
  misc_feature: MA Experiment 20000355 PARAMETER Experiment Name: At_Siliques_Sub_P Parameter: Organism Value: A. thaliana
  misc_feature: MA Experiment 20000355 PARAMETER Experiment Name: At_Siliques_Sub_P Parameter: Plant Line Value: WS
  misc_feature: MA Experiment 20000355 PARAMETER Experiment Name: At_Siliques_Sub_P Parameter: Tissue Value: Less Than 5mm Siliques vs. Whole Plant
  misc_feature: Pfam Name: TBC Pfam Description: TBC domain
atgaaagctctacgaagaatacaaacgaagtctacgtttccaaatccttcttctccgtcatctccgtggactcatttgcgttctgctttcgtccttgttacttcttcttctccagcttcttgttcttcttcttctgatccgcatcggcttaaatcgccctggtcccggagaaaagggaaaaaaccactcacacttcgccggtggagaagatgtttcacccctgagggtagaattcggaatgggggagttgatttgttgaagaaagttcggactagaggcattgatcctagcattcggtctgaggtgtggccatttcttcttggagtgtgtgatttcaatagttccgaagaagagagaggtgctacaagaacttggagaagaaaagtgtatgagagactacgcaggcagtgcaaaaggcttcaaaaacaaaacagtgggacttttaagttaaacaagatcaataaaactactcaagatgatgagcatgatagttggtctcttgcgcaagactctgaaagttcatgttctgatgatgcttgcagcgtccacgagtctcttatcagcgataaagacaacacggaagatattggctacatgagtgatgtctcatgtacgcttgacagagactataatggttcaagacacctgaactctgagtcgtcagactcagattcatctgatgagaatgattatgttcaggtcgctccttcttgtgaagggaaagatgaaaacagtacttctccatccagcatatatatttctcgtaccaaagaggattttgtgacctggcagcgtattatccgtctagacgctctccgtgcagatacagaatggactccatattctcaatcccaagctttggtttcagagaatagggcacgtcgtgctgctgaagcagttggtctaaaggattacagttatttggaaccttcgaaaatctttcacgctgcacggcttgttgctgttcttgaagcctatgccttacatgaccctgaaattggctactgccaaggaatgagtgatcttctctcccctatactctcagtcatacctgatgactacgaggcattttggtgtttcgttgggttcatgaagaaagctcgtcagaatttcagagtcgatgaggttgggatcacaaggcaactgaacatagtctcaaagattatcaaatccaaagactcacaactctacaagcatcttgagaaagtcaaggctgaagactgtttctttgtttacagaatggttcttgttatgtttagaagagagctgactctggagcaaacattgcatctctgggaagtgatttgggcagaccaagctgcaataagagctgggatggggaaatcttcctggagcagacgaataaagcagcgggctcctcccacggaggatttgttgctgtacgtggtagctgcttctgtgttgcaaaggaggaaagtcataatagagaagtacagtagcatggaggagattctccgagagtgccacaatatggtagggaaactagacgtgtggaagctcttagacgatgcacacgaccttattgttaccctccacgccaagatcgaacattctatcccacaataa

SEQ ID NO: 70080 - protein, 528 aa, Arabidopsis thaliana
  peptide (1)..(528): Ceres Seq. ID no. 2142137
  misc_feature: Pfam Name: TBC Pfam Description: TBC domain
  misc_feature (1)..(528): Homolog of NCBI NO: 15238518 NR Description: GTPase activator-like protein of Rab-like small protein id: At5g24390.1 [Arabidopsis thaliana]
  misc_feature (127)..(525): Homolog of NCBI NO: 15229125 NR Description: GTPase activating -like protein; protein id:
  misc_feature (1)..(523): Homolog of NCBI NO: 9759196 NR Description: GTPase activator protein of Rab-like small
  misc_feature (15)..(523): Homolog of NCBI NO: 15238777 NR Description: GTPase activator protein of Rab-like small protein; protein id: At5g53570.1, supported by cDNA: gi_14517421, by cDNA: gi_20908079 [Arabidopsis thaliana]
  misc_feature (52)..(522): Homolog of NCBI NO: 15238237 NR Description: GTPase activator protein of Rab-like small
  misc_feature (177)..(523): Homolog of NCBI NO: 37536102 NR Description: putative GTPase activating protein [Oryza sativa
  misc_feature (1)..(230): Homolog of NCBI NO: 15229125 NR Description: GTPase activating -like protein; protein id:
  misc_feature (201)..(437): Homolog of NCBI NO: 15224288 NR Description: hypothetical protein; protein id: At2g43490.1
  misc_feature (61)..(227): Homolog of NCBI NO: 15224288 NR Description: hypothetical protein; protein id: At2g43490.1
  misc_feature (317)..(437): Homolog of NCBI NO: 23296366 NR Description: unknown protein [Arabidopsis thaliana]
MKALRRIQTKSTFPNPSSPSSPWTHLRSAFVLVTSSSPASCSSSSDPHRLKSPWSRRKGKKPLTLRRWRRCFTPEGRIRNGGVDLLKKVRTRGIDPSIRSEVWPFLLGVCDFNSSEEERGATRTWRRKVYERLRRQCKRLQKQNSGTFKLNKINKTTQDDEHDSWSLAQDSESSCSDDACSVHESLISDKDNTEDIGYMSDVSCTLDRDYNGSRHLNSESSDSDSSDENDYVQVAPSCEGKDENSTSPSSIYISRTKEDFVTWQRIIRLDALRADTEWTPYSQSQALVSENRARRAAEAVGLKDYSYLEPSKIFHAARLVAVLEAYALHDPEIGYCQGMSDLLSPILSVIPDDYEAFWCFVGFMKKARQNFRVDEVGITRQLNIVSKIIKSKDSQLYKHLEKVKAEDCFFVYRMVLVMFRRELTLEQTLHLWEVIWADQAAIRAGMGKSSWSRRIKQRAPPTEDLLLYVVAASVLQRRKVIIEKYSSMEEILRECHNMVGKLDVWKLLDDAHDLIVTLHAKIEHSIPQ

SEQ ID NO: 70081 - protein, 330 aa, Arabidopsis thaliana
  peptide (1)..(330): Ceres Seq. ID no. 2142138
  misc_feature: Pfam Name: TBC Pfam Description: TBC domain
  misc_feature (1)..(330): Homolog of NCBI NO: 15238518 NR Description: GTPase activator-like protein of Rab-like small protein id: At5g24390.1 [Arabidopsis thaliana]
  misc_feature (1)..(327): Homolog of NCBI NO: 15229125 NR Description: GTPase activating -like protein; protein id:
  misc_feature (1)..(325): Homolog of NCBI NO: 9759196 NR Description: GTPase activator protein of Rab-like small
  misc_feature (1)..(325): Homolog of NCBI NO: 15238777 NR Description: GTPase activator protein of Rab-like small protein; protein id: At5g53570.1, supported by cDNA: gi_14517421, by cDNA: gi_20908079 [Arabidopsis thaliana]
  misc_feature (1)..(324): Homolog of NCBI NO: 15238237 NR Description: GTPase activator protein of Rab-like small
  misc_feature (1)..(325): Homolog of NCBI NO: 37536102 NR Description: putative GTPase activating protein [Oryza sativa
  misc_feature (1)..(32): Homolog of NCBI NO: 15229125 NR Description: GTPase activating -like protein; protein id:
  misc_feature (3)..(239): Homolog of NCBI NO: 15224288 NR Description: hypothetical protein; protein id: At2g43490.1
  misc_feature (1)..(29): Homolog of NCBI NO: 15224288 NR Description: hypothetical protein; protein id: At2g43490.1
  misc_feature (119)..(239): Homolog of NCBI NO: 23296366 NR Description: unknown protein [Arabidopsis thaliana]
MSDVSCTLDRDYNGSRHLNSESSDSDSSDENDYVQVAPSCEGKDENSTSPSSIYISRTKEDFVTWQRIIRLDALRADTEWTPYSQSQALVSENRARRAAEAVGLKDYSYLEPSKIFHAARLVAVLEAYALHDPEIGYCQGMSDLLSPILSVIPDDYEAFWCFVGFMKKARQNFRVDEVGITRQLNIVSKIIKSKDSQLYKHLEKVKAEDCFFVYRMVLVMFRRELTLEQTLHLWEVIWADQAAIRAGMGKSSWSRRIKQRAPPTEDLLLYVVAASVLQRRKVIIEKYSSMEEILRECHNMVGKLDVWKLLDDAHDLIVTLHAKIEHSIPQ

SEQ ID NO: 70082 - DNA, 3264 bp, Arabidopsis thaliana
  misc_feature (1)..(3264): Ceres Seq. ID no. 2142328
  misc_feature: MA Experiment ID: 20000234 Result: Up-regulated in Transcription
  misc_feature: MA Experiment 20000234 PARAMETER Experiment Name: At_Siliques_P Parameter: Age (day) Value: 21
  misc_feature: MA Experiment 20000234 PARAMETER Experiment Name: At_Siliques_P Parameter: Organism Value: A. thaliana
  misc_feature: MA Experiment 20000234 PARAMETER Experiment Name: At_Siliques_P Parameter: Plant Line Value: WS
  misc_feature: MA Experiment 20000234 PARAMETER Experiment Name: At_Siliques_P Parameter: Tissue Value: Less Than 5mm Siliques vs. Whole Plant
  misc_feature: MA Experiment ID: 20000264 Result: Up-regulated in Transcription
  misc_feature: MA Experiment 20000264 PARAMETER Experiment Name: At_Open_Flower_P Parameter: Age (day) Value: 21
  misc_feature: MA Experiment 20000264 PARAMETER Experiment Name: At_Open_Flower_P Parameter: Plant Line Value: WS
  misc_feature: MA Experiment 20000264 PARAMETER Experiment Name: At_Open_Flower_P Parameter: Tissue Value: Open Flower vs. Whole Plant
  misc_feature: MA Experiment ID: 20000265 Result: Up-regulated in Transcription
  misc_feature: MA Experiment 20000265 PARAMETER Experiment Name: At_Open_Flower_P Parameter: Age (day) Value: 21
  misc_feature: MA Experiment 20000265 PARAMETER Experiment Name: At_Open_Flower_P Parameter: Plant Line Value: WS
  misc_feature: MA Experiment 20000265 PARAMETER Experiment Name: At_Open_Flower_P Parameter: Tissue Value: Closed Flower vs. Whole Plant
  misc_feature: MA Experiment ID: 20000286 Result: Up-regulated in Transcription
  misc_feature: MA Experiment 20000286 PARAMETER Experiment Name: At_Open_Flower_P Parameter: Age (day) Value: 21
  misc_feature: MA Experiment 20000286 PARAMETER Experiment Name: At_Open_Flower_P Parameter: Plant Line Value: WS
  misc_feature: MA Experiment 20000286 PARAMETER Experiment Name: At_Open_Flower_P Parameter: Tissue Value: Half Open vs. Whole Plant
  misc_feature: MA Experiment ID: 20000794 Result: Up-regulated in Transcription
  misc_feature: MA Experiment 20000794 PARAMETER Experiment Name: At_Petals_P Parameter: Age (day) Value: 23-25 days
  misc_feature: MA Experiment 20000794 PARAMETER Experiment Name: At_Petals_P Parameter: Plant Line Value: WS
  misc_feature: MA Experiment 20000794 PARAMETER Experiment Name: At_Petals_P Parameter: Tissue Value: Petals vs. Whole plant
  misc_feature: MA Experiment ID: 20001909 Result: Up-regulated in Transcription
  misc_feature: MA Experiment 20001909 PARAMETER Experiment Name: At_Drought_Reproduction_P Parameter: Age (day) Value: 35
  misc_feature: MA Experiment 20001909 PARAMETER Experiment Name: At_Drought_Reproduction_P Parameter: Organism Value: A. thaliana
  misc_feature: MA Experiment 20001909 PARAMETER Experiment Name: At_Drought_Reproduction_P Parameter: Plant Line Value: WS
  misc_feature: MA Experiment 20001909 PARAMETER Experiment Name: At_Drought_Reproduction_P Parameter: Timepoint (day) Value: 5
  misc_feature: MA Experiment 20001909 PARAMETER Experiment Name: At_Drought_Reproduction_P Parameter: Tissue Value: Flowers
  misc_feature: MA Experiment 20001909 PARAMETER Experiment Name: At_Drought_Reproduction_P Parameter: Treatment Value: Drought vs. No Drought
  misc_feature: MA Experiment ID: 20001910 Result: Up-regulated in Transcription
  misc_feature: MA Experiment 20001910 PARAMETER Experiment Name: At_Drought_Reproduction_P Parameter: Age (day) Value: 37
  misc_feature: MA Experiment 20001910 PARAMETER Experiment Name: At_Drought_Reproduction_P Parameter: Organism Value: A. thaliana
  misc_feature: MA Experiment 20001910 PARAMETER Experiment Name: At_Drought_Reproduction_P Parameter: Plant Line Value: WS
  misc_feature: MA Experiment 20001910 PARAMETER Experiment Name: At_Drought_Reproduction_P Parameter: Timepoint (day) Value: 7
  misc_feature: MA Experiment 20001910 PARAMETER Experiment Name: At_Drought_Reproduction_P Parameter: Tissue Value: Flowers
  misc_feature: MA Experiment 20001910 PARAMETER Experiment Name: At_Drought_Reproduction_P Parameter: Treatment Value: Drought vs. No Drought
atggcgagtggcggaaagggggagaagatattggtttcggtaagggtaaggccgcagaacgagaaagagaaggcgaggaatgatatatgtgattgggaatgtgtaaacaacacaacaatagtatgcaataacaatttgcctgagaggtctctcttcccctctacctatacatttgacaaagtgtttggatttgattctcccacgaaacaagtctatgaagatggagcgaaggaggttgctctttgtgttctcggcggaatcaactcaagtattttcgcatatggacagacaagcagtgggaagacgtatacaatgtgtggcatcactaaatttgcaatggatgacattttttgttacattcaaaagcatacggaccgcaaatttaccctcaaattctctgcgattgagatctacaatgaagctgtgagggatctcctaagtggggataataatcaacggaggctcctcgatgatccagagagaggaaccgtcgttgagaaacttattgaggagaccatccaagacagaacacatctagaggaacttcttacagtctgtgaaactcagaggaagattggagagacctccctgaatgaagttagctctagatcacatcaaatactccggctgacaatcgaaagcactggtcgagaatattctccggatagctcaagcactcttgcagcgtccgtgtgcttcattgatctggctggaagtgaacgtgcttctcagactttatctgctggtacaagattgaaagaaggttgtcatataaacaggagtttacttactcttggaacggtcatccgcaaactaaggttcgatccatgtgatatagctcaatctcaggtggagaatttacttaaatcaacagcagaagagcggtcttctaggatggatgaacaatccatgtttagctccatggattttgatgctgatttccgaagaagaagctatgattcaacagatcttggagaacctagtatcatcaataacttaaccgagaggaactttgagtttttggaaaattctgaagaagatgatttcctgctagatgataagacccctcaattttcgaggcataacctgtatgatgactgggaagagttggttcaaataaccgacgaaagactggaagatgcatgcaaagaagttagatgcattgaacctgaagctgagcagagtagtggacaaccagcagcatgcgaaagccatgactcattagacgacattgttgataagatagctatctctgaggttctctcacctagaaaggaagaaactttaccaggtctggaacacgaacaaagctataacccttctacaggtattgagaaagccgagaatgaagacatggagattagcatacctgcagcaaaggaagaaactttaccagctctagaatacgaacaaagctataactcttatacaggtaatgagagagccgagaatgaagtcatggagattagcacacctagaaaggacgaaccattatcagctctggaatacgaacaaagctataactcttctacaagtaatgagaaagccgagaatgaagatatggagattagcacacctgcagaaaaggaaaatgttgacttatctttaaaaacaatagatgtgaatgctaagcctgagacctatgagctaactctaaagaactcggatttggagataggcccatcagttgaagctcaagaatcacaggaatctgtgaatgaagaggaacaaatgaagaatgaagagaggaaaatgagtccttccacaaagcaagctgagcaatgcttaaataaagaagaaaatgctcagtcagaacagcaatcaacggaagactgtgaattgaattcactccctattaataaccaatcagaagcaacagtcgaagtggagttaacacccaacgatgctaagttagatgaggatgcgacatctagagataagtgggagagcaaacagcaacaagaggctgataaagattgtaacgaatcatctgtctgcaaaaatattgggacagatgataatgacaacgacacttacatggctttgaaagaaaaagttaaggagatgcagaagaaaattgaataccttatgagcatgcacacagcagaacaacaacaatcaccctccttcagaagagatttcaagagtcctccagaatattttactgccaaaagaagccgaagttgcagagaaaatctcttgagtgttagatctcctcattggtttgagagtttggaagttagtaacaatacatcacctacctggagggttatgcagacaaaagcttctcctggaagacccaacacttcgagcatttcctttgattcagggagttctacctccattgatacgcgtagcctgaaagactatgatcctgagatgggcaatagcttccgtgaatttgtagcagggcttgaggaaatggcaaagaagcatcactcaattgactcgacaccggagctagattatgggattccatacgctcccacaaaaaccgaaagaatggagatcagaccggaaagccctgcagatagcgttagaggaaacgagaatgcattgccaaatcctcaggatataaataaagaaaccacagatgccaccaataatcagtcacagagagagcaggttggtgattcggtagaagaagcaaaacctaaggaaacagattccacagaggcttcccaggagaaactacaggtagctgctaatggacaatattcaatcagttcttcagactttgagagacagcaaaggaaaataattgagctttgggcagcatgcaatgtaccactggttcacagaacctacttctttttgctcttcaaaggtgatccttcagactatgtttatatggaagttgaacttcgaaggctatcttttctgaagcagacgatatctaatgacatggaaacatcaaggatgcaaacagtgaaggcactcacacgcgagaaggaatggatttccaaacaattaccaaagaagtttccatggaaccaaagaatagggctttaccaaaaatggggcgtggaggtgaactcaaagcagagaagcctgcaagtggcgcacaagctgtggaccaacacccaagatatggaccacataaaagaaagtgcttctcttgtggctaagctgcttggatttgttgagccaagtcgaatgccgaaggaaatgtttggcctcagcttgttacctagaaccgaaaacgtaaaatcatctggctggagatttaccaaatcattctctgctatacgcttgaccagatga

SEQ ID NO: 70083 - protein, 1087 aa, Arabidopsis thaliana
  peptide (1)..(1087): Ceres Seq. ID no. 2142329
  misc_feature (280)..(692): Pfam Name: Myosin tail Pfam Description: Myosin tail
  misc_feature (269)..(604): Homolog of NCBI NO: 18416291 NR Description: putative protein; protein id: At4g24170.1
  misc_feature (4)..(272): Homolog of NCBI NO: 18416291 NR Description: putative protein; protein id: At4g24170.1
  misc_feature (861)..(1086): Homolog of NCBI NO: 18416291 NR Description: putative protein; protein id: At4g24170.1
  misc_feature (502)..(817): Homolog of NCBI NO: 18416291 NR Description: putative protein; protein id: At4g24170.1
  misc_feature (269)..(604): Homolog of NCBI NO: 7487172 NR Description: hypothetical protein T19F6.160 - Arabidopsis >gi|5668645|emb|CAB51660.1| putative protein [Arabidopsis >gi|7269267|emb|CAB79327.1| putative protein [Arabidopsis
  misc_feature (4)..(272): Homolog of NCBI NO: 7487172 NR Description: hypothetical protein T19F6.160 - Arabidopsis >gi|5668645|emb|CAB51660.1| putative protein [Arabidopsis >gi|7269267|emb|CAB79327.1| putative protein [Arabidopsis
  misc_feature (861)..(1064): Homolog of NCBI NO: 7487172 NR Description: hypothetical protein T19F6.160 - Arabidopsis >gi|5668645|emb|CAB51660.1| putative protein [Arabidopsis >gi|7269267|emb|CAB79327.1| putative protein [Arabidopsis
  misc_feature (502)..(817): Homolog of NCBI NO: 7487172 NR Description: hypothetical protein T19F6.160 - Arabidopsis >gi|5668645|emb|CAB51660.1| putative protein [Arabidopsis >gi|7269267|emb|CAB79327.1| putative protein [Arabidopsis
  misc_feature (400)..(1075): Homolog of NCBI NO: 30693419 NR Description: expressed protein [Arabidopsis thaliana]
  misc_feature (3)..(272): Homolog of NCBI NO: 30693419 NR Description: expressed protein [Arabidopsis thaliana]
MASGGKGEKILVSVRVRPQNEKEKARNDICDWECVNNTTIVCNNNLPERSLFPSTYTFDKVFGFDSPTKQVYEDGAKEVALCVLGGINSSIFAYGQTSSGKTYTMCGITKFAMDDIFCYIQKHTDRKFTLKFSAIEIYNEAVRDLLSGDNNQRRLLDDPERGTVVEKLIEETIQDRTHLEELLTVCETQRKIGETSLNEVSSRSHQILRLTIESTGREYSPDSSSTLAASVCFIDLAGSERASQTLSAGTRLKEGCHINRSLLTLGTVIRKLRFDPCDIAQSQVENLLKSTAEERSSRMDEQSMFSSMDFDADFRRRSYDSTDLGEPSIINNLTERNFEFLENSEEDDFLLDDKTPQFSRHNLYDDWEELVQITDERLEDACKEVRCIEPEAEQSSGQPAACESHDSLDDIVDKIAISEVLSPRKEETLPGLEHEQSYNPSTGIEKAENEDMEISIPAAKEETLPALEYEQSYNSYTGNERAENEVMEISTPRKDEPLSALEYEQSYNSSTSNEKAENEDMEISTPAEKENVDLSLKTIDVNAKPETYELTLKNSDLEIGPSVEAQESQESVNEEEQMKNEERKMSPSTKQAEQCLNKEENAQSEQQSTEDCELNSLPINNQSEATVEVELTPNDAKLDEDATSRDKWESKQQQEADKDCNESSVCKNIGTDDNDNDTYMALKEKVKEMQKKIEYLMSMHTAEQQQSPSFRRDFKSPPEYFTAKRSRSCRENLLSVRSPHWFESLEVSNNTSPTWRVMQTKASPGRPNTSSISFDSGSSTSIDTRSLKDYDPEMGNSFREFVAGLEEMAKKHHSIDSTPELDYGIPYAPTKTERMEIRPESPADSVRGNENALPNPQDINKETTDATNNQSQREQVGDSVEEAKPKETDSTEASQEKLQVAANGQYSISSSDFERQQRKIIELWAACNVPLVHRTYFFLLFKGDPSDYVYMEVELRRLSFLKQTISNDMETSRMQTVKALTREKEWISKQLPKKFPWNQRIGLYQKWGVEVNSKQRSLQVAHKLWTNTQDMDHIKESASLVAKLLGFVEPSRMPKEMFGLSLLPRTENVKSSGWRFTKSFSAIRLTR

SEQ ID NO: 70084 - protein, 983 aa, Arabidopsis thaliana
  peptide (1)..(983): Ceres Seq. ID no. 2142330
  misc_feature (176)..(588): Pfam Name: Myosin tail Pfam Description: Myosin tail
  misc_feature (398)..(713): Homolog of NCBI NO: 7487172 NR Description: hypothetical protein T19F6.160 - Arabidopsis >gi|5668645|emb|CAB51660.1| putative protein [Arabidopsis >gi|7269267|emb|CAB79327.1| putative protein [Arabidopsis
  misc_feature (296)..(971): Homolog of NCBI NO: 30693419 NR Description: expressed protein [Arabidopsis thaliana]
  misc_feature (1)..(168): Homolog of NCBI NO: 18416291 NR Description: putative protein; protein id: At4g24170.1
  misc_feature (398)..(713): Homolog of NCBI NO: 18416291 NR Description: putative protein; protein id: At4g24170.1
  misc_feature (1)..(168): Homolog of NCBI NO: 7487172 NR Description: hypothetical protein T19F6.160 - Arabidopsis >gi|5668645|emb|CAB51660.1| putative protein [Arabidopsis >gi|7269267|emb|CAB79327.1| putative protein [Arabidopsis
  misc_feature (757)..(960): Homolog of NCBI NO: 7487172 NR Description: hypothetical protein T19F6.160 - Arabidopsis >gi|5668645|emb|CAB51660.1| putative protein [Arabidopsis >gi|7269267|emb|CAB79327.1| putative protein [Arabidopsis
  misc_feature (165)..(500): Homolog of NCBI NO: 7487172 NR Description: hypothetical protein T19F6.160 - Arabidopsis >gi|5668645|emb|CAB51660.1| putative protein [Arabidopsis >gi|7269267|emb|CAB79327.1| putative protein [Arabidopsis
  misc_feature (757)..(982): Homolog of NCBI NO: 18416291 NR Description: putative protein; protein id: At4g24170.1
  misc_feature (165)..(500): Homolog of NCBI NO: 18416291 NR Description: putative protein; protein id: At4g24170.1
  misc_feature (1)..(168): Homolog of NCBI NO: 30693419 NR Description: expressed protein [Arabidopsis thaliana]
MCGITKFAMDDIFCYIQKHTDRKFTLKFSAIEIYNEAVRDLLSGDNNQRRLLDDPERGTVVEKLIEETIQDRTHLEELLTVCETQRKIGETSLNEVSSRSHQILRLTIESTGREYSPDSSSTLAASVCFIDLAGSERASQTLSAGTRLKEGCHINRSLLTLGTVIRKLRFDPCDIAQSQVENLLKSTAEERSSRMDEQSMFSSMDFDADFRRRSYDSTDLGEPSIINNLTERNFEFLENSEEDDFLLDDKTPQFSRHNLYDDWEELVQITDERLEDACKEVRCIEPEAEQSSGQPAACESHDSLDDIVDKIAISEVLSPRKEETLPGLEHEQSYNPSTGIEKAENEDMEISIPAAKEETLPALEYEQSYNSYTGNERAENEVMEISTPRKDEPLSALEYEQSYNSSTSNEKAENEDMEISTPAEKENVDLSLKTIDVNAKPETYELTLKNSDLEIGPSVEAQESQESVNEEEQMKNEERKMSPSTKQAEQCLNKEENAQSEQQSTEDCELNSLPINNQSEATVEVELTPNDAKLDEDATSRDKWESKQQQEADKDCNESSVCKNIGTDDNDNDTYMALKEKVKEMQKKIEYLMSMHTAEQQQSPSFRRDFKSPPEYFTAKRSRSCRENLLSVRSPHWFESLEVSNNTSPTWRVMQTKASPGRPNTSSISFDSGSSTSIDTRSLKDYDPEMGNSFREFVAGLEEMAKKHHSIDSTPELDYGIPYAPTKTERMEIRPESPADSVRGNENALPNPQDINKETTDATNNQSQREQVGDSVEEAKPKETDSTEASQEKLQVAANGQYSISSSDFERQQRKIIELWAACNVPLVHRTYFFLLFKGDPSDYVYMEVELRRLSFLKQTISNDMETSRMQTVKALTREKEWISKQLPKKFPWNQRIGLYQKWGVEVNSKQRSLQVAHKLWTNTQDMDHIKESASLVAKLLGFVEPSRMPKEMFGLSLLPRTENVKSSGWRFTKSFSAIRLTR

SEQ ID NO: 70085 - protein, 975 aa, Arabidopsis thaliana
  peptide (1)..(975): Ceres Seq. ID no. 2142331
  misc_feature (168)..(580): Pfam Name: Myosin tail Pfam Description: Myosin tail
  misc_feature (157)..(492): Homolog of NCBI NO: 18416291 NR Description: putative protein; protein id: At4g24170.1
  misc_feature (1)..(160): Homolog of NCBI NO: 18416291 NR Description: putative protein; protein id: At4g24170.1
  misc_feature (749)..(974): Homolog of NCBI NO: 18416291 NR Description: putative protein; protein id: At4g24170.1
  misc_feature (390)..(705): Homolog of NCBI NO: 18416291 NR Description: putative protein; protein id: At4g24170.1
  misc_feature (157)..(492): Homolog of NCBI NO: 7487172 NR Description: hypothetical protein T19F6.160 - Arabidopsis >gi|5668645|emb|CAB51660.1| putative protein [Arabidopsis >gi|7269267|emb|CAB79327.1| putative protein [Arabidopsis
  misc_feature (1)..(160): Homolog of NCBI NO: 7487172 NR Description: hypothetical protein T19F6.160 - Arabidopsis >gi|5668645|emb|CAB51660.1| putative protein [Arabidopsis >gi|7269267|emb|CAB79327.1| putative protein [Arabidopsis
  misc_feature (749)..(952): Homolog of NCBI NO: 7487172 NR Description: hypothetical protein T19F6.160 - Arabidopsis >gi|5668645|emb|CAB51660.1| putative protein [Arabidopsis >gi|7269267|emb|CAB79327.1| putative protein [Arabidopsis
  misc_feature (390)..(705): Homolog of NCBI NO: 7487172 NR Description: hypothetical protein T19F6.160 - Arabidopsis >gi|5668645|emb|CAB51660.1| putative protein [Arabidopsis >gi|7269267|emb|CAB79327.1| putative protein [Arabidopsis
  misc_feature (288)..(963): Homolog of NCBI NO: 30693419 NR Description: expressed protein [Arabidopsis thaliana]
  misc_feature (1)..(160): Homolog of NCBI NO: 30693419 NR Description: expressed protein [Arabidopsis thaliana]
MDDIFCYIQKHTDRKFTLKFSAIEIYNEAVRDLLSGDNNQRRLLDDPERGTVVEKLIEETIQDRTHLEELLTVCETQRKIGETSLNEVSSRSHQILRLTIESTGREYSPDSSSTLAASVCFIDLAGSERASQTLSAGTRLKEGCHINRSLLTLGTVIRKLRFDPCDIAQSQVENLLKSTAEERSSRMDEQSMFSSMDFDADFRRRSYDSTDLGEPSIINNLTERNFEFLENSEEDDFLLDDKTPQFSRHNLYDDWEELVQITDERLEDACKEVRCIEPEAEQSSGQPAACESHDSLDDIVDKIAISEVLSPRKEETLPGLEHEQSYNPSTGIEKAENEDMEISIPAAKEETLPALEYEQSYNSYTGNERAENEVMEISTPRKDEPLSALEYEQSYNSSTSNEKAENEDMEISTPAEKENVDLSLKTIDVNAKPETYELTLKNSDLEIGPSVEAQESQESVNEEEQMKNEERKMSPSTKQAEQCLNKEENAQSEQQSTEDCELNSLPINNQSEATVEVELTPNDAKLDEDATSRDKWESKQQQEADKDCNESSVCKNIGTDDNDNDTYMALKEKVKEMQKKIEYLMSMHTAEQQQSPSFRRDFKSPPEYFTAKRSRSCRENLLSVRSPHWFESLEVSNNTSPTWRVMQTKASPGRPNTSSISFDSGSSTSIDTRSLKDYDPEMGNSFREFVAGLEEMAKKHHSIDSTPELDYGIPYAPTKTERMEIRPESPADSVRGNENALPNPQDINKETTDATNNQSQREQVGDSVEEAKPKETDSTEASQEKLQVAANGQYSISSSDFERQQRKIIELWAACNVPLVHRTYFFLLFKGDPSDYVYMEVELRRLSFLKQTISNDMETSRMQTVKALTREKEWISKQLPKKFPWNQRIGLYQKWGVEVNSKQRSLQVAHKLWTNTQDMDHIKESASLVAKLLGFVEPSRMPKEMFGLSLLPRTENVKSSGWRFTKSFSAIRLTR

SEQ ID NO: 70086 - DNA, 1215 bp, Arabidopsis thaliana
  misc_feature (1)..(1215): Ceres Seq. ID no. 2142813
  misc_feature: MA Experiment ID: 20000307 Result: Down-regulated in Transcription
  misc_feature: MA Experiment 20000307 PARAMETER Experiment Name: At_Germinating_Seeds_Sub_P Parameter: Age (hr) Value: 24 vs. 0
  misc_feature: MA Experiment 20000307 PARAMETER Experiment Name: At_Germinating_Seeds_Sub_P Parameter: Organism Value: A. thaliana
  misc_feature: MA Experiment 20000307 PARAMETER Experiment Name: At_Germinating_Seeds_Sub_P Parameter: Plant Line Value: WS
  misc_feature: MA Experiment 20000307 PARAMETER Experiment Name: At_Germinating_Seeds_Sub_P Parameter: Tissue Value: Germinating Seeds
  misc_feature: MA Experiment ID: 20000355 Result: Up-regulated in Transcription
  misc_feature: MA Experiment 20000355 PARAMETER Experiment Name: At_Siliques_Sub_P Parameter: Age (day) Value: 21
  misc_feature: MA Experiment 20000355 PARAMETER Experiment Name: At_Siliques_Sub_P Parameter: Organism Value: A. thaliana
  misc_feature: MA Experiment 20000355 PARAMETER Experiment Name: At_Siliques_Sub_P Parameter: Plant Line Value: WS
  misc_feature: MA Experiment 20000355 PARAMETER Experiment Name: At_Siliques_Sub_P Parameter: Tissue Value: Less Than 5mm Siliques vs. Whole Plant
atggcttccttcaaccactttgtgttactgcttctgttaataatcactcttattctatccgctgaagcaactaaggaacgccgagcaataccatcaaaggcagaaaggaatgaaatgaagagacaactcaaagctatcaacaagcctgcaatcaagagtttcaagactgaacatggtgatatattcgattgtatcgatattcacaaacaactagcatttgatcatcacctactaaaaaaccactctgttcagctaaggccaacaacagtacctgaatatatcactggaaacaacatttcagagagttttagtcttttgcaagaaggtataagctgtccagatggcacagtaattgtaaaaaggactacaatgcaagatcttatgcatgcacaacgtttgaaatccatgggattcgagggcccgagaccttttctcacagagacaaacaacatgaattttaatggaaaattctacgatgcaagagctgattatggaccgaacccttttgctggagttgcaggaaacattaacatatggaaaccaaaaatcttgcaagatcaagttagtattggatacatggcagttagtggggggcctattgaagaagatttcgccagcatttcagttggatggattgtgaatccatcgatgcaccatggtgatcatgttcgtttatacgcctactggactttacatggaagcagtactggcggctgctacggcatgtcatgtcctggatttgtgcaagttagcaagactataccagttggtgccgttcttcaaccattttccatctataatggtcgacaatatgaattgcgtttaggcttgtttcaggatagtggcacgggaaattggtggtttgtatttaaagaggagattattggatactggccagcatcattgttcaagtcctggatggaatctaacagcgcaaattatgcatcttggggagggcaagtgtatagccctatcagagagaagagtccacctatgggaagtggtcattggcctagtgagggctttcataaagctgcttttattagtggcctcaaactcttcgatggtcacgggaaagtttataatccaggacgcgggacagtgaaggtacatgagagcagaccaatctgttacaaagccagatatgttcatgatgttgataaaccttggttaaaatctgtttactttggaggtcctggagggtgcatagggtaa

SEQ ID NO: 70087 - protein, 404 aa, Arabidopsis thaliana
  peptide (1)..(404): Ceres Seq. ID no. 2142814
  misc_feature (207)..(362): Pfam Name: Arabidopsis proteins of unknown function Pfam Description: Arabidopsis proteins of unknown function
  misc_feature (1)..(216): Homolog of NCBI NO: 15236476 NR Description: putative protein; protein id: At4g23360.1
  misc_feature (200)..(404): Homolog of NCBI NO: 15236476 NR Description: putative protein; protein id: At4g23360.1
  misc_feature (229)..(404): Homolog of NCBI NO: 15236476 NR Description: putative protein; protein id: At4g23360.1
  misc_feature (1)..(96): Homolog of NCBI NO: 15236476 NR Description: putative protein; protein id: At4g23360.1
  misc_feature (160)..(216): Homolog of NCBI NO: 15236476 NR Description: putative protein; protein id: At4g23360.1
  misc_feature (1)..(220): Homolog of NCBI NO: 15236474 NR Description: putative protein; protein id: At4g23350.1
  misc_feature (229)..(403): Homolog of NCBI NO: 15236478 NR Description: putative protein; protein id: At4g23370.1
  misc_feature (1)..(111): Homolog of NCBI NO: 15236478 NR Description: putative protein; protein id: At4g23370.1
  misc_feature (165)..(404): Homolog of NCBI NO: 15236474 NR Description: putative protein; protein id: At4g23350.1
  misc_feature (66)..(402): Homolog of NCBI NO: 15236480 NR Description: putative protein; protein id: At4g23380.1
MASFNHFVLLLLLIITLILSAEATKERRAIPSKAERNEMKRQLKAINKPAIKSFKTEHGDIFDCIDIHKQLAFDHHLLKNHSVQLRPTTVPEYITGNNISESFSLLQEGISCPDGTVIVKRTTMQDLMHAQRLKSMGFEGPRPFLTETNNMNFNGKFYDARADYGPNPFAGVAGNINIWKPKILQDQVSIGYMAVSGGPIEEDFASISVGWIVNPSMHHGDHVRLYAYWTLHGSSTGGCYGMSCPGFVQVSKTIPVGAVLQPFSIYNGRQYELRLGLFQDSGTGNWWFVFKEEIIGYWPASLFKSWMESNSANYASWGGQVYSPIREKSPPMGSGHWPSEGFHKAAFISGLKLFDGHGKVYNPGRGTVKVHESRPICYKARYVHDVDKPWLKSVYFGGPGGCIG

SEQ ID NO: 70088 - protein, 366 aa, Arabidopsis thaliana
  peptide (1)..(366): Ceres Seq. ID no. 2142815
  misc_feature (169)..(324): Pfam Name: Arabidopsis proteins of unknown function Pfam Description: Arabidopsis proteins of unknown function
  misc_feature (1)..(178): Homolog of NCBI NO: 15236476 NR Description: putative protein; protein id: At4g23360.1
  misc_feature (162)..(366): Homolog of NCBI NO: 15236476 NR Description: putative protein; protein id: At4g23360.1
  misc_feature (191)..(366): Homolog of NCBI NO: 15236476 NR Description: putative protein; protein id: At4g23360.1
  misc_feature (1)..(58): Homolog of NCBI NO: 15236476 NR Description: putative protein; protein id: At4g23360.1
  misc_feature (122)..(178): Homolog of NCBI NO: 15236476 NR Description: putative protein; protein id: At4g23360.1
  misc_feature (1)..(182): Homolog of NCBI NO: 15236474 NR Description: putative protein; protein id: At4g23350.1
  misc_feature (191)..(365): Homolog of NCBI NO: 15236478 NR Description: putative protein; protein id: At4g23370.1
  misc_feature (1)..(73): Homolog of NCBI NO: 15236478 NR Description: putative protein; protein id: At4g23370.1
  misc_feature (127)..(366): Homolog of NCBI NO: 15236474 NR Description: putative protein; protein id: At4g23350.1
  misc_feature (28)..(364): Homolog of NCBI NO: 15236480 NR Description: putative protein; protein id: At4g23380.1
MKRQLKAINKPAIKSFKTEHGDIFDCIDIHKQLAFDHHLLKNHSVQLRPTTVPEYITGNNISESFSLLQEGISCPDGTVIVKRTTMQDLMHAQRLKSMGFEGPRPFLTETNNMNFNGKFYDARADYGPNPFAGVAGNINIWKPKILQDQVSIGYMAVSGGPIEEDFASISVGWIVNPSMHHGDHVRLYAYWTLHGSSTGGCYGMSCPGFVQVSKTIPVGAVLQPFSIYNGRQYELRLGLFQDSGTGNWWFVFKEEIIGYWPASLFKSWMESNSANYASWGGQVYSPIREKSPPMGSGHWPSEGFHKAAFISGLKLFDGHGKVYNPGRGTVKVHESRPICYKARYVHDVDKPWLKSVYFGGPGGCIG

SEQ ID NO: 70089 - protein, 281 aa, Arabidopsis thaliana
  peptide (1)..(281): Ceres Seq. ID no. 2142816
  misc_feature (84)..(239): Pfam Name: Arabidopsis proteins of unknown function Pfam Description: Arabidopsis proteins of unknown function
  misc_feature (1)..(93): Homolog of NCBI NO: 15236476 NR Description: putative protein; protein id: At4g23360.1
  misc_feature (77)..(281): Homolog of NCBI NO: 15236476 NR Description: putative protein; protein id: At4g23360.1
  misc_feature (106)..(281): Homolog of NCBI NO: 15236476 NR Description: putative protein; protein id: At4g23360.1
  misc_feature (37)..(93): Homolog of NCBI NO: 15236476 NR Description: putative protein; protein id: At4g23360.1
  misc_feature (1)..(97): Homolog of NCBI NO: 15236474 NR Description: putative protein; protein id: At4g23350.1
  misc_feature (106)..(280): Homolog of NCBI NO: 15236478 NR Description: putative protein; protein id: At4g23370.1
  misc_feature (42)..(281): Homolog of NCBI NO: 15236474 NR Description: putative protein; protein id: At4g23350.1
  misc_feature (1)..(279): Homolog of NCBI NO: 15236480 NR Description: putative protein; protein id: At4g23380.1
  misc_feature (1)..(280): Homolog of NCBI NO: 30686176 NR Description: expressed protein [Arabidopsis thaliana] unknown protein [Arabidopsis thaliana]
  misc_feature (1)..(279): Homolog of NCBI NO: 15225313 NR Description: hypothetical protein; protein id: At2g20170.1
MQDLMHAQRLKSMGFEGPRPFLTETNNMNFNGKFYDARADYGPNPFAGVAGNINIWKPKILQDQVSIGYMAVSGGPIEEDFASISVGWIVNPSMHHGDHVRLYAYWTLHGSSTGGCYGMSCPGFVQVSKTIPVGAVLQPFSIYNGRQYELRLGLFQDSGTGNWWFVFKEEIIGYWPASLFKSWMESNSANYASWGGQVYSPIREKSPPMGSGHWPSEGFHKAAFISGLKLFDGHGKVYNPGRGTVKVHESRPICYKARYVHDVDKPWLKSVYFGGPGGCIG

SEQ ID NO: 70090 - DNA, 1356 bp, Arabidopsis thaliana
  misc_feature (1)..(1356): Ceres Seq. ID no. 2143179
  misc_feature: MA Experiment ID: 20000306 Result: Up-regulated in Transcription
  misc_feature: MA Experiment 20000306 PARAMETER Experiment Name: At_Germinating_Seeds_Sub_P Parameter: Age (hr) Value: 6 vs. 0
  misc_feature: MA Experiment 20000306 PARAMETER Experiment Name: At_Germinating_Seeds_Sub_P Parameter: Organism Value: A. thaliana
  misc_feature: MA Experiment 20000306 PARAMETER Experiment Name: At_Germinating_Seeds_Sub_P Parameter: Plant Line Value: WS
  misc_feature: MA Experiment 20000306 PARAMETER Experiment Name: At_Germinating_Seeds_Sub_P Parameter: Tissue Value: Germinating Seeds
  misc_feature: MA Experiment ID: 20000307 Result: Up-regulated in Transcription
  misc_feature: MA Experiment 20000307 PARAMETER Experiment Name: At_Germinating_Seeds_Sub_P Parameter: Age (hr) Value: 24 vs. 0
  misc_feature: MA Experiment 20000307 PARAMETER Experiment Name: At_Germinating_Seeds_Sub_P Parameter: Organism Value: A. thaliana
  misc_feature: MA Experiment 20000307 PARAMETER Experiment Name: At_Germinating_Seeds_Sub_P Parameter: Plant Line Value: WS
  misc_feature: MA Experiment 20000307 PARAMETER Experiment Name: At_Germinating_Seeds_Sub_P Parameter: Tissue Value: Germinating Seeds
  misc_feature: MA Experiment ID: 20000314 Result: Up-regulated in Transcription
  misc_feature: MA Experiment 20000314 PARAMETER Experiment Name: At_14day_Shoots-Roots_Sub_P Parameter: Age (day) Value: 14
  misc_feature: MA Experiment 20000314 PARAMETER Experiment Name: At_14day_Shoots-Roots_Sub_P Parameter: Organism Value: A. thaliana
  misc_feature: MA Experiment 20000314 PARAMETER Experiment Name: At_14day_Shoots-Roots_Sub_P Parameter: Plant Line Value: WS
  misc_feature: MA Experiment 20000314 PARAMETER Experiment Name: At_14day_Shoots-Roots_Sub_P Parameter: Tissue Value: Roots vs. Whole Plant
atggagaagagtaatggcctgcgagtgattctgtttccacttccattacaaggctgcatcaaccctatgattcagctcgccaagatcctccactcaagaggtttttcaatcactgtgatccacacttgcttcaacgcgccaaaagcttcaagccatccactcttcaccttcatacagatccaagatggcttgtctgaaacagagacaagaactcgcgacgtcaaacttctcataacacttctcaaccaaaattgcgagtctccggttcgtgaatgtttgcgtaaactgttgcaatctgccaaggaagagaaacagaggattagctgtttgatcaatgattctggttggatcttcactcaacacttagccaagagtttgaatctcatgagattggcctttaatacctataagatctccttctttcgaagccattttgttcttcctcagctccggcgtgaaatgtttcttccattacaagattcagaacaagatgatccagttgagaagtttccaccgcttagaaagaaagatcttttacggattcttgaagcagattcggtgcagggagactcgtactcggatatgattttggaaaagacaaaggcgtcttcaggtcttatattcatgtcctgtgaagagttggaccaagactcactgagtcaatcacgtgaagattttaaggttccgatatttgcgataggaccttctcatagccattttcctgcttcttctagtagcttgttcacaccggacgagacttgcatcccatggttagacagacaagaagacaaatccgtaatatacgtgagtattgggagcctcgtgaccatcaacgaaacagagctaatggagattgcttggggtctaagtaacagcgaccaaccatttttatgggtcgtccgggttggttcagtcaatggcacggaatggattgaagcaatcccggaatatttcatcaaaaggcttaatgagaagggaaagatagtgaaatgggctccacaacaagaggttctaaagcatcgagctattggaggtttcttgacacataatggttggaactcgacggttgagagtgtttgtgaaggcgtccctatgatctgtttgccttttcgttgggaccaattgttaaatgcaagatttgttagtgatgtatggatggttgggatacatctcgagggtcggattgagagggatgagatcgagagagcgataaggagattattgttggaaactgaaggagaagccatccgagagaggatacaacttcttaaggaaaaagtaggaagatcagttaaacaaaacggttcggcatatcaatctctacaaaatttgattaattatatatcatctttctag

SEQ ID NO: 70091 - protein, 451 aa, Arabidopsis thaliana
  peptide (1)..(451): Ceres Seq. ID no. 2143180
  misc_feature (8)..(449): Pfam Name: UDP-glucoronosyl and UDP-glucosyl transferase Pfam Description: UDP-glucoronosyl and UDP-glucosyl transferase
  misc_feature (1)..(451): Homolog of NCBI NO: 15239259 NR Description: glucuronosyl transferase-like protein; protein At5g05880.1 [Arabidopsis thaliana] >gi|10177561|dbj|BAB10793.1|
  misc_feature (1)..(451): Homolog of NCBI NO: 15239287 NR Description: glucuronosyl transferase-like protein; protein At5g05890.1 [Arabidopsis thaliana] >gi|10177562|dbj|BAB10794.1|
  misc_feature (1)..(451): Homolog of NCBI NO: 15239288 NR Description: glucuronosyl transferase-like protein; protein At5g05900.1 [Arabidopsis thaliana] >gi|10177563|dbj|BAB10795.1|
  misc_feature (1)..(449): Homolog of NCBI NO: 15239258 NR Description: glucuronosyl transferase-like protein; protein At5g05870.1 [Arabidopsis thaliana] >gi|10177560|dbj|BAB10792.1|
  misc_feature (2)..(448): Homolog of NCBI NO: 15239257 NR Description: glucuronosyl transferase-like protein; protein At5g05860.1, supported by cDNA: gi_15010631 [Arabidopsis >gi|15010632|gb|AAK73975.1| AT5g05860/MJJ3_28 [Arabidopsis
  misc_feature (9)..(451): Homolog of NCBI NO: 15229731 NR Description: glucosyl transferase, putative; protein id: [Arabidopsis thaliana] >gi|12321874|gb|AAG50970.1|AC073395_12
  misc_feature (9)..(451): Homolog of NCBI NO: 26452976 NR Description: unknown protein [Arabidopsis thaliana]
  misc_feature (1)..(451): Homolog of NCBI NO: 15228174 NR Description: glucuronosyl transferase - like protein; protein
  misc_feature (9)..(450): Homolog of NCBI NO: 629669 NR Description: glucuronosyl transferase homolog,
  misc_feature (11)..(451): Homolog of NCBI NO: 21593451 NR Description: glucuronosyl transferase-like protein
MEKSNGLRVILFPLPLQGCINPMIQLAKILHSRGFSITVIHTCFNAPKASSHPLFTFIQIQDGLSETETRTRDVKLLITLLNQNCESPVRECLRKLLQSAKEEKQRISCLINDSGWIFTQHLAKSLNLMRLAFNTYKISFFRSHFVLPQLRREMFLPLQDSEQDDPVEKFPPLRKKDLLRILEADSVQGDSYSDMILEKTKASSGLIFMSCEELDQDSLSQSREDFKVPIFAIGPSHSHFPASSSSLFTPDETCIPWLDRQEDKSVIYVSIGSLVTINETELMEIAWGLSNSDQPFLWVVRVGSVNGTEWIEAIPEYFIKRLNEKGKIVKWAPQQEVLKHRAIGGFLTHNGWNSTVESVCEGVPMICLPFRWDQLLNARFVSDVWMVGIHLEGRIERDEIERAIRRLLLETEGEAIRERIQLLKEKVGRSVKQNGSAYQSLQNLINYISSF

SEQ ID NO: 70092 - protein, 429 aa, Arabidopsis thaliana
  peptide (1)..(429): Ceres Seq. ID no. 2143181
  misc_feature (1)..(427): Pfam Name: UDP-glucoronosyl and UDP-glucosyl transferase Pfam Description: UDP-glucoronosyl and UDP-glucosyl transferase
  misc_feature (1)..(429): Homolog of NCBI NO: 15239259 NR Description: glucuronosyl transferase-like protein; protein At5g05880.1 [Arabidopsis thaliana] >gi|10177561|dbj|BAB10793.1|
  misc_feature (1)..(429): Homolog of NCBI NO: 15239287 NR Description: glucuronosyl transferase-like protein; protein At5g05890.1 [Arabidopsis thaliana] >gi|10177562|dbj|BAB10794.1|
  misc_feature (1)..(429): Homolog of NCBI NO: 15239288 NR Description: glucuronosyl transferase-like protein; protein At5g05900.1 [Arabidopsis thaliana] >gi|10177563|dbj|BAB10795.1|
  misc_feature (1)..(427): Homolog of NCBI NO: 15239258 NR Description: glucuronosyl transferase-like protein; protein At5g05870.1 [Arabidopsis thaliana] >gi|10177560|dbj|BAB10792.1|
  misc_feature (1)..(426): Homolog of NCBI NO: 15239257 NR Description: glucuronosyl transferase-like protein; protein At5g05860.1, supported by cDNA: gi_15010631 [Arabidopsis >gi|15010632|gb|AAK73975.1| AT5g05860/MJJ3_28 [Arabidopsis
  misc_feature (1)..(429): Homolog of NCBI NO: 15229731 NR Description: glucosyl transferase, putative; protein id: [Arabidopsis thaliana] >gi|12321874|gb|AAG50970.1|AC073395_12
  misc_feature (1)..(429): Homolog of NCBI NO: 26452976 NR Description: unknown protein [Arabidopsis thaliana]
  misc_feature (1)..(429): Homolog of NCBI NO: 15228174 NR Description: glucuronosyl transferase - like protein; protein
  misc_feature (1)..(428): Homolog of NCBI NO: 629669 NR Description: glucuronosyl transferase homolog,
  misc_feature (1)..(429): Homolog of NCBI NO: 21593451 NR Description: glucuronosyl transferase-like protein
MIQLAKILHSRGFSITVIHTCFNAPKASSHPLFTFIQIQDGLSETETRTRDVKLLITLLNQNCESPVRECLRKLLQSAKEEKQRISCLINDSGWIFTQHLAKSLNLMRLAFNTYKISFFRSHFVLPQLRREMFLPLQDSEQDDPVEKFPPLRKKDLLRILEADSVQGDSYSDMILEKTKASSGLIFMSCEELDQDSLSQSREDFKVPIFAIGPSHSHFPASSSSLFTPDETCIPWLDRQEDKSVIYVSIGSLVTINETELMEIAWGLSNSDQPFLWVVRVGSVNGTEWIEAIPEYFIKRLNEKGKIVKWAPQQEVLKHRAIGGFLTHNGWNSTVESVCEGVPMICLPFRWDQLLNARFVSDVWMVGIHLEGRIERDEIERAIRRLLLETEGEAIRERIQLLKEKVGRSVKQNGSAYQSLQNLINYISSF

SEQ ID NO: 70093 - protein, 323 aa, Arabidopsis thaliana
  peptide (1)..(323): Ceres Seq. ID no. 2143182
  misc_feature (1)..(321): Pfam Name: UDP-glucoronosyl and UDP-glucosyl transferase Pfam Description: UDP-glucoronosyl and UDP-glucosyl transferase
  misc_feature (1)..(323): Homolog of NCBI NO: 15239259 NR Description: glucuronosyl transferase-like protein; protein At5g05880.1 [Arabidopsis thaliana] >gi|10177561|dbj|BAB10793.1|
  misc_feature (1)..(323): Homolog of NCBI NO: 15239287 NR Description: glucuronosyl transferase-like protein; protein At5g05890.1 [Arabidopsis thaliana] >gi|10177562|dbj|BAB10794.1|
  misc_feature (1)..(323): Homolog of NCBI NO: 15239288 NR Description: glucuronosyl transferase-like protein; protein At5g05900.1 [Arabidopsis thaliana] >gi|10177563|dbj|BAB10795.1|
  misc_feature (1)..(321): Homolog of NCBI NO: 15239258 NR Description: glucuronosyl transferase-like protein; protein At5g05870.1 [Arabidopsis thaliana] >gi|10177560|dbj|BAB10792.1|
  misc_feature (1)..(320): Homolog of NCBI NO: 15239257 NR Description: glucuronosyl transferase-like protein; protein At5g05860.1, supported by cDNA: gi_15010631 [Arabidopsis >gi|15010632|gb|AAK73975.1| AT5g05860/MJJ3_28 [Arabidopsis
  misc_feature (1)..(323): Homolog of NCBI NO: 15229731 NR Description: glucosyl transferase, putative; protein id: [Arabidopsis thaliana] >gi|12321874|gb|AAG50970.1|AC073395_12
  misc_feature (1)..(323): Homolog of NCBI NO: 26452976 NR Description: unknown protein [Arabidopsis thaliana]
  misc_feature (1)..(323): Homolog of NCBI NO: 15228174 NR Description: glucuronosyl transferase - like protein; protein
  misc_feature (1)..(322): Homolog of NCBI NO: 629669 NR Description: glucuronosyl transferase homolog,
  misc_feature (1)..(323): Homolog of NCBI NO: 21593451 NR Description: glucuronosyl transferase-like protein
MRLAFNTYKISFFRSHFVLPQLRREMFLPLQDSEQDDPVEKFPPLRKKDLLRILEADSVQGDSYSDMILEKTKASSGLIFMSCEELDQDSLSQSREDFKVPIFAIGPSHSHFPASSSSLFTPDETCIPWLDRQEDKSVIYVSIGSLVTINETELMEIAWGLSNSDQPFLWVVRVGSVNGTEWIEAIPEYFIKRLNEKGKIVKWAPQQEVLKHRAIGGFLTHNGWNSTVESVCEGVPMICLPFRWDQLLNARFVSDVWMVGIHLEGRIERDEIERAIRRLLLETEGEAIRERIQLLKEKVGRSVKQNGSAYQSLQNLINYISSF

SEQ ID NO: 70094 - DNA, 1362 bp, Arabidopsis thaliana
  misc_feature (1)..(1362): Ceres Seq. ID no. 2144864
  misc_feature: MA Experiment ID: 20000171 Result: Down-regulated in Transcription
  misc_feature: MA Experiment 20000171 PARAMETER Experiment Name: At_42deg_Heat_P Parameter: Age (day) Value: 14
  misc_feature: MA Experiment 20000171 PARAMETER Experiment Name: At_42deg_Heat_P Parameter: Organism Value: A. thaliana
  misc_feature: MA Experiment 20000171 PARAMETER Experiment Name: At_42deg_Heat_P Parameter: Plant Line Value: WS
  misc_feature: MA Experiment 20000171 PARAMETER Experiment Name: At_42deg_Heat_P Parameter: Temperature (deg C) Value: 42 vs. 22
  misc_feature: MA Experiment 20000171 PARAMETER Experiment Name: At_42deg_Heat_P Parameter: Timepoint (hr) Value: 1
  misc_feature: MA Experiment 20000171 PARAMETER Experiment Name: At_42deg_Heat_P Parameter: Tissue Value: Aerial
  misc_feature: MA Experiment ID: 20000173 Result: Down-regulated in Transcription
  misc_feature: MA Experiment 20000173 PARAMETER Experiment Name: At_42deg_Heat_P Parameter: Age (day) Value: 14
  misc_feature: MA Experiment 20000173 PARAMETER Experiment Name: At_42deg_Heat_P Parameter: Organism Value: A. thaliana
  misc_feature: MA Experiment 20000173 PARAMETER Experiment Name: At_42deg_Heat_P Parameter: Plant Line Value: WS
  misc_feature: MA Experiment 20000173 PARAMETER Experiment Name: At_42deg_Heat_P Parameter: Temperature (deg C) Value: 42 vs. 22
  misc_feature: MA Experiment 20000173 PARAMETER Experiment Name: At_42deg_Heat_P Parameter: Timepoint (hr) Value: 6
  misc_feature: MA Experiment 20000173 PARAMETER Experiment Name: At_42deg_Heat_P Parameter: Tissue Value: Aerial
  misc_feature: MA Experiment ID: 20000180 Result: Up-regulated in Transcription
  misc_feature: MA Experiment 20000180 PARAMETER Experiment Name: At_Germinating_Seeds_P Parameter: Age (hr) Value: 24 vs. 0
  misc_feature: MA Experiment 20000180 PARAMETER Experiment Name: At_Germinating_Seeds_P Parameter: Tissue Value: Germinating Seeds
  misc_feature: MA Experiment ID: 20000185 Result: Down-regulated in Transcription
  misc_feature: MA Experiment 20000185 PARAMETER Experiment Name: At_Roots__P Parameter: Age (day) Value: 7 vs. 21
  misc_feature: MA Experiment 20000185 PARAMETER Experiment Name: At_Roots__P Parameter: Organism Value: A. thaliana
  misc_feature: MA Experiment 20000185 PARAMETER Experiment Name: At_Roots__P Parameter: Tissue Value: Roots vs. Whole Plant
  misc_feature: MA Experiment ID: 20000227 Result: Up-regulated in Transcription
  misc_feature: MA Experiment 20000227 PARAMETER Experiment Name: At_Root-Tips-vs-Tops_P Parameter: Tissue Value: Root Tips vs. Root Tops
  misc_feature: MA Experiment ID: 20000265 Result: Up-regulated in Transcription
  misc_feature: MA Experiment 20000265 PARAMETER Experiment Name: At_Open_Flower_P Parameter: Age (day) Value: 21
  misc_feature: MA Experiment 20000265 PARAMETER Experiment Name: At_Open_Flower_P Parameter: Plant Line Value: WS
  misc_feature: MA Experiment 20000265 PARAMETER Experiment Name: At_Open_Flower_P Parameter: Tissue Value: Closed Flower vs. Whole Plant
  misc_feature: MA Experiment ID: 20000286 Result: Up-regulated in Transcription
  misc_feature: MA Experiment 20000286 PARAMETER Experiment Name: At_Open_Flower_P Parameter: Age (day) Value: 21
  misc_feature: MA Experiment 20000286 PARAMETER Experiment Name: At_Open_Flower_P Parameter: Plant Line Value: WS
  misc_feature: MA Experiment 20000286 PARAMETER Experiment Name: At_Open_Flower_P Parameter: Tissue Value: Half Open vs. Whole Plant
  misc_feature: MA Experiment ID: 20000436 Result: Down-regulated in Transcription
  misc_feature: MA Experiment 20000436 PARAMETER Experiment Name: At_Drought_P Parameter: Age (day) Value: 7
  misc_feature: MA Experiment 20000436 PARAMETER Experiment Name: At_Drought_P Parameter: Organism Value: A. thaliana
  misc_feature: MA Experiment 20000436 PARAMETER Experiment Name: At_Drought_P Parameter: Plant Line Value: WS
  misc_feature: MA Experiment 20000436 PARAMETER Experiment Name: At_Drought_P Parameter: Timepoint (hr) Value: 12
  misc_feature: MA Experiment 20000436 PARAMETER Experiment Name: At_Drought_P Parameter: Tissue Value: Whole Plant
  misc_feature: MA Experiment 20000436 PARAMETER Experiment Name: At_Drought_P Parameter: Treatment Value: Drought vs. No Drought
  misc_feature: MA Experiment ID: 20000437 Result: Down-regulated in Transcription
  misc_feature: MA Experiment 20000437 PARAMETER Experiment Name: At_Drought_P Parameter: Age (day) Value: 8
  misc_feature: MA Experiment 20000437 PARAMETER Experiment Name: At_Drought_P Parameter: Organism Value: A. thaliana
  misc_feature: MA Experiment 20000437 PARAMETER Experiment Name: At_Drought_P Parameter: Plant Line Value: WS
  misc_feature: MA Experiment 20000437 PARAMETER Experiment Name: At_Drought_P Parameter: Timepoint (hr) Value: 24
  misc_feature: MA Experiment 20000437 PARAMETER Experiment Name: At_Drought_P Parameter: Tissue Value: Whole Plant
  misc_feature: MA Experiment 20000437 PARAMETER Experiment Name: At_Drought_P Parameter: Treatment Value: Drought vs. No Drought
  misc_feature: MA Experiment ID: 20000438 Result: Up-regulated in Transcription
  misc_feature: MA Experiment 20000438 PARAMETER Experiment Name: At_Shoots__P Parameter: Age (day) Value: 14
  misc_feature: MA Experiment 20000438 PARAMETER Experiment Name: At_Shoots__P Parameter: Tissue Value: Shoots vs. Whole Plant
  misc_feature: MA Experiment ID: 20000439 Result: Down-regulated in Transcription
  misc_feature: MA Experiment 20000439 PARAMETER Experiment Name: At_Roots__P Parameter: Age (day) Value: 14 vs. 21
  misc_feature: MA Experiment 20000439 PARAMETER Experiment Name: At_Roots__P Parameter: Organism Value: A. thaliana
  misc_feature: MA Experiment 20000439 PARAMETER Experiment Name: At_Roots__P Parameter: Tissue Value: Roots vs. Whole Plant
  misc_feature: MA Experiment ID: 20000573 Result: Down-regulated in Transcription
  misc_feature: MA Experiment 20000573 PARAMETER Experiment Name: At_100uM_ABA_Mutants__P Parameter: Organism Value: A. thaliana
  misc_feature: MA Experiment 20000573 PARAMETER Experiment Name: At_100uM_ABA_Mutants__P Parameter: Plant Line Value: CS22 vs. Ler wt
  misc_feature: MA Experiment 20000573 PARAMETER Experiment Name: At_100uM_ABA_Mutants__P Parameter: Timepoint (hr) Value: N/A
  misc_feature: MA Experiment 20000573 PARAMETER Experiment Name: At_100uM_ABA_Mutants__P Parameter: Tissue Value: Whole Plant
  misc_feature: MA Experiment 20000573 PARAMETER Experiment Name: At_100uM_ABA_Mutants__P Parameter: Treatment Value: None
  misc_feature: MA Experiment ID: 20001248 Result: Down-regulated in Transcription
  misc_feature: MA Experiment 20001248 PARAMETER Experiment Name: At_Far-red-induction_P Parameter: Age (day) Value: 7
  misc_feature: MA Experiment 20001248 PARAMETER Experiment Name: At_Far-red-induction_P Parameter: Light Value: Far-red vs. White
  misc_feature: MA Experiment 20001248 PARAMETER Experiment Name: At_Far-red-induction_P Parameter: Organism Value: A. thaliana
  misc_feature: MA Experiment 20001248 PARAMETER Experiment Name: At_Far-red-induction_P Parameter: Plant Line Value: Columbia
  misc_feature: MA Experiment 20001248 PARAMETER Experiment Name: At_Far-red-induction_P Parameter: Timepoint (hr) Value: 4
  misc_feature: MA Experiment 20001248 PARAMETER Experiment Name: At_Far-red-induction_P Parameter: Tissue Value: Whole Plant
  misc_feature: MA Experiment ID: 20001450 Result: Down-regulated in Transcription
  misc_feature: MA Experiment 20001450 PARAMETER Experiment Name: At_Far-red-induction_P Parameter: Age (day) Value: 7
  misc_feature: MA Experiment 20001450 PARAMETER Experiment Name: At_Far-red-induction_P Parameter: Light Value: Far-red vs. White
  misc_feature: MA Experiment 20001450 PARAMETER Experiment Name: At_Far-red-induction_P Parameter: Organism Value: A. thaliana
  misc_feature: MA Experiment 20001450 PARAMETER Experiment Name: At_Far-red-induction_P Parameter: Plant Line Value: Columbia
  misc_feature: MA Experiment 20001450 PARAMETER Experiment Name: At_Far-red-induction_P Parameter: Timepoint (hr) Value: 8
  misc_feature: MA Experiment 20001450 PARAMETER Experiment Name: At_Far-red-induction_P Parameter: Tissue Value: Whole Plant
  misc_feature: MA Experiment ID: 20001451 Result: Down-regulated in Transcription
  misc_feature: MA Experiment 20001451 PARAMETER Experiment Name: At_Far-red-induction_P Parameter: Age (day) Value: 7
  misc_feature: MA Experiment 20001451 PARAMETER Experiment Name: At_Far-red-induction_P Parameter: Light Value: Far-red vs. White
  misc_feature: MA Experiment 20001451 PARAMETER Experiment Name: At_Far-red-induction_P Parameter: Organism Value: A. thaliana
  misc_feature: MA Experiment 20001451 PARAMETER Experiment Name: At_Far-red-induction_P Parameter: Plant Line Value: Columbia
  misc_feature: MA Experiment 20001451 PARAMETER Experiment Name: At_Far-red-induction_P Parameter: Timepoint (hr) Value: 24
  misc_feature: MA Experiment 20001451 PARAMETER Experiment Name: At_Far-red-induction_P Parameter: Tissue Value: Whole Plant
  misc_feature: MA Experiment ID: 20001557 Result: Down-regulated in Transcription
  misc_feature: MA Experiment 20001557 PARAMETER Experiment Name: At_Drought_Soil_Dry_P Parameter: Age (day) Value: 27
  misc_feature: MA Experiment 20001557 PARAMETER Experiment Name: At_Drought_Soil_Dry_P Parameter: Organism Value: A. thaliana
  misc_feature: MA Experiment 20001557 PARAMETER Experiment Name: At_Drought_Soil_Dry_P Parameter: Plant Line Value: WS
  misc_feature: MA Experiment 20001557 PARAMETER Experiment Name: At_Drought_Soil_Dry_P Parameter: Post Timepoint (hr) Value: 3
  misc_feature: MA Experiment 20001557 PARAMETER Experiment Name: At_Drought_Soil_Dry_P Parameter: Post-Treatment Value: Re-Water vs. No Drought
  misc_feature: MA Experiment 20001557 PARAMETER Experiment Name: At_Drought_Soil_Dry_P Parameter: Timepoint (day) Value: 13
  misc_feature: MA Experiment 20001557 PARAMETER Experiment Name: At_Drought_Soil_Dry_P Parameter: Treatment Value: Drought vs. No Drought
  misc_feature: MA Experiment ID: 20001757 Result: Up-regulated in Transcription
  misc_feature: MA Experiment 20001757 PARAMETER Experiment Name: At_50mM_NH4NO3_L-to-H_P Parameter: Timepoint (hr) Value: 6
  misc_feature: MA Experiment 20001757 PARAMETER Experiment Name: At_50mM_NH4NO3_L-to-H_P Parameter: Tissue Value: Leaf
  misc_feature: MA Experiment 20001757 PARAMETER Experiment Name: At_50mM_NH4NO3_L-to-H_P Parameter: Treatment Value: 50mM NH4NO3 vs 100mM Mannitol
  misc_feature: MA Experiment ID: 20001904 Result: Down-regulated in Transcription
  misc_feature: MA Experiment 20001904 PARAMETER Experiment Name: At_Drought_Reproduction_P Parameter: Age (day) Value: 37
  misc_feature: MA Experiment 20001904 PARAMETER Experiment Name: At_Drought_Reproduction_P Parameter: Organism Value: A. thaliana
  misc_feature: MA Experiment 20001904 PARAMETER Experiment Name: At_Drought_Reproduction_P Parameter: Plant Line Value: WS
  misc_feature: MA Experiment 20001904 PARAMETER Experiment Name: At_Drought_Reproduction_P Parameter: Timepoint (day) Value: 7
  misc_feature: MA Experiment 20001904 PARAMETER Experiment Name: At_Drought_Reproduction_P Parameter: Tissue Value: Rosettes
  misc_feature: MA Experiment 20001904 PARAMETER Experiment Name: At_Drought_Reproduction_P Parameter: Treatment Value: Drought vs. No Drought
atggaaaacaaaagccatagcaaccaccaccggtaccatcatctatcatcccggagccacgagcaaaaccagcgtggcctaatttcgataaatgccataatcatcattggcatctccattatctccatattcataatccttgcaattctcctaataatcattttacttcatcgacttaaatccgcaagagtcaaagcacaagaattatcttgcaaagaaagcttcaacaacatgaacaatggtggagcttccaccaactacagctacacttctagccctgatgacatcaagagagattgtctatactcaagaaacccaacatcgttcagacaattacccccacagacaaaaagttgtaggagaagccgagccgaaggagtagaagtgtacacatacaaggaattagagattgcaacaaataatttcagcgaggagaagaaaatcggaaatggagatgtgtacaaaggagtactaagtgatggaactgttgcggccattaaaaagcttcatatgtttaatgataatgctagtaaccaaaagcatgaagaacggtcctttaggcttgaggttgatcttcttagtcgattacaatgcccatatttggtggaattacttggatattgtgcagatcaaaaccataggatcctgatatatgaatttatgcctaatggtactgtggaacatcatctccacgatcataattttaagaatctaaaggatcgacctcaaccattagattggggagctcggcttaggatcgcccttgattgcgccagagccctagagtttcttcatgagaatacaatctctactgttatccaccggaacttcaagtgtaccaacattttgttggatcaaaataatcgagctaaagtttcagatttcggattagccaaaaccggatccgataaactaaacggtgagatttcaacaagggttattggcaccacaggatatcttgctccagagtatgcctctactggaaagcttactacaaaatcagatgtttatagttatggtattgtgttactacaactcttaacgggtcgcacaccgatcgattcaagacgtccacggggacaagatgtccttgtctcttgggctcttccaagactaaccaatagagagaaaattagtgaaatggtggatccaaccatgaaaggtcaatactcacaaaaagatcttattcaggtagcagccatagcagcagtgtgtgtgcaaccagaagcaagttatagaccgttgatgacggatgttgttcactcgctcattccccttgttaaagctttcaacaaaagtactgattcttctcggtttcctagccgtagagaaagcttgtcatttgatgatattatgccatga

SEQ ID NO: 70095 - protein, 453 aa, Arabidopsis thaliana
  peptide (1)..(453): Ceres Seq. ID no. 2144865
  misc_feature (94)..(453): Homolog of NCBI NO: 25405773 NR Description: hypothetical protein T22H22.21 [imported] - thaliana >gi|3776574|gb|AAC64891.1| Similar to T11J7.13
  misc_feature (1)..(93): Homolog of NCBI NO: 25405773 NR Description: hypothetical protein T22H22.21 [imported] - thaliana >gi|3776574|gb|AAC64891.1| Similar to T11J7.13
  misc_feature (122)..(453): Homolog of NCBI NO: 12322155 NR Description: protein kinase, putative [Arabidopsis thaliana]
  misc_feature (122)..(453): Homolog of NCBI NO: 15221910 NR Description: protein kinase, putative; protein id: At1g54820.1
  misc_feature (126)..(428): Homolog of NCBI NO: 11358842 NR Description: serine/threonine-specific protein kinase-like
  misc_feature (188)..(428): Homolog of NCBI NO: 30694859 NR Description: protein kinase family [Arabidopsis thaliana]
  misc_feature (188)..(428): Homolog of NCBI NO: 26449989 NR Description: putative serine/threonine-specific protein kinase
  misc_feature (131)..(445): Homolog of NCBI NO: 7488203 NR Description: probable serine/threonine-specific protein kinase
  misc_feature (131)..(445): Homolog of NCBI NO: 30679031 NR Description: protein kinase family [Arabidopsis thaliana]
  misc_feature (110)..(445): Homolog of NCBI NO: 34902828 NR Description: unnamed protein product [Oryza sativa (japonica group)] >gi|6498464|dbj|BAA87853.1| unnamed protein product
MENKSHSNHHRYHHLSSRSHEQNQRGLISINAIIIIGISIISIFIILAILLIIILLHRLKSARVKAQELSCKESFNNMNNGGASTNYSYTSSPDDIKRDCLYSRNPTSFRQLPPQTKSCRRSRAEGVEVYTYKELEIATNNFSEEKKIGNGDVYKGVLSDGTVAAIKKLHMFNDNASNQKHEERSFRLEVDLLSRLQCPYLVELLGYCADQNHRILIYEFMPNGTVEHHLHDHNFKNLKDRPQPLDWGARLRIALDCARALEFLHENTISTVIHRNFKCTNILLDQNNRAKVSDFGLAKTGSDKLNGEISTRVIGTTGYLAPEYASTGKLTTKSDVYSYGIVLLQLLTGRTPIDSRRPRGQDVLVSWALPRLTNREKISEMVDPTMKGQYSQKDLIQVAAIAAVCVQPEASYRPLMTDVVHSLIPLVKAFNKSTDSSRFPSRRESLSFDDIMP

SEQ ID NO: 70096 - protein, 376 aa, Arabidopsis thaliana
  peptide (1)..(376): Ceres Seq. ID no. 2144866
  misc_feature (17)..(376): Homolog of NCBI NO: 25405773 NR Description: hypothetical protein T22H22.21 [imported] - thaliana >gi|3776574|gb|AAC64891.1| Similar to T11J7.13
  misc_feature (1)..(16): Homolog of NCBI NO: 25405773 NR Description: hypothetical protein T22H22.21 [imported] - thaliana >gi|3776574|gb|AAC64891.1| Similar to T11J7.13
  misc_feature (45)..(376): Homolog of NCBI NO: 12322155 NR Description: protein kinase, putative [Arabidopsis thaliana]
  misc_feature (45)..(376): Homolog of NCBI NO: 15221910 NR Description: protein kinase, putative; protein id: At1g54820.1
  misc_feature (49)..(351): Homolog of NCBI NO: 11358842 NR Description: serine/threonine-specific protein kinase-like
  misc_feature (111)..(351): Homolog of NCBI NO: 30694859 NR Description: protein kinase family [Arabidopsis thaliana]
  misc_feature (111)..(351): Homolog of NCBI NO: 26449989 NR Description: putative serine/threonine-specific protein kinase
  misc_feature (54)..(368): Homolog of NCBI NO: 7488203 NR Description: probable serine/threonine-specific protein kinase
  misc_feature (54)..(368): Homolog of NCBI NO: 30679031 NR Description: protein kinase family [Arabidopsis thaliana]
  misc_feature (33)..(368): Homolog of NCBI NO: 34902828 NR Description: unnamed protein product [Oryza sativa (japonica group)] >gi|6498464|dbj|BAA87853.1| unnamed protein product
MNNGGASTNYSYTSSPDDIKRDCLYSRNPTSFRQLPPQTKSCRRSRAEGVEVYTYKELEIATNNFSEEKKIGNGDVYKGVLSDGTVAAIKKLHMFNDNASNQKHEERSFRLEVDLLSRLQCPYLVELLGYCADQNHRILIYEFMPNGTVEHHLHDHNFKNLKDRPQPLDWGARLRIALDCARALEFLHENTISTVIHRNFKCTNILLDQNNRAKVSDFGLAKTGSDKLNGEISTRVIGTTGYLAPEYASTGKLTTKSDVYSYGIVLLQLLTGRTPIDSRRPRGQDVLVSWALPRLTNREKISEMVDPTMKGQYSQKDLIQVAAIAAVCVQPEASYRPLMTDVVHSLIPLVKAFNKSTDSSRFPSRRESLSFDDIMP

SEQ ID NO: 70097 - protein, 283 aa, Arabidopsis thaliana
  peptide (1)..(283): Ceres Seq. ID no. 2144867
  misc_feature (1)..(283): Homolog of NCBI NO: 25405773 NR Description: hypothetical protein T22H22.21 [imported] - thaliana >gi|3776574|gb|AAC64891.1| Similar to T11J7.13
  misc_feature (1)..(283): Homolog of NCBI NO: 12322155 NR Description: protein kinase, putative [Arabidopsis thaliana]
  misc_feature (1)..(283): Homolog of NCBI NO: 15221910 NR Description: protein kinase, putative; protein id: At1g54820.1
  misc_feature (1)..(258): Homolog of NCBI NO: 11358842 NR Description: serine/threonine-specific protein kinase-like
  misc_feature (18)..(258): Homolog of NCBI NO: 30694859 NR Description: protein kinase family [Arabidopsis thaliana]
  misc_feature (18)..(258): Homolog of NCBI NO: 26449989 NR Description: putative serine/threonine-specific protein kinase
  misc_feature (1)..(275): Homolog of NCBI NO: 7488203 NR Description: probable serine/threonine-specific protein kinase
  misc_feature (1)..(275): Homolog of NCBI NO: 30679031 NR Description: protein kinase family [Arabidopsis thaliana]
  misc_feature (1)..(275): Homolog of NCBI NO: 34902828 NR Description: unnamed protein product [Oryza sativa (japonica group)] >gi|6498464|dbj|BAA87853.1| unnamed protein product
  misc_feature (1)..(253): Homolog of NCBI NO: 11259782 NR Description: protein kinase-like - Arabidopsis thaliana
MFNDNASNQKHEERSFRLEVDLLSRLQCPYLVELLGYCADQNHRILIYEFMPNGTVEHHLHDHNFKNLKDRPQPLDWGARLRIALDCARALEFLHENTISTVIHRNFKCTNILLDQNNRAKVSDFGLAKTGSDKLNGEISTRVIGTTGYLAPEYASTGKLTTKSDVYSYGIVLLQLLTGRTPIDSRRPRGQDVLVSWALPRLTNREKISEMVDPTMKGQYSQKDLIQVAAIAAVCVQPEASYRPLMTDVVHSLIPLVKAFNKSTDSSRFPSRRESLSFDDIMP

SEQ ID NO: 70098 - DNA, 3915 bp, Arabidopsis thaliana
  misc_feature (1)..(3915): Ceres Seq. ID no. 2148441
  misc_feature: MA Experiment ID: 20000173 Result: Down-regulated in Transcription
  misc_feature: MA Experiment 20000173 PARAMETER Experiment Name: At_42deg_Heat_P Parameter: Age (day) Value: 14
  misc_feature: MA Experiment 20000173 PARAMETER Experiment Name: At_42deg_Heat_P Parameter: Organism Value: A. thaliana
  misc_feature: MA Experiment 20000173 PARAMETER Experiment Name: At_42deg_Heat_P Parameter: Plant Line Value: WS
  misc_feature: MA Experiment 20000173 PARAMETER Experiment Name: At_42deg_Heat_P Parameter: Temperature (deg C) Value: 42 vs. 22
  misc_feature: MA Experiment 20000173 PARAMETER Experiment Name: At_42deg_Heat_P Parameter: Timepoint (hr) Value: 6
  misc_feature: MA Experiment 20000173 PARAMETER Experiment Name: At_42deg_Heat_P Parameter: Tissue Value: Aerial
  misc_feature: MA Experiment ID: 20000794 Result: Up-regulated in Transcription
  misc_feature: MA Experiment 20000794 PARAMETER Experiment Name: At_Petals_P Parameter: Age (day) Value: 23-25 days
  misc_feature: MA Experiment 20000794 PARAMETER Experiment Name: At_Petals_P Parameter: Plant Line Value: WS
  misc_feature: MA Experiment 20000794 PARAMETER Experiment Name: At_Petals_P Parameter: Tissue Value: Petals vs. Whole plant
  misc_feature: MA Experiment ID: 20001905 Result: Down-regulated in Transcription
  misc_feature: MA Experiment 20001905 PARAMETER Experiment Name: At_Drought_Reproduction_P Parameter: Age (day) Value: 40
  misc_feature: MA Experiment 20001905 PARAMETER Experiment Name: At_Drought_Reproduction_P Parameter: Organism Value: A. thaliana
  misc_feature: MA Experiment 20001905 PARAMETER Experiment Name: At_Drought_Reproduction_P Parameter: Plant Line Value: WS
  misc_feature: MA Experiment 20001905 PARAMETER Experiment Name: At_Drought_Reproduction_P Parameter: Timepoint (day) Value: 10
  misc_feature: MA Experiment 20001905 PARAMETER Experiment Name: At_Drought_Reproduction_P Parameter: Tissue Value: Rosettes
  misc_feature: MA Experiment 20001905 PARAMETER Experiment Name: At_Drought_Reproduction_P Parameter: Treatment Value: Drought vs. No Drought
atggtattcaagaacaaactcttcttctcttcgaagaaatctggatcttctagtcccgatagctctaatagtcccagatctgttggctccaactctccgatacgatcagataagaagaagtctaaatccgcttccaaggatgaacctccgatccctattcctggatttgttggagttggttgcaagcagacgcagattaaagatggtttgaagaagaaggatggttcatctaagggtaaacaactttcatctgaagttcaagctcactctattggaaaatcgaacttgtctcctagttccgaggtgaagaaaccacctccgccggaagtgaaggaaggacctgcttttgtttctccaatcatggcttcgtctcttgggttgaaccggattaagacgagatccggacctttgccacaggaaagggttttcaattataggaatgatccggctacgagcaatttgtcgaagatgggtgctgatggtggtgacttgggctcgggttcagctacttctggctctggtagtggcaatagaaagaaagaagctgggagtagcaagctagggttagaagagaacatggatcgcactcgaccaagtgacaataagagtgatcgtgatagtttgtctcctgatacaggaccaccgaggagcctcagccctactttgccgccatcaggatctcgattgcagaatgtagcatcctcatcgggaactggtcgctctgagatgtcatccggtcgttctggccctctaagaaattcagacttttgcaccccagagaattcatatgaatgggaaaatcccaaagagtcagaatcgcctcgttatcaagccttacttcgtatgaccagtgctccacgaaagaggtttcctggtgacatcaaaagcttttctcatgagttgaactcaaaaggtgtacgtccctttccattatggaagcctcgtaggtcgaacaatgtggagaatctaatcgtctgtcttttccaggaagtattgaatctgattcgggcaaaatttgagaaagcaaaggaagaagtaaactctgaccttgcagtatttgcagcggacctggtgggagttcttgagaaaaatgcagaaagccatcctgagtgggaggaaacatttgaagacttgctaattttggctcgaagttgtgctatgactactcctggagatttctggcttcagtgtgaaggcattgttcaggacttagatgatagacgtcaagagcttcccccgggcgtcctcaagcagcttcatactcggatgctttttatccttaccagatgtactagattacttcagtttcataaggaaagctggggggaggaggaacaagttgtacaactacgtcagtcaagagtcttgcattctatagagaaaataccgccgagtggagcgggaaggagttacagtgctgcaaaggtaccatctaccaagaaagcttatagtcaggagcagcatggtttggactggaaggaagacgctgttgtacgctcagttccccctcttgctcctcctgaaaattatgctataaaggaatctgaatctcctgcaaacattgatagaatgtcttcctggaaaaaacttccatctccagcactgaaaactgtgaaagaagcgccagcgtcagaagagcagaatgatagcaaagttgaacctccaaatatagttgggagtcgacaaggtagggatgatgccgctgttgctattctcaactttcctccagcaaaagattctcatgaacactcctccaagcatcggcacaatatttcttggggttactggggggaacaaccccttatttcggaggaaagttcaataatgtgccgtatctgtgaggaggaagttccgacaactcatgtggaagatcactctagggtttgtacattggctgataaatatgaccagaaaggactgagtgttgatgagcgactgatggcagttgctggtacacttgacaagatagcagagaccttcaggcataaggatagcctagcagccgcagagagcccagatggtatgaaagtatccaattcacatctgactgaagaatctgatgttctctctccaaggttgagtgattggtcgcgaaaaggatcagaagacatgcttgactgttttccggaggctgataattcaatttttatggatgatctgagaggtttaccgctaatgtcatgtagaacccgttttggtcccaagtctgatcaaggtatgacaacttcatctgccagtagcatgactcctagatccccgattccgacccctaggcctgatccaattgaacagatattaggaggcaagggtacattccacgatcaagatgatattccacagatgagtgaacttgctgacattgcaaaatgtgcagcagatgccattccgggtgatgatcaatccattccattcctactgtcttgtcttgaagatctaagggttgtcatagaccgcagaaagtttgatgcacttacagtagaaacatttgggactcgcatagaaaagttgatccgtgagaaatatgtgcatatgtgtgagcttatggatgatgaaaaagttgatctactaagcactgtaattgatgaagatgctcccttagaagatgatgttgttcggagcttgaggaccagcccagtacatccgcgagatcgcacatccattgatgattttgagatcataaaaccaataagtcggggagcttttgggcgagtttttttagcgaaaaagaggacaacaggagatctattcgcaatcaaggttctgaaaaaggcagatatgattcgtaagaatgctgttgaaagtatacttgctgaacgtgatatattgatcaacgttcgcaatccttttgtggttcgtttcttctattctttcacgtgtcgtgacaacctgtatttggtgatggagtatctgaatggaggggatctgtattcgttgttgagaaatttaggttgcttagaagaagatattgtccgtgtatatattgctgaagttgtccttgctttggaatatttgcattctgagggtgttgttcaccgtgatttgaagccggataatttgttgattgcgcatgatggtcatataaagttaacagatttcgggctctctaaagttggtctcatcaacagcacagatgatctggctggtcctgctgtaagtgggacgtctctgcttgatgaggaggaatcacgattagcggcatctgaggaacaacttgaaaggcgcaagaaacggtctgctgtgggtactcctgactacttagcgccagaaattcttttagggacaggacatggtgcaactgcggattggtggtctgttggcatcattctgtttgaactcattgtgggaattccacccttcaatgcggaacatcctcagcaaatatttgataatattctcaaccgtaagataccatggcctcatgttccagaagaaatgagtgctgaagcccatgatataatagaccgatttttaacagaagatccacatcagagacttggagctagaggggcagctgaggtcaagcagcacatcttctttaaagacatcaactgggacacactagcaaggcaaaaggctgcatttgttccggcttcagagagtgcaattgacacaagttacttcagaagtcgctactcgtggaacacatcagatgagcaatttttcccaagcggtgaggttccagattatagtgatgctgatagcatgactaacagcagtggttgctcgagcaatcatcatgaagaaggggaggctgaagaatgcgaaggtcatgcagagtttgagtctggcatacctgtagattactctttcagtaatttctcgtttaagaacctctctcagttggcgtctatcaactatgatcttttatccaaaggctggaaagatgagccacaacaaattccgcatcacaagtaa

SEQ ID NO: 70099 - protein, 1304 aa, Arabidopsis thaliana
  peptide (1)..(1304): Ceres Seq. ID no. 2148442
  misc_feature (890)..(1179): Pfam Name: Protein kinase domain Pfam Description: Protein kinase domain
  misc_feature (881)..(1041): Homolog of NCBI NO: 28829453 NR Description: similar to Dictyostelium discoideum (Slime mold).
  misc_feature (1075)..(1218): Homolog of NCBI NO: 28829453 NR Description: similar to Dictyostelium discoideum (Slime mold).
  misc_feature (561)..(653): Homolog of NCBI NO: 28829453 NR Description: similar to Dictyostelium discoideum (Slime mold).
  misc_feature (539)..(1237): Homolog of NCBI NO: 15219539 NR Description: hypothetical protein; protein id: At1g45160.1
  misc_feature (1216)..(1297): Homolog of NCBI NO: 15219539 NR Description: hypothetical protein; protein id: At1g45160.1
  misc_feature (951)..(1276): Homolog of NCBI NO: 8778706 NR Description: T1N15.10 [Arabidopsis thaliana]
  misc_feature (177)..(463): Homolog of NCBI NO: 15219539 NR Description: hypothetical protein; protein id: At1g45160.1
  misc_feature (539)..(1295): Homolog of NCBI NO: 15241795 NR Description: IRE (root hair elongation); protein id: [Arabidopsis thaliana] >gi|6729346|dbj|BAA89783.1| IRE
  misc_feature (1052)..(1212): Homolog of NCBI NO: 28829165 NR Description: similar to cell wall biosynthesis kinase; Cbk1p
  misc_feature (886)..(1041): Homolog of NCBI NO: 28829165 NR Description: similar to cell wall biosynthesis kinase; Cbk1p
MVFKNKLFFSSKKSGSSSPDSSNSPRSVGSNSPIRSDKKKSKSASKDEPPIPIPGFVGVGCKQTQIKDGLKKKDGSSKGKQLSSEVQAHSIGKSNLSPSSEVKKPPPPEVKEGPAFVSPIMASSLGLNRIKTRSGPLPQERVFNYRNDPATSNLSKMGADGGDLGSGSATSGSGSGNRKKEAGSSKLGLEENMDRTRPSDNKSDRDSLSPDTGPPRSLSPTLPPSGSRLQNVASSSGTGRSEMSSGRSGPLRNSDFCTPENSYEWENPKESESPRYQALLRMTSAPRKRFPGDIKSFSHELNSKGVRPFPLWKPRRSNNVENLIVCLFQEVLNLIRAKFEKAKEEVNSDLAVFAADLVGVLEKNAESHPEWEETFEDLLILARSCAMTTPGDFWLQCEGIVQDLDDRRQELPPGVLKQLHTRMLFILTRCTRLLQFHKESWGEEEQVVQLRQSRVLHSIEKIPPSGAGRSYSAAKVPSTKKAYSQEQHGLDWKEDAVVRSVPPLAPPENYAIKESESPANIDRMSSWKKLPSPALKTVKEAPASEEQNDSKVEPPNIVGSRQGRDDAAVAILNFPPAKDSHEHSSKHRHNISWGYWGEQPLISEESSIMCRICEEEVPTTHVEDHSRVCTLADKYDQKGLSVDERLMAVAGTLDKIAETFRHKDSLAAAESPDGMKVSNSHLTEESDVLSPRLSDWSRKGSEDMLDCFPEADNSIFMDDLRGLPLMSCRTRFGPKSDQGMTTSSASSMTPRSPIPTPRPDPIEQILGGKGTFHDQDDIPQMSELADIAKCAADAIPGDDQSIPFLLSCLEDLRVVIDRRKFDALTVETFGTRIEKLIREKYVHMCELMDDEKVDLLSTVIDEDAPLEDDVVRSLRTSPVHPRDRTSIDDFEIIKPISRGAFGRVFLAKKRTTGDLFAIKVLKKADMIRKNAVESILAERDILINVRNPFVVRFFYSFTCRDNLYLVMEYLNGGDLYSLLRNLGCLEEDIVRVYIAEVVLALEYLHSEGVVHRDLKPDNLLIAHDGHIKLTDFGLSKVGLINSTDDLAGPAVSGTSLLDEEESRLAASEEQLERRKKRSAVGTPDYLAPEILLGTGHGATADWWSVGIILFELIVGIPPFNAEHPQQIFDNILNRKIPWPHVPEEMSAEAHDIIDRFLTEDPHQRLGARGAAEVKQHIFFKDINWDTLARQKAAFVPASESAIDTSYFRSRYSWNTSDEQFFPSGEVPDYSDADSMTNSSGCSSNHHEEGEAEECEGHAEFESGIPVDYSFSNFSFKNLSQLASINYDLLSKGWKDEPQQIPHHK

SEQ ID NO: 70100 - protein, 1184 aa, Arabidopsis thaliana
  peptide (1)..(1184): Ceres Seq. ID no. 2148443
  misc_feature (770)..(1059): Pfam Name: Protein kinase domain Pfam Description: Protein kinase domain
  misc_feature (419)..(1175): Homolog of NCBI NO: 15241795 NR Description: IRE (root hair elongation); protein id: [Arabidopsis thaliana] >gi|6729346|dbj|BAA89783.1| IRE
  misc_feature (419)..(1117): Homolog of NCBI NO: 15219539 NR Description: hypothetical protein; protein id: At1g45160.1
  misc_feature (57)..(343): Homolog of NCBI NO: 15219539 NR Description: hypothetical protein; protein id: At1g45160.1
  misc_feature (1096)..(1177): Homolog of NCBI NO: 15219539 NR Description: hypothetical protein; protein id: At1g45160.1
  misc_feature (831)..(1156): Homolog of NCBI NO: 8778706 NR Description: T1N15.10 [Arabidopsis thaliana]
  misc_feature (761)..(921): Homolog of NCBI NO: 28829453 NR Description: similar to Dictyostelium discoideum (Slime mold).
  misc_feature (955)..(1098): Homolog of NCBI NO: 28829453 NR Description: similar to Dictyostelium discoideum (Slime mold).
  misc_feature (441)..(533): Homolog of NCBI NO: 28829453 NR Description: similar to Dictyostelium discoideum (Slime mold).
  misc_feature (932)..(1092): Homolog of NCBI NO: 28829165 NR Description: similar to cell wall biosynthesis kinase; Cbk1p
  misc_feature (766)..(921): Homolog of NCBI NO: 28829165 NR Description: similar to cell wall biosynthesis kinase; Cbk1p
MASSLGLNRIKTRSGPLPQERVFNYRNDPATSNLSKMGADGGDLGSGSATSGSGSGNRKKEAGSSKLGLEENMDRTRPSDNKSDRDSLSPDTGPPRSLSPTLPPSGSRLQNVASSSGTGRSEMSSGRSGPLRNSDFCTPENSYEWENPKESESPRYQALLRMTSAPRKRFPGDIKSFSHELNSKGVRPFPLWKPRRSNNVENLIVCLFQEVLNLIRAKFEKAKEEVNSDLAVFAADLVGVLEKNAESHPEWEETFEDLLILARSCAMTTPGDFWLQCEGIVQDLDDRRQELPPGVLKQLHTRMLFILTRCTRLLQFHKESWGEEEQVVQLRQSRVLHSIEKIPPSGAGRSYSAAKVPSTKKAYSQEQHGLDWKEDAVVRSVPPLAPPENYAIKESESPANIDRMSSWKKLPSPALKTVKEAPASEEQNDSKVEPPNIVGSRQGRDDAAVAILNFPPAKDSHEHSSKHRHNISWGYWGEQPLISEESSIMCRICEEEVPTTHVEDHSRVCTLADKYDQKGLSVDERLMAVAGTLDKIAETFRHKDSLAAAESPDGMKVSNSHLTEESDVLSPRLSDWSRKGSEDMLDCFPEADNSIFMDDLRGLPLMSCRTRFGPKSDQGMTTSSASSMTPRSPIPTPRPDPIEQILGGKGTFHDQDDIPQMSELADIAKCAADAIPGDDQSIPFLLSCLEDLRVVIDRRKFDALTVETFGTRIEKLIREKYVHMCELMDDEKVDLLSTVIDEDAPLEDDVVRSLRTSPVHPRDRTSIDDFEIIKPISRGAFGRVFLAKKRTTGDLFAIKVLKKADMIRKNAVESILAERDILINVRNPFVVRFFYSFTCRDNLYLVMEYLNGGDLYSLLRNLGCLEEDIVRVYIAEVVLALEYLHSEGVVHRDLKPDNLLIAHDGHIKLTDFGLSKVGLINSTDDLAGPAVSGTSLLDEEESRLAASEEQLERRKKRSAVGTPDYLAPEILLGTGHGATADWWSVGIILFELIVGIPPFNAEHPQQIFDNILNRKIPWPHVPEEMSAEAHDIIDRFLTEDPHQRLGARGAAEVKQHIFFKDINWDTLARQKAAFVPASESAIDTSYFRSRYSWNTSDEQFFPSGEVPDYSDADSMTNSSGCSSNHHEEGEAEECEGHAEFESGIPVDYSFSNFSFKNLSQLASINYDLLSKGWKDEPQQIPHHK

SEQ ID NO: 70101 - protein, 1148 aa, Arabidopsis thaliana
  peptide (1)..(1148): Ceres Seq. ID no. 2148444
  misc_feature (734)..(1023): Pfam Name: Protein kinase domain Pfam Description: Protein kinase domain
  misc_feature (383)..(1139): Homolog of NCBI NO: 15241795 NR Description: IRE (root hair elongation); protein id: [Arabidopsis thaliana] >gi|6729346|dbj|BAA89783.1| IRE
  misc_feature (383)..(1081): Homolog of NCBI NO: 15219539 NR Description: hypothetical protein; protein id: At1g45160.1
  misc_feature (21)..(307): Homolog of NCBI NO: 15219539 NR Description: hypothetical protein; protein id: At1g45160.1
  misc_feature (1060)..(1141): Homolog of NCBI NO: 15219539 NR Description: hypothetical protein; protein id: At1g45160.1
  misc_feature (795)..(1120): Homolog of NCBI NO: 8778706 NR Description: T1N15.10 [Arabidopsis thaliana]
  misc_feature (725)..(885): Homolog of NCBI NO: 28829453 NR Description: similar to Dictyostelium discoideum (Slime mold).
  misc_feature (919)..(1062): Homolog of NCBI NO: 28829453 NR Description: similar to Dictyostelium discoideum (Slime mold).
  misc_feature (405)..(497): Homolog of NCBI NO: 28829453 NR Description: similar to Dictyostelium discoideum (Slime mold).
  misc_feature (896)..(1056): Homolog of NCBI NO: 28829165 NR Description: similar to cell wall biosynthesis kinase; Cbk1p
  misc_feature (730)..(885): Homolog of NCBI NO: 28829165 NR Description: similar to cell wall biosynthesis kinase; Cbk1p
MGADGGDLGSGSATSGSGSGNRKKEAGSSKLGLEENMDRTRPSDNKSDRDSLSPDTGPPRSLSPTLPPSGSRLQNVASSSGTGRSEMSSGRSGPLRNSDFCTPENSYEWENPKESESPRYQALLRMTSAPRKRFPGDIKSFSHELNSKGVRPFPLWKPRRSNNVENLIVCLFQEVLNLIRAKFEKAKEEVNSDLAVFAADLVGVLEKNAESHPEWEETFEDLLILARSCAMTTPGDFWLQCEGIVQDLDDRRQELPPGVLKQLHTRMLFILTRCTRLLQFHKESWGEEEQVVQLRQSRVLHSIEKIPPSGAGRSYSAAKVPSTKKAYSQEQHGLDWKEDAVVRSVPPLAPPENYAIKESESPANIDRMSSWKKLPSPALKTVKEAPASEEQNDSKVEPPNIVGSRQGRDDAAVAILNFPPAKDSHEHSSKHRHNISWGYWGEQPLISEESSIMCRICEEEVPTTHVEDHSRVCTLADKYDQKGLSVDERLMAVAGTLDKIAETFRHKDSLAAAESPDGMKVSNSHLTEESDVLSPRLSDWSRKGSEDMLDCFPEADNSIFMDDLRGLPLMSCRTRFGPKSDQGMTTSSASSMTPRSPIPTPRPDPIEQILGGKGTFHDQDDIPQMSELADIAKCAADAIPGDDQSIPFLLSCLEDLRVVIDRRKFDALTVETFGTRIEKLIREKYVHMCELMDDEKVDLLSTVIDEDAPLEDDVVRSLRTSPVHPRDRTSIDDFEIIKPISRGAFGRVFLAKKRTTGDLFAIKVLKKADMIRKNAVESILAERDILINVRNPFVVRFFYSFTCRDNLYLVMEYLNGGDLYSLLRNLGCLEEDIVRVYIAEVVLALEYLHSEGVVHRDLKPDNLLIAHDGHIKLTDFGLSKVGLINSTDDLAGPAVSGTSLLDEEESRLAASEEQLERRKKRSAVGTPDYLAPEILLGTGHGATADWWSVGIILFELIVGIPPFNAEHPQQIFDNILNRKIPWPHVPEEMSAEAHDIIDRFLTEDPHQRLGARGAAEVKQHIFFKDINWDTLARQKAAFVPASESAIDTSYFRSRYSWNTSDEQFFPSGEVPDYSDADSMTNSSGCSSNHHEEGEAEECEGHAEFESGIPVDYSFSNFSFKNLSQLASINYDLLSKGWKDEPQQIPHHK

SEQ ID NO: 70102 - DNA, 636 bp, Arabidopsis thaliana
  misc_feature (1)..(636): Ceres Seq. ID no. 2148477
  misc_feature: MA Experiment ID: 20000173 Result: Down-regulated in Transcription
  misc_feature: MA Experiment 20000173 PARAMETER Experiment Name: At_42deg_Heat_P Parameter: Age (day) Value: 14
  misc_feature: MA Experiment 20000173 PARAMETER Experiment Name: At_42deg_Heat_P Parameter: Organism Value: A. thaliana
  misc_feature: MA Experiment 20000173 PARAMETER Experiment Name: At_42deg_Heat_P Parameter: Plant Line Value: WS
  misc_feature: MA Experiment 20000173 PARAMETER Experiment Name: At_42deg_Heat_P Parameter: Temperature (deg C) Value: 42 vs. 22
  misc_feature: MA Experiment 20000173 PARAMETER Experiment Name: At_42deg_Heat_P Parameter: Timepoint (hr) Value: 6
  misc_feature: MA Experiment 20000173 PARAMETER Experiment Name: At_42deg_Heat_P Parameter: Tissue Value: Aerial
  misc_feature: MA Experiment ID: 20000265 Result: Down-regulated in Transcription
  misc_feature: MA Experiment 20000265 PARAMETER Experiment Name: At_Open_Flower_P Parameter: Age (day) Value: 21
  misc_feature: MA Experiment 20000265 PARAMETER Experiment Name: At_Open_Flower_P Parameter: Plant Line Value: WS
  misc_feature: MA Experiment 20000265 PARAMETER Experiment Name: At_Open_Flower_P Parameter: Tissue Value: Closed Flower vs. Whole Plant
  misc_feature: MA Experiment ID: 20000286 Result: Down-regulated in Transcription
  misc_feature: MA Experiment 20000286 PARAMETER Experiment Name: At_Open_Flower_P Parameter: Age (day) Value: 21
  misc_feature: MA Experiment 20000286 PARAMETER Experiment Name: At_Open_Flower_P Parameter: Plant Line Value: WS
  misc_feature: MA Experiment 20000286 PARAMETER Experiment Name: At_Open_Flower_P Parameter: Tissue Value: Half Open vs. Whole Plant
  misc_feature: MA Experiment ID: 20000437 Result: Up-regulated in Transcription
  misc_feature: MA Experiment 20000437 PARAMETER Experiment Name: At_Drought_P Parameter: Age (day) Value: 8
  misc_feature: MA Experiment 20000437 PARAMETER Experiment Name: At_Drought_P Parameter: Organism Value: A. thaliana
  misc_feature: MA Experiment 20000437 PARAMETER Experiment Name: At_Drought_P Parameter: Plant Line Value: WS
  misc_feature: MA Experiment 20000437 PARAMETER Experiment Name: At_Drought_P Parameter: Timepoint (hr) Value: 24
  misc_feature: MA Experiment 20000437 PARAMETER Experiment Name: At_Drought_P Parameter: Tissue Value: Whole Plant
  misc_feature: MA Experiment 20000437 PARAMETER Experiment Name: At_Drought_P Parameter: Treatment Value: Drought vs. No Drought
  misc_feature: MA Experiment ID: 20000438 Result: Down-regulated in Transcription
  misc_feature: MA Experiment 20000438 PARAMETER Experiment Name: At_Shoots__P Parameter: Age (day) Value: 14
  misc_feature: MA Experiment 20000438 PARAMETER Experiment Name: At_Shoots__P Parameter: Tissue Value: Shoots vs. Whole Plant
  misc_feature: MA Experiment ID: 20000495 Result: Up-regulated in Transcription
  misc_feature: MA Experiment 20000495 PARAMETER Experiment Name: At_Guard_Cells_P Parameter: Harvest Date Value: 8/2/2002
  misc_feature: MA Experiment 20000495 PARAMETER Experiment Name: At_Guard_Cells_P Parameter: Organism Value: A. thaliana
  misc_feature: MA Experiment 20000495 PARAMETER Experiment Name: At_Guard_Cells_P Parameter: Tissue Value: Guard Cells vs. Leaves
  misc_feature: MA Experiment ID: 20001451 Result: Up-regulated in Transcription
  misc_feature: MA Experiment 20001451 PARAMETER Experiment Name: At_Far-red-induction_P Parameter: Age (day) Value: 7
  misc_feature: MA Experiment 20001451 PARAMETER Experiment Name: At_Far-red-induction_P Parameter: Light Value: Far-red vs. White
  misc_feature: MA Experiment 20001451 PARAMETER Experiment Name: At_Far-red-induction_P Parameter: Organism Value: A. thaliana
  misc_feature: MA Experiment 20001451 PARAMETER Experiment Name: At_Far-red-induction_P Parameter: Plant Line Value: Columbia
  misc_feature: MA Experiment 20001451 PARAMETER Experiment Name: At_Far-red-induction_P Parameter: Timepoint (hr) Value: 24
  misc_feature: MA Experiment 20001451 PARAMETER Experiment Name: At_Far-red-induction_P Parameter: Tissue Value: Whole Plant
  misc_feature: MA Experiment ID: 20001558 Result: Down-regulated in Transcription
  misc_feature: MA Experiment 20001558 PARAMETER Experiment Name: At_Drought_Soil_Dry_P Parameter: Age (day) Value: 27
  misc_feature: MA Experiment 20001558 PARAMETER Experiment Name: At_Drought_Soil_Dry_P Parameter: Organism Value: A. thaliana
  misc_feature: MA Experiment 20001558 PARAMETER Experiment Name: At_Drought_Soil_Dry_P Parameter: Plant Line Value: WS
  misc_feature: MA Experiment 20001558 PARAMETER Experiment Name: At_Drought_Soil_Dry_P Parameter: Post Timepoint (hr) Value: 6
  misc_feature: MA Experiment 20001558 PARAMETER Experiment Name: At_Drought_Soil_Dry_P Parameter: Post-Treatment Value: Re-Water vs. No Drought
  misc_feature: MA Experiment 20001558 PARAMETER Experiment Name: At_Drought_Soil_Dry_P Parameter: Timepoint (day) Value: 13
  misc_feature: MA Experiment 20001558 PARAMETER Experiment Name: At_Drought_Soil_Dry_P Parameter: Treatment Value: Drought vs. No Drought
  misc_feature: MA Experiment ID: 20001911 Result: Up-regulated in Transcription
  misc_feature: MA Experiment 20001911 PARAMETER Experiment Name: At_Drought_Reproduction_P Parameter: Age (day) Value: 40
  misc_feature: MA Experiment 20001911 PARAMETER Experiment Name: At_Drought_Reproduction_P Parameter: Organism Value: A. thaliana
  misc_feature: MA Experiment 20001911 PARAMETER Experiment Name: At_Drought_Reproduction_P Parameter: Plant Line Value: WS
  misc_feature: MA Experiment 20001911 PARAMETER Experiment Name: At_Drought_Reproduction_P Parameter: Timepoint (day) Value: 10
  misc_feature: MA Experiment 20001911 PARAMETER Experiment Name: At_Drought_Reproduction_P Parameter: Tissue Value: Flowers
  misc_feature: MA Experiment 20001911 PARAMETER Experiment Name: At_Drought_Reproduction_P Parameter: Treatment Value: Drought vs. No Drought
atgcaagatcctcatgtcccatcttctccaactatctcctccgtctcttcctccgatcttgatactgagtcaacaggatcgttcttccatgacagaagcatcacacttggaacgcttatgggatttagtttcactgcaactatgccgatgccatttagagcctcttcacgccgccacgtgtcaccttccgtcgcaatctcacgagcttctagctccaatgcaagacgcaaccaccagagaaagcgtcctccttcaaattcggctgagcctgagccgcatcgccgccgtaaatggtggcggttttgccgagatgacgatgacgacgccgccggaaatggaatccaccgtggaacaggagattcaaagcggtcatcgctcggggagtatctagaggtggaacggaggtttggagatgaagccgtttacaactccgccgaggcagagctagaggatgcggtggtggcacggtaccaagatcagcagccggtgatgggggagcgggcattgttcgctgacggaagggttcttcctccggcttcagctgaagtggttaccggagaaggaacgccggtagccacgtccctttgtagatttccggtatctttaaccggtatatgcagcggtggtggaggatga

SEQ ID NO: 70103 - protein, 211 aa, Arabidopsis thaliana
  peptide (1)..(211): Ceres Seq. ID no. 2148478
  misc_feature (1)..(211): Homolog of NCBI NO: 15229554 NR Description: hypothetical protein; protein id: At3g17950.1
MQDPHVPSSPTISSVSSSDLDTESTGSFFHDRSITLGTLMGFSFTATMPMPFRASSRRHVSPSVAISRASSSNARRNHQRKRPPSNSAEPEPHRRRKWWRFCRDDDDDAAGNGIHRGTGDSKRSSLGEYLEVERRFGDEAVYNSAEAELEDAVVARYQDQQPVMGERALFADGRVLPPASAEVVTGEGTPVATSLCRFPVSLTGICSGGGG

SEQ ID NO: 70104 - protein, 172 aa, Arabidopsis thaliana
  peptide (1)..(172): Ceres Seq. ID no. 2148479
  misc_feature (1)..(172): Homolog of NCBI NO: 15229554 NR Description: hypothetical protein; protein id: At3g17950.1
MGFSFTATMPMPFRASSRRHVSPSVAISRASSSNARRNHQRKRPPSNSAEPEPHRRRKWWRFCRDDDDDAAGNGIHRGTGDSKRSSLGEYLEVERRFGDEAVYNSAEAELEDAVVARYQDQQPVMGERALFADGRVLPPASAEVVTGEGTPVATSLCRFPVSLTGICSGGGG

SEQ ID NO: 70105 - protein, 164 aa, Arabidopsis thaliana
  peptide (1)..(164): Ceres Seq. ID no. 2148480
  misc_feature (1)..(164): Homolog of NCBI NO: 15229554 NR Description: hypothetical protein; protein id: At3g17950.1
MPMPFRASSRRHVSPSVAISRASSSNARRNHQRKRPPSNSAEPEPHRRRKWWRFCRDDDDDAAGNGIHRGTGDSKRSSLGEYLEVERRFGDEAVYNSAEAELEDAVVARYQDQQPVMGERALFADGRVLPPASAEVVTGEGTPVATSLCRFPVSLTGICSGGGG

SEQ ID NO: 70106 - DNA, 1713 bp, Arabidopsis thaliana
  misc_feature (1)..(1713): Ceres Seq. ID no. 2149393
  misc_feature: MA Experiment ID: 20000234 Result: Up-regulated in Transcription
  misc_feature: MA Experiment 20000234 PARAMETER Experiment Name: At_Siliques_P Parameter: Age (day) Value: 21
  misc_feature: MA Experiment 20000234 PARAMETER Experiment Name: At_Siliques_P Parameter: Organism Value: A. thaliana
  misc_feature: MA Experiment 20000234 PARAMETER Experiment Name: At_Siliques_P Parameter: Plant Line Value: WS
  misc_feature: MA Experiment 20000234 PARAMETER Experiment Name: At_Siliques_P Parameter: Tissue Value: Less Than 5mm Siliques vs. Whole Plant
  misc_feature: MA Experiment ID: 20000235 Result: Up-regulated in Transcription
  misc_feature: MA Experiment 20000235 PARAMETER Experiment Name: At_Siliques_P Parameter: Age (day) Value: 21
  misc_feature: MA Experiment 20000235 PARAMETER Experiment Name: At_Siliques_P Parameter: Organism Value: A. thaliana
  misc_feature: MA Experiment 20000235 PARAMETER Experiment Name: At_Siliques_P Parameter: Plant Line Value: WS
  misc_feature: MA Experiment 20000235 PARAMETER Experiment Name: At_Siliques_P Parameter: Tissue Value: 5-10mm Siliques vs. Whole Plant
  misc_feature: MA Experiment ID: 20000264 Result: Up-regulated in Transcription
  misc_feature: MA Experiment 20000264 PARAMETER Experiment Name: At_Open_Flower_P Parameter: Age (day) Value: 21
  misc_feature: MA Experiment 20000264 PARAMETER Experiment Name: At_Open_Flower_P Parameter: Plant Line Value: WS
  misc_feature: MA Experiment 20000264 PARAMETER Experiment Name: At_Open_Flower_P Parameter: Tissue Value: Open Flower vs. Whole Plant
  misc_feature: MA Experiment ID: 20000265 Result: Up-regulated in Transcription
  misc_feature: MA Experiment 20000265 PARAMETER Experiment Name: At_Open_Flower_P Parameter: Age (day) Value: 21
  misc_feature: MA Experiment 20000265 PARAMETER Experiment Name: At_Open_Flower_P Parameter: Plant Line Value: WS
  misc_feature: MA Experiment 20000265 PARAMETER Experiment Name: At_Open_Flower_P Parameter: Tissue Value: Closed Flower vs. Whole Plant
  misc_feature: MA Experiment ID: 20000286 Result: Up-regulated in Transcription
  misc_feature: MA Experiment 20000286 PARAMETER Experiment Name: At_Open_Flower_P Parameter: Age (day) Value: 21
  misc_feature: MA Experiment 20000286 PARAMETER Experiment Name: At_Open_Flower_P Parameter: Plant Line Value: WS
  misc_feature: MA Experiment 20000286 PARAMETER Experiment Name: At_Open_Flower_P Parameter: Tissue Value: Half Open vs. Whole Plant
  misc_feature: MA Experiment ID: 20000496 Result: Up-regulated in Transcription
  misc_feature: MA Experiment 20000496 PARAMETER Experiment Name: At_Guard_Cells_P Parameter: Harvest Date Value: 7/19/2002
  misc_feature: MA Experiment 20000496 PARAMETER Experiment Name: At_Guard_Cells_P Parameter: Organism Value: Canola
  misc_feature: MA Experiment 20000496 PARAMETER Experiment Name: At_Guard_Cells_P Parameter: Tissue Value: Guard Cells vs. Leaves
  misc_feature: MA Experiment ID: 20000794 Result: Up-regulated in Transcription
  misc_feature: MA Experiment 20000794 PARAMETER Experiment Name: At_Petals_P Parameter: Age (day) Value: 23-25 days
  misc_feature: MA Experiment 20000794 PARAMETER Experiment Name: At_Petals_P Parameter: Plant Line Value: WS
  misc_feature: MA Experiment 20000794 PARAMETER Experiment Name: At_Petals_P Parameter: Tissue Value: Petals vs. Whole plant
  misc_feature: MA Experiment ID: 20001248 Result: Down-regulated in Transcription
  misc_feature: MA Experiment 20001248 PARAMETER Experiment Name: At_Far-red-induction_P Parameter: Age (day) Value: 7
  misc_feature: MA Experiment 20001248 PARAMETER Experiment Name: At_Far-red-induction_P Parameter: Light Value: Far-red vs. White
  misc_feature: MA Experiment 20001248 PARAMETER Experiment Name: At_Far-red-induction_P Parameter: Organism Value: A. thaliana
  misc_feature: MA Experiment 20001248 PARAMETER Experiment Name: At_Far-red-induction_P Parameter: Plant Line Value: Columbia
  misc_feature: MA Experiment 20001248 PARAMETER Experiment Name: At_Far-red-induction_P Parameter: Timepoint (hr) Value: 4
  misc_feature: MA Experiment 20001248 PARAMETER Experiment Name: At_Far-red-induction_P Parameter: Tissue Value: Whole Plant
  misc_feature: MA Experiment ID: 20001911 Result: Down-regulated in Transcription
  misc_feature: MA Experiment 20001911 PARAMETER Experiment Name: At_Drought_Reproduction_P Parameter: Age (day) Value: 40
  misc_feature: MA Experiment 20001911 PARAMETER Experiment Name: At_Drought_Reproduction_P Parameter: Organism Value: A. thaliana
  misc_feature: MA Experiment 20001911 PARAMETER Experiment Name: At_Drought_Reproduction_P Parameter: Plant Line Value: WS
  misc_feature: MA Experiment 20001911 PARAMETER Experiment Name: At_Drought_Reproduction_P Parameter: Timepoint (day) Value: 10
  misc_feature: MA Experiment 20001911 PARAMETER Experiment Name: At_Drought_Reproduction_P Parameter: Tissue Value: Flowers
  misc_feature: MA Experiment 20001911 PARAMETER Experiment Name: At_Drought_Reproduction_P Parameter: Treatment Value: Drought vs. No Drought
atggcgggacaatcacgaaaatggatgattctggtagcgacgatttggattcaagcattcaccggtacgaatttcgatttctcgacgtattcgtcgaatttgaaatcggttctagggatttcgcaagtacaattgaattatctcgccgtcgcttcggatcttggtaaagttttcggttggtcatcgggacttgcactcttgtatttccctctttggacggttcttttcgcggcggcgattatgggtttcgttggttatggtgttcaatggctcgtcatcactaacgtcatctctttgccttatattctggtgtttctgtgttgtttgctagctgggctaagtatctgttggttcaacacagtctgctttgtgctctgcatcagaaacttccctgcaaacagatcacttgcactttctctcacagtgagctttaatggtgtaagtgctgctttatacactcttgcttacaacgcaatcaatcctgtttctacagagctatacctactcttaaacgctcttgtacctctttttgtctcatttgctgcactcatccctattcttcgccaaccgcctcttgaacctcttccaccagatggagttcgaagagactctctcatgtttctattgcttaacatattagcggtcttgaacggtgtttatctgcttctctttcgttcaaagacttctgatgtaacttcagctcgtcttctctttggtggatcaatacttctcttgattcttcctctatgcctccctggtctagtctacgctcgcaattggtatctacacaacatccactccagcttccgtttagaaggttctggtttcattcttgttgatgttgatgagcttgagatgcataaaggaatggtgacacgtgaagccagccttgaaggctaccagttgcttaacgatgatgtagtgcgagctgtcaatactcctgatcagaagagtttcattgaagatgacgacggatgttgttgcacaaaggtcattacaagaaatcagcttggaatgttgggagaggaacatcctctatctttcctcttatgcagatcagatttctggctttactatatagcctatttttgcggcggcacgattggactggtttacagcaacaacctgggacagattgcacaatctttaggacaaagctctgagacaacaactcttgtcacgctttattcgtctttctcattcttcggtagattactttcagcaacaccagactatatcagagcgaaggtttattttgctagaactgggtggctagccgttgctcttttaccaaccacaattgctcttttcttgttggcatcatcaggaagcttggcagcgttacaagcaggaactgctctaatcggtctaagttcgggtttcatatttgcagcagcggtttccataacatctgagctttttggacccaatagcgttggggttaaccacaacatcctcatcacaaacataccgataggatcgttggtctacggtttcttagctgctttggtctatgaatcccatagcgtggctgggtcaaagaccgagtcggttatatgtatgggaagagactgttatctccaaacgtttatgtggtggggatgcttgtcggtgattggactagcttcaagtgttgtcttgtttctgagaaccagacgagcctatcaacgttttgaacaagatcggataacttccagcatgctctattcttag

SEQ ID NO: 70107 - protein, 570 aa, Arabidopsis thaliana
  peptide (1)..(570): Ceres Seq. ID no. 2149394
  misc_feature (349)..(496): Pfam Name: Sugar (and other) transporter Pfam Description: Sugar (and other) transporter
  misc_feature (1)..(567): Homolog of NCBI NO: 21536488 NR Description: unknown [Arabidopsis thaliana]
  misc_feature (1)..(567): Homolog of NCBI NO: 18415316 NR Description: putative protein; protein id: At4g19450.1, by cDNA: 100165. [Arabidopsis thaliana]
  misc_feature (142)..(567): Homolog of NCBI NO: 7487718 NR Description: hypothetical protein T5K18.230 - Arabidopsis >gi|3080375|emb|CAA18632.1| putative protein [Arabidopsis >gi|7268740|emb|CAB78947.1| putative protein [Arabidopsis
  misc_feature (1)..(319): Homolog of NCBI NO: 15222361 NR Description: hypothetical protein; protein id: At1g31470.1
  misc_feature (299)..(569): Homolog of NCBI NO: 15222361 NR Description: hypothetical protein; protein id: At1g31470.1
  misc_feature (6)..(288): Homolog of NCBI NO: 15232155 NR Description: hypothetical protein; protein id: At3g01630.1 thaliana] >gi|6016721|gb|AAF01547.1|AC009325_17 hypothetical
  misc_feature (299)..(563): Homolog of NCBI NO: 15232155 NR Description: hypothetical protein; protein id: At3g01630.1 thaliana] >gi|6016721|gb|AAF01547.1|AC009325_17 hypothetical
  misc_feature (6)..(288): Homolog of NCBI NO: 28393720 NR Description: unknown protein [Arabidopsis thaliana]
  misc_feature (299)..(563): Homolog of NCBI NO: 28393720 NR Description: unknown protein [Arabidopsis thaliana]
  misc_feature (5)..(254): Homolog of NCBI NO: 34907888 NR Description: P0031D02.33 [Oryza sativa (japonica
MAGQSRKWMILVATIWIQAFTGTNFDFSTYSSNLKSVLGISQVQLNYLAVASDLGKVFGWSSGLALLYFPLWTVLFAAAIMGFVGYGVQWLVITNVISLPYILVFLCCLLAGLSICWFNTVCFVLCIRNFPANRSLALSLTVSFNGVSAALYTLAYNAINPVSTELYLLLNALVPLFVSFAALIPILRQPPLEPLPPDGVRRDSLMFLLLNILAVLNGVYLLLFRSKTSDVTSARLLFGGSILLLILPLCLPGLVYARNWYLHNIHSSFRLEGSGFILVDVDELEMHKGMVTREASLEGYQLLNDDVVRAVNTPDQKSFIEDDDGCCCTKVITRNQLGMLGEEHPLSFLLCRSDFWLYYIAYFCGGTIGLVYSNNLGQIAQSLGQSSETTTLVTLYSSFSFFGRLLSATPDYIRAKVYFARTGWLAVALLPTTIALFLLASSGSLAALQAGTALIGLSSGFIFAAAVSITSELFGPNSVGVNHNILITNIPIGSLVYGFLAALVYESHSVAGSKTESVICMGRDCYLQTFMWWGCLSVIGLASSVVLFLRTRRAYQRFEQDRITSSMLYS

SEQ ID NO: 70108 - protein, 562 aa, Arabidopsis thaliana
  peptide (1)..(562): Ceres Seq. ID no. 2149395
  misc_feature (341)..(488): Pfam Name: Sugar (and other) transporter Pfam Description: Sugar (and other) transporter
  misc_feature (1)..(559): Homolog of NCBI NO: 21536488 NR Description: unknown [Arabidopsis thaliana]
  misc_feature (1)..(559): Homolog of NCBI NO: 18415316 NR Description: putative protein; protein id: At4g19450.1, by cDNA: 100165. [Arabidopsis thaliana]
  misc_feature (134)..(559): Homolog of NCBI NO: 7487718 NR Description: hypothetical protein T5K18.230 - Arabidopsis >gi|3080375|emb|CAA18632.1| putative protein [Arabidopsis >gi|7268740|emb|CAB78947.1| putative protein [Arabidopsis
  misc_feature (1)..(311): Homolog of NCBI NO: 15222361 NR Description: hypothetical protein; protein id: At1g31470.1
  misc_feature (291)..(561): Homolog of NCBI NO: 15222361 NR Description: hypothetical protein; protein id: At1g31470.1
  misc_feature (1)..(280): Homolog of NCBI NO: 15232155 NR Description: hypothetical protein; protein id: At3g01630.1 thaliana] >gi|6016721|gb|AAF01547.1|AC009325_17 hypothetical
  misc_feature (291)..(555): Homolog of NCBI NO: 15232155 NR Description: hypothetical protein; protein id: At3g01630.1 thaliana] >gi|6016721|gb|AAF01547.1|AC009325_17 hypothetical
  misc_feature (1)..(280): Homolog of NCBI NO: 28393720 NR Description: unknown protein [Arabidopsis thaliana]
  misc_feature (291)..(555): Homolog of NCBI NO: 28393720 NR Description: unknown protein [Arabidopsis thaliana]
  misc_feature (1)..(246): Homolog of NCBI NO: 34907888 NR Description: P0031D02.33 [Oryza sativa (japonica
MILVATIWIQAFTGTNFDFSTYSSNLKSVLGISQVQLNYLAVASDLGKVFGWSSGLALLYFPLWTVLFAAAIMGFVGYGVQWLVITNVISLPYILVFLCCLLAGLSICWFNTVCFVLCIRNFPANRSLALSLTVSFNGVSAALYTLAYNAINPVSTELYLLLNALVPLFVSFAALIPILRQPPLEPLPPDGVRRDSLMFLLLNILAVLNGVYLLLFRSKTSDVTSARLLFGGSILLLILPLCLPGLVYARNWYLHNIHSSFRLEGSGFILVDVDELEMHKGMVTREASLEGYQLLNDDVVRAVNTPDQKSFIEDDDGCCCTKVITRNQLGMLGEEHPLSFLLCRSDFWLYYIAYFCGGTIGLVYSNNLGQIAQSLGQSSETTTLVTLYSSFSFFGRLLSATPDYIRAKVYFARTGWLAVALLPTTIALFLLASSGSLAALQAGTALIGLSSGFIFAAAVSITSELFGPNSVGVNHNILITNIPIGSLVYGFLAALVYESHSVAGSKTESVICMGRDCYLQTFMWWGCLSVIGLASSVVLFLRTRRAYQRFEQDRITSSMLYS

SEQ ID NO: 70109 - protein, 490 aa, Arabidopsis thaliana
  peptide (1)..(490): Ceres Seq. ID no. 2149396
  misc_feature (269)..(416): Pfam Name: Sugar (and other) transporter Pfam Description: Sugar (and other) transporter
  misc_feature (1)..(487): Homolog of NCBI NO: 21536488 NR Description: unknown [Arabidopsis thaliana]
  misc_feature (1)..(487): Homolog of NCBI NO: 18415316 NR Description: putative protein; protein id: At4g19450.1, by cDNA: 100165. [Arabidopsis thaliana]
  misc_feature (62)..(487): Homolog of NCBI NO: 7487718 NR Description: hypothetical protein T5K18.230 - Arabidopsis >gi|3080375|emb|CAA18632.1| putative protein [Arabidopsis >gi|7268740|emb|CAB78947.1| putative protein [Arabidopsis
  misc_feature (1)..(239): Homolog of NCBI NO: 15222361 NR Description: hypothetical protein; protein id: At1g31470.1
  misc_feature (219)..(489): Homolog of NCBI NO: 15222361 NR Description: hypothetical protein; protein id: At1g31470.1
  misc_feature (1)..(208): Homolog of NCBI NO: 15232155 NR Description: hypothetical protein; protein id: At3g01630.1 thaliana] >gi|6016721|gb|AAF01547.1|AC009325_17 hypothetical
  misc_feature (219)..(483): Homolog of NCBI NO: 15232155 NR Description: hypothetical protein; protein id: At3g01630.1 thaliana] >gi|6016721|gb|AAF01547.1|AC009325_17 hypothetical
  misc_feature (1)..(208): Homolog of NCBI NO: 28393720 NR Description: unknown protein [Arabidopsis thaliana]
  misc_feature (219)..(483): Homolog of NCBI NO: 28393720 NR Description: unknown protein [Arabidopsis thaliana]
  misc_feature (1)..(174): Homolog of NCBI NO: 34907888 NR Description: P0031D02.33 [Oryza sativa (japonica
MGFVGYGVQWLVITNVISLPYILVFLCCLLAGLSICWFNTVCFVLCIRNFPANRSLALSLTVSFNGVSAALYTLAYNAINPVSTELYLLLNALVPLFVSFAALIPILRQPPLEPLPPDGVRRDSLMFLLLNILAVLNGVYLLLFRSKTSDVTSARLLFGGSILLLILPLCLPGLVYARNWYLHNIHSSFRLEGSGFILVDVDELEMHKGMVTREASLEGYQLLNDDVVRAVNTPDQKSFIEDDDGCCCTKVITRNQLGMLGEEHPLSFLLCRSDFWLYYIAYFCGGTIGLVYSNNLGQIAQSLGQSSETTTLVTLYSSFSFFGRLLSATPDYIRAKVYFARTGWLAVALLPTTIALFLLASSGSLAALQAGTALIGLSSGFIFAAAVSITSELFGPNSVGVNHNILITNIPIGSLVYGFLAALVYESHSVAGSKTESVICMGRDCYLQTFMWWGCLSVIGLASSVVLFLRTRRAYQRFEQDRITSSMLYS

SEQ ID NO: 70110 - DNA, 1500 bp, Arabidopsis thaliana
  misc_feature (1)..(1500): Ceres Seq. ID no. 2151501
  misc_feature: MA Experiment ID: 20000171 Result: Up-regulated in Transcription
  misc_feature: MA Experiment 20000171 PARAMETER Experiment Name: At_42deg_Heat_P Parameter: Age (day) Value: 14
  misc_feature: MA Experiment 20000171 PARAMETER Experiment Name: At_42deg_Heat_P Parameter: Organism Value: A. thaliana
  misc_feature: MA Experiment 20000171 PARAMETER Experiment Name: At_42deg_Heat_P Parameter: Plant Line Value: WS
  misc_feature: MA Experiment 20000171 PARAMETER Experiment Name: At_42deg_Heat_P Parameter: Temperature (deg C) Value: 42 vs. 22
  misc_feature: MA Experiment 20000171 PARAMETER Experiment Name: At_42deg_Heat_P Parameter: Timepoint (hr) Value: 1
  misc_feature: MA Experiment 20000171 PARAMETER Experiment Name: At_42deg_Heat_P Parameter: Tissue Value: Aerial
  misc_feature: MA Experiment ID: 20000184 Result: Down-regulated in Transcription
  misc_feature: MA Experiment 20000184 PARAMETER Experiment Name: At_Shoots__P Parameter: Age (day) Value: 7
  misc_feature: MA Experiment 20000184 PARAMETER Experiment Name: At_Shoots__P Parameter: Tissue Value: Shoots vs. Whole Plant
  misc_feature: MA Experiment ID: 20000264 Result: Down-regulated in Transcription
  misc_feature: MA Experiment 20000264 PARAMETER Experiment Name: At_Open_Flower_P Parameter: Age (day) Value: 21
  misc_feature: MA Experiment 20000264 PARAMETER Experiment Name: At_Open_Flower_P Parameter: Plant Line Value: WS
  misc_feature: MA Experiment 20000264 PARAMETER Experiment Name: At_Open_Flower_P Parameter: Tissue Value: Open Flower vs. Whole Plant
  misc_feature: MA Experiment ID: 20000265 Result: Down-regulated in Transcription
  misc_feature: MA Experiment 20000265 PARAMETER Experiment Name: At_Open_Flower_P Parameter: Age (day) Value: 21
  misc_feature: MA Experiment 20000265 PARAMETER Experiment Name: At_Open_Flower_P Parameter: Plant Line Value: WS
  misc_feature: MA Experiment 20000265 PARAMETER Experiment Name: At_Open_Flower_P Parameter: Tissue Value: Closed Flower vs. Whole Plant
  misc_feature: MA Experiment ID: 20000286 Result: Down-regulated in Transcription
  misc_feature: MA Experiment 20000286 PARAMETER Experiment Name: At_Open_Flower_P Parameter: Age (day) Value: 21
  misc_feature: MA Experiment 20000286 PARAMETER Experiment Name: At_Open_Flower_P Parameter: Plant Line Value: WS
  misc_feature: MA Experiment 20000286 PARAMETER Experiment Name: At_Open_Flower_P Parameter: Tissue Value: Half Open vs. Whole Plant
  misc_feature: MA Experiment ID: 20000438 Result: Down-regulated in Transcription
  misc_feature: MA Experiment 20000438 PARAMETER Experiment Name: At_Shoots__P Parameter: Age (day) Value: 14
  misc_feature: MA Experiment 20000438 PARAMETER Experiment Name: At_Shoots__P Parameter: Tissue Value: Shoots vs. Whole Plant
  misc_feature: MA Experiment ID: 20001556 Result: Down-regulated in Transcription
  misc_feature: MA Experiment 20001556 PARAMETER Experiment Name: At_Drought_Soil_Dry_P Parameter: Age (day) Value: 26
  misc_feature: MA Experiment 20001556 PARAMETER Experiment Name: At_Drought_Soil_Dry_P Parameter: Organism Value: A. thaliana
  misc_feature: MA Experiment 20001556 PARAMETER Experiment Name: At_Drought_Soil_Dry_P Parameter: Plant Line Value: WS
  misc_feature: MA Experiment 20001556 PARAMETER Experiment Name: At_Drought_Soil_Dry_P Parameter: Post Timepoint (hr) Value: None
  misc_feature: MA Experiment 20001556 PARAMETER Experiment Name: At_Drought_Soil_Dry_P Parameter: Post-Treatment Value: None
  misc_feature: MA Experiment 20001556 PARAMETER Experiment Name: At_Drought_Soil_Dry_P Parameter: Timepoint (day) Value: 12
  misc_feature: MA Experiment 20001556 PARAMETER Experiment Name: At_Drought_Soil_Dry_P Parameter: Treatment Value: Drought vs. No Drought
  misc_feature: MA Experiment ID: 20001557 Result: Down-regulated in Transcription
  misc_feature: MA Experiment 20001557 PARAMETER Experiment Name: At_Drought_Soil_Dry_P Parameter: Age (day) Value: 27
  misc_feature: MA Experiment 20001557 PARAMETER Experiment Name: At_Drought_Soil_Dry_P Parameter: Organism Value: A. thaliana
  misc_feature: MA Experiment 20001557 PARAMETER Experiment Name: At_Drought_Soil_Dry_P Parameter: Plant Line Value: WS
  misc_feature: MA Experiment 20001557 PARAMETER Experiment Name: At_Drought_Soil_Dry_P Parameter: Post Timepoint (hr) Value: 3
  misc_feature: MA Experiment 20001557 PARAMETER Experiment Name: At_Drought_Soil_Dry_P Parameter: Post-Treatment Value: Re-Water vs. No Drought
  misc_feature: MA Experiment 20001557 PARAMETER Experiment Name: At_Drought_Soil_Dry_P Parameter: Timepoint (day) Value: 13
  misc_feature: MA Experiment 20001557 PARAMETER Experiment Name: At_Drought_Soil_Dry_P Parameter: Treatment Value: Drought vs. No Drought
  misc_feature: MA Experiment ID: 20001768 Result: Up-regulated in Transcription
  misc_feature: MA Experiment 20001768 PARAMETER Experiment Name: At_Far-red-enriched-adult_P Parameter: Age (day) Value: 28
  misc_feature: MA Experiment 20001768 PARAMETER Experiment Name: At_Far-red-enriched-adult_P Parameter: Light Value: Far-red enriched vs. White
  misc_feature: MA Experiment 20001768 PARAMETER Experiment Name: At_Far-red-enriched-adult_P Parameter: Organism Value: A. thaliana
  misc_feature: MA Experiment 20001768 PARAMETER Experiment Name: At_Far-red-enriched-adult_P Parameter: Plant Line Value: Columbia
  misc_feature: MA Experiment 20001768 PARAMETER Experiment Name: At_Far-red-enriched-adult_P Parameter: Timepoint (hr) Value: 1
  misc_feature: MA Experiment 20001768 PARAMETER Experiment Name: At_Far-red-enriched-adult_P Parameter: Tissue Value: Aerial
  misc_feature: MA Experiment ID: 20001773 Result: Up-regulated in Transcription
  misc_feature: MA Experiment 20001773 PARAMETER Experiment Name: At_Far-red-enriched-adult_P Parameter: Age (day) Value: 30
  misc_feature: MA Experiment 20001773 PARAMETER Experiment Name: At_Far-red-enriched-adult_P Parameter: Light Value: Far-red enriched vs. White
  misc_feature: MA Experiment 20001773 PARAMETER Experiment Name: At_Far-red-enriched-adult_P Parameter: Organism Value: A. thaliana
  misc_feature: MA Experiment 20001773 PARAMETER Experiment Name: At_Far-red-enriched-adult_P Parameter: Plant Line Value: Columbia
  misc_feature: MA Experiment 20001773 PARAMETER Experiment Name: At_Far-red-enriched-adult_P Parameter: Timepoint (hr) Value: 48
  misc_feature: MA Experiment 20001773 PARAMETER Experiment Name: At_Far-red-enriched-adult_P Parameter: Tissue Value: Aerial
  misc_feature: MA Experiment ID: 20001911 Result: Down-regulated in Transcription
  misc_feature: MA Experiment 20001911 PARAMETER Experiment Name: At_Drought_Reproduction_P Parameter: Age (day) Value: 40
  misc_feature: MA Experiment 20001911 PARAMETER Experiment Name: At_Drought_Reproduction_P Parameter: Organism Value: A. thaliana
  misc_feature: MA Experiment 20001911 PARAMETER Experiment Name: At_Drought_Reproduction_P Parameter: Plant Line Value: WS
  misc_feature: MA Experiment 20001911 PARAMETER Experiment Name: At_Drought_Reproduction_P Parameter: Timepoint (day) Value: 10
  misc_feature: MA Experiment 20001911 PARAMETER Experiment Name: At_Drought_Reproduction_P Parameter: Tissue Value: Flowers
  misc_feature: MA Experiment 20001911 PARAMETER Experiment Name: At_Drought_Reproduction_P Parameter: Treatment Value: Drought vs. No Drought
atggtgttttactctctactcttcttcacttttcttctccgattcgtctttgttctctccaccgttgatactatcgacggcgatccctctccttgctcctctcttgcttgcttggggaaaagactaaagccaaagcttttaggaagaagggttgattctggtaatgttccagaagctatgtaccaagttttagaacagcctttaagcgaacaagaactcaaaggaagatcagatatacctcaaacacttcaagatttcatgtctgaagtcaaaagaagcaaatcagacgcaagagaatttgctcaaaagctaaaagaaatggtgacattgatggaacagagaacaagaacggctaagattcaagagtatttatatcgacatgtcgcatcaagcagcataccgaaacaacttcactgtttagctcttaaactagccaacgaacactcgataaacgcagcggcgcgtctccagcttccagaagctgagcttgtccctatgttggtagacaacaactactttcactttgtcttggcttcagacaatattcttgcagcttcggttgtggctaagtcgttggttcaaaatgctttaagacctcataagatcgttcttcacatcataacggataggaaaacttatttcccaatgcaagcttggttctcattgcatcctctgtctccagcaataattgaggtcaaggctttgcatcatttcgattggttatcgaaaggtaaagtacccgttttggaagctatggagaaagatcagagagtgaggtctcaattcagaggtggatcatcggttattgtggctaataacaaagagaacccggttgttgttgctgctaagttacaagctctcagccctaaatacaactccttgatgaatcacatccgtattcatctaccagagttgtttccaagcttaaacaaggttgtgtttctagacgatgacattgtgatccaaactgatctttcacctctttgggacattgacatgaatggaaaagtaaatggagcagtggaaacatgtagaggagaagacaagtttgtgatgtcaaagaagttcaagagttacctcaacttctcgaatccgacaattgccaaaaacttcaatccagaggaatgtgcatgggcttatggaatgaatgttttcgacctagcggcttggaggaggactaacataagctccacttactatcattggcttgacgagaacttaaaatcagacctgagtttgtggcagctgggaactttgcctcctgggctgattgctttccacggtcatgtccaaaccatagatccgttctggcatatgcttggtctcggataccaagagaccacgagctatgccgatgctgaaagtgccgctgttgttcatttcaatggaagagctaagccttggctggatatagcatttcctcatctacgtcctctctgggctaagtatcttgattcttctgacagatttatcaagagctgtcacattagagcatcatga

SEQ ID NO: 70111 - protein, 499 aa, Arabidopsis thaliana
  peptide (1)..(499): Ceres Seq. ID no. 2151502
  misc_feature (1)..(499): Homolog of NCBI NO: 15239707 NR Description: putative protein; protein id: At5g54690.1 thaliana] >gi|10176796|dbj|BAB09935.1| contains similarity to
  misc_feature (2)..(496): Homolog of NCBI NO: 6714484 NR Description: unknown protein [Arabidopsis thaliana]
  misc_feature (2)..(496): Homolog of NCBI NO: 30678270 NR Description: glycosyltransferase family 8 [Arabidopsis
  misc_feature (2)..(496): Homolog of NCBI NO: 30685369 NR Description: glycosyltransferase family 8 [Arabidopsis >gi|26452322|dbj|BAC43247.1| unknown protein [Arabidopsis
  misc_feature (2)..(496): Homolog of NCBI NO: 11358133 NR Description: hypothetical protein T20K14_80 - Arabidopsis >gi|9755802|emb|CAC01746.1| putative protein [Arabidopsis
  misc_feature (6)..(496): Homolog of NCBI NO: 22331857 NR Description: putative protein; protein id: At3g58790.1, by cDNA: gi_20466463 [Arabidopsis thaliana] putative protein [Arabidopsis thaliana]
  misc_feature (6)..(496): Homolog of NCBI NO: 11358146 NR Description: hypothetical protein T20N10.140 - Arabidopsis >gi|7630074|emb|CAB88296.1| putative protein [Arabidopsis
  misc_feature (102)..(495): Homolog of NCBI NO: 15230806 NR Description: glycosyl transferase, putative; protein id: supported by cDNA: gi_20466216 [Arabidopsis thaliana] Glycosyltransferase QUASIMODO1 >gi|9294170|dbj|BAB02072.1|
  misc_feature (62)..(496): Homolog of NCBI NO: 7485958 NR Description: hypothetical protein F22I13.40 - Arabidopsis >gi|4539335|emb|CAB37483.1| putative protein [Arabidopsis >gi|7270811|emb|CAB80492.1| putative protein [Arabidopsis
  misc_feature (62)..(496): Homolog of NCBI NO: 30691875 NR Description: glycosyltransferase family 8 [Arabidopsis
MVFYSLLFFTFLLRFVFVLSTVDTIDGDPSPCSSLACLGKRLKPKLLGRRVDSGNVPEAMYQVLEQPLSEQELKGRSDIPQTLQDFMSEVKRSKSDAREFAQKLKEMVTLMEQRTRTAKIQEYLYRHVASSSIPKQLHCLALKLANEHSINAAARLQLPEAELVPMLVDNNYFHFVLASDNILAASVVAKSLVQNALRPHKIVLHIITDRKTYFPMQAWFSLHPLSPAIIEVKALHHFDWLSKGKVPVLEAMEKDQRVRSQFRGGSSVIVANNKENPVVVAAKLQALSPKYNSLMNHIRIHLPELFPSLNKVVFLDDDIVIQTDLSPLWDIDMNGKVNGAVETCRGEDKFVMSKKFKSYLNFSNPTIAKNFNPEECAWAYGMNVFDLAAWRRTNISSTYYHWLDENLKSDLSLWQLGTLPPGLIAFHGHVQTIDPFWHMLGLGYQETTSYADAESAAVVHFNGRAKPWLDIAFPHLRPLWAKYLDSSDRFIKSCHIRAS

SEQ ID NO: 70112 - protein, 440 aa, Arabidopsis thaliana
  peptide (1)..(440): Ceres Seq. ID no. 2151503
  misc_feature (1)..(440): Homolog of NCBI NO: 15239707 NR Description: putative protein; protein id: At5g54690.1 thaliana] >gi|10176796|dbj|BAB09935.1| contains similarity to
  misc_feature (1)..(437): Homolog of NCBI NO: 6714484 NR Description: unknown protein [Arabidopsis thaliana]
  misc_feature (1)..(437): Homolog of NCBI NO: 30678270 NR Description: glycosyltransferase family 8 [Arabidopsis
  misc_feature (1)..(437): Homolog of NCBI NO: 30685369 NR Description: glycosyltransferase family 8 [Arabidopsis >gi|26452322|dbj|BAC43247.1| unknown protein [Arabidopsis
  misc_feature (1)..(437): Homolog of NCBI NO: 11358133 NR Description: hypothetical protein T20K14_80 - Arabidopsis >gi|9755802|emb|CAC01746.1| putative protein [Arabidopsis
  misc_feature (1)..(437): Homolog of NCBI NO: 22331857 NR Description: putative protein; protein id: At3g58790.1, by cDNA: gi_20466463 [Arabidopsis thaliana] putative protein [Arabidopsis thaliana]
  misc_feature (1)..(437): Homolog of NCBI NO: 11358146 NR Description: hypothetical protein T20N10.140 - Arabidopsis >gi|7630074|emb|CAB88296.1| putative protein [Arabidopsis
  misc_feature (43)..(436): Homolog of NCBI NO: 15230806 NR Description: glycosyl transferase, putative; protein id: supported by cDNA: gi_20466216 [Arabidopsis thaliana] Glycosyltransferase QUASIMODO1 >gi|9294170|dbj|BAB02072.1|
  misc_feature (3)..(437): Homolog of NCBI NO: 7485958 NR Description: hypothetical protein F22I13.40 - Arabidopsis >gi|4539335|emb|CAB37483.1| putative protein [Arabidopsis >gi|7270811|emb|CAB80492.1| putative protein [Arabidopsis
  misc_feature (3)..(437): Homolog of NCBI NO: 30691875 NR Description: glycosyltransferase family 8 [Arabidopsis
MYQVLEQPLSEQELKGRSDIPQTLQDFMSEVKRSKSDAREFAQKLKEMVTLMEQRTRTAKIQEYLYRHVASSSIPKQLHCLALKLANEHSINAAARLQLPEAELVPMLVDNNYFHFVLASDNILAASVVAKSLVQNALRPHKIVLHIITDRKTYFPMQAWFSLHPLSPAIIEVKALHHFDWLSKGKVPVLEAMEKDQRVRSQFRGGSSVIVANNKENPVVVAAKLQALSPKYNSLMNHIRIHLPELFPSLNKVVFLDDDIVIQTDLSPLWDIDMNGKVNGAVETCRGEDKFVMSKKFKSYLNFSNPTIAKNFNPEECAWAYGMNVFDLAAWRRTNISSTYYHWLDENLKSDLSLWQLGTLPPGLIAFHGHVQTIDPFWHMLGLGYQETTSYADAESAAVVHFNGRAKPWLDIAFPHLRPLWAKYLDSSDRFIKSCHIRAS

SEQ ID NO: 70113 - protein, 413 aa, Arabidopsis thaliana
  peptide (1)..(413): Ceres Seq. ID no. 2151504
  misc_feature (1)..(413): Homolog of NCBI NO: 15239707 NR Description: putative protein; protein id: At5g54690.1 thaliana] >gi|10176796|dbj|BAB09935.1| contains similarity to
  misc_feature (1)..(410): Homolog of NCBI NO: 6714484 NR Description: unknown protein [Arabidopsis thaliana]
  misc_feature (1)..(410): Homolog of NCBI NO: 30678270 NR Description: glycosyltransferase family 8 [Arabidopsis
  misc_feature (1)..(410): Homolog of NCBI NO: 30685369 NR Description: glycosyltransferase family 8 [Arabidopsis >gi|26452322|dbj|BAC43247.1| unknown protein [Arabidopsis
  misc_feature (1)..(410): Homolog of NCBI NO: 11358133 NR Description: hypothetical protein T20K14_80 - Arabidopsis >gi|9755802|emb|CAC01746.1| putative protein [Arabidopsis
  misc_feature (1)..(410): Homolog of NCBI NO: 22331857 NR Description: putative protein; protein id: At3g58790.1, by cDNA: gi_20466463 [Arabidopsis thaliana] putative protein [Arabidopsis thaliana]
  misc_feature (1)..(410): Homolog of NCBI NO: 11358146 NR Description: hypothetical protein T20N10.140 - Arabidopsis >gi|7630074|emb|CAB88296.1| putative protein [Arabidopsis
  misc_feature (16)..(409): Homolog of NCBI NO: 15230806 NR Description: glycosyl transferase, putative; protein id: supported by cDNA: gi_20466216 [Arabidopsis thaliana] Glycosyltransferase QUASIMODO1 >gi|9294170|dbj|BAB02072.1|
  misc_feature (1)..(410): Homolog of NCBI NO: 7485958 NR Description: hypothetical protein F22I13.40 - Arabidopsis >gi|4539335|emb|CAB37483.1| putative protein [Arabidopsis >gi|7270811|emb|CAB80492.1| putative protein [Arabidopsis
  misc_feature (1)..(410): Homolog of NCBI NO: 30691875 NR Description: glycosyltransferase family 8 [Arabidopsis
MSEVKRSKSDAREFAQKLKEMVTLMEQRTRTAKIQEYLYRHVASSSIPKQLHCLALKLANEHSINAAARLQLPEAELVPMLVDNNYFHFVLASDNILAASVVAKSLVQNALRPHKIVLHIITDRKTYFPMQAWFSLHPLSPAIIEVKALHHFDWLSKGKVPVLEAMEKDQRVRSQFRGGSSVIVANNKENPVVVAAKLQALSPKYNSLMNHIRIHLPELFPSLNKVVFLDDDIVIQTDLSPLWDIDMNGKVNGAVETCRGEDKFVMSKKFKSYLNFSNPTIAKNFNPEECAWAYGMNVFDLAAWRRTNISSTYYHWLDENLKSDLSLWQLGTLPPGLIAFHGHVQTIDPFWHMLGLGYQETTSYADAESAAVVHFNGRAKPWLDIAFPHLRPLWAKYLDSSDRFIKSCHIRAS

SEQ ID NO: 70114 - DNA, 990 bp, Arabidopsis thaliana
  misc_feature (1)..(990): Ceres Seq. ID no. 2151908
  misc_feature: MA Experiment ID: 20000179 Result: Up-regulated in Transcription
  misc_feature: MA Experiment 20000179 PARAMETER Experiment Name: At_Germinating_Seeds_P Parameter: Age (hr) Value: 6 vs. 0
  misc_feature: MA Experiment 20000179 PARAMETER Experiment Name: At_Germinating_Seeds_P Parameter: Tissue Value: Germinating Seeds
  misc_feature: MA Experiment ID: 20000180 Result: Up-regulated in Transcription
  misc_feature: MA Experiment 20000180 PARAMETER Experiment Name: At_Germinating_Seeds_P Parameter: Age (hr) Value: 24 vs. 0
  misc_feature: MA Experiment 20000180 PARAMETER Experiment Name: At_Germinating_Seeds_P Parameter: Tissue Value: Germinating Seeds
  misc_feature: MA Experiment ID: 20000234 Result: Up-regulated in Transcription
  misc_feature: MA Experiment 20000234 PARAMETER Experiment Name: At_Siliques_P Parameter: Age (day) Value: 21
  misc_feature: MA Experiment 20000234 PARAMETER Experiment Name: At_Siliques_P Parameter: Organism Value: A. thaliana
  misc_feature: MA Experiment 20000234 PARAMETER Experiment Name: At_Siliques_P Parameter: Plant Line Value: WS
  misc_feature: MA Experiment 20000234 PARAMETER Experiment Name: At_Siliques_P Parameter: Tissue Value: Less Than 5mm Siliques vs. Whole Plant
  misc_feature: MA Experiment ID: 20000264 Result: Up-regulated in Transcription
  misc_feature: MA Experiment 20000264 PARAMETER Experiment Name: At_Open_Flower_P Parameter: Age (day) Value: 21
  misc_feature: MA Experiment 20000264 PARAMETER Experiment Name: At_Open_Flower_P Parameter: Plant Line Value: WS
  misc_feature: MA Experiment 20000264 PARAMETER Experiment Name: At_Open_Flower_P Parameter: Tissue Value: Open Flower vs. Whole Plant
  misc_feature: MA Experiment ID: 20000265 Result: Up-regulated in Transcription
  misc_feature: MA Experiment 20000265 PARAMETER Experiment Name: At_Open_Flower_P Parameter: Age (day) Value: 21
  misc_feature: MA Experiment 20000265 PARAMETER Experiment Name: At_Open_Flower_P Parameter: Plant Line Value: WS
  misc_feature: MA Experiment 20000265 PARAMETER Experiment Name: At_Open_Flower_P Parameter: Tissue Value: Closed Flower vs. Whole Plant
  misc_feature: MA Experiment ID: 20000286 Result: Up-regulated in Transcription
  misc_feature: MA Experiment 20000286 PARAMETER Experiment Name: At_Open_Flower_P Parameter: Age (day) Value: 21
  misc_feature: MA Experiment 20000286 PARAMETER Experiment Name: At_Open_Flower_P Parameter: Plant Line Value: WS
  misc_feature: MA Experiment 20000286 PARAMETER Experiment Name: At_Open_Flower_P Parameter: Tissue Value: Half Open vs. Whole Plant
  misc_feature: MA Experiment ID: 20000495 Result: Up-regulated in Transcription
  misc_feature: MA Experiment 20000495 PARAMETER Experiment Name: At_Guard_Cells_P Parameter: Harvest Date Value: 8/2/2002
  misc_feature: MA Experiment 20000495 PARAMETER Experiment Name: At_Guard_Cells_P Parameter: Organism Value: A. thaliana
  misc_feature: MA Experiment 20000495 PARAMETER Experiment Name: At_Guard_Cells_P Parameter: Tissue Value: Guard Cells vs. Leaves
  misc_feature: MA Experiment ID: 20000794 Result: Down-regulated in Transcription
  misc_feature: MA Experiment 20000794 PARAMETER Experiment Name: At_Petals_P Parameter: Age (day) Value: 23-25 days
  misc_feature: MA Experiment 20000794 PARAMETER Experiment Name: At_Petals_P Parameter: Plant Line Value: WS
  misc_feature: MA Experiment 20000794 PARAMETER Experiment Name: At_Petals_P Parameter: Tissue Value: Petals vs. Whole plant
  misc_feature: MA Experiment ID: 20001911 Result: Down-regulated in Transcription
  misc_feature: MA Experiment 20001911 PARAMETER Experiment Name: At_Drought_Reproduction_P Parameter: Age (day) Value: 40
  misc_feature: MA Experiment 20001911 PARAMETER Experiment Name: At_Drought_Reproduction_P Parameter: Organism Value: A. thaliana
  misc_feature: MA Experiment 20001911 PARAMETER Experiment Name: At_Drought_Reproduction_P Parameter: Plant Line Value: WS
  misc_feature: MA Experiment 20001911 PARAMETER Experiment Name: At_Drought_Reproduction_P Parameter: Timepoint (day) Value: 10
  misc_feature: MA Experiment 20001911 PARAMETER Experiment Name: At_Drought_Reproduction_P Parameter: Tissue Value: Flowers
  misc_feature: MA Experiment 20001911 PARAMETER Experiment Name: At_Drought_Reproduction_P Parameter: Treatment Value: Drought vs. No Drought
atgctacagaaacagtggaccccctttttctctctctctcttgctctgtttgtctttctctctcatcacttcttgtctgaaaaaatgttggaaacagaccttgaagctcggatgcaaatcctgcgtgagtctggttttcaagaaagccaaggagatgatgatacctttgctcaacgagctgaatggttttaccagggacgacctttgcttctctcactttgtctggacctgtacaacggctacgtcactctcttgggtcgttcttctcatcagaccagacttaaacccactacttctcttccgaaccagcttctccaagatgatgatgactgcatttcggacattgattccgttagtgaggtcagttctgaagttgagagcaccttatcctttcaacagatgaaagatcctactgcggtttctgagaaagtcgatgagcttgtatcccaacttgtgacagcaagcttggacaaagagattctgaaacacgagttacttcacaaggaccaacagtttcatgaagcctccaagactatagagctgttgaagaagtttgtcatgttgctggagatggagaaagaagtggctgtggaggaaaacgctaatcttggctacaaactcacttctctcttggaggagaacagagagctagccactgaggcattgttcatgaagaacgaagctgttgggcttgctaggtgtgtgcttaagatgagagatgaccactttcacaaggtctgcattctccagaaccgcatctactcgcttcaggcatctaggaactcagagcccgtctctgataaggtctcatacggatgctttggcctggataagcataagaccaaaaagaagaaggagaacaaaaccgaagagaagaagcctggattcaagtggttgaagaaactgaacaccattaacctgtttacaaagtgcagccttaacccatcggctgctgctccatcatgctgcactttcgacttgccttattag

SEQ ID NO: 70115 - protein, 329 aa, Arabidopsis thaliana
  peptide (1)..(329): Ceres Seq. ID no. 2151909
  misc_feature (32)..(329): Homolog of NCBI NO: 9294158 NR Description: contains similarity to unknown
  misc_feature (32)..(329): Homolog of NCBI NO: 30684631 NR Description: expressed protein [Arabidopsis thaliana]
  misc_feature (32)..(315): Homolog of NCBI NO: 22330107 NR Description: hypothetical protein; protein id: At1g48405.1
  misc_feature (32)..(175): Homolog of NCBI NO: 8778711 NR Description: T1N15.1 [Arabidopsis thaliana]
  misc_feature (33)..(258): Homolog of NCBI NO: 24431596 NR Description: Unknown protein [Oryza sativa (japonica
MLQKQWTPFFSLSLALFVFLSHHFLSEKMLETDLEARMQILRESGFQESQGDDDTFAQRAEWFYQGRPLLLSLCLDLYNGYVTLLGRSSHQTRLKPTTSLPNQLLQDDDDCISDIDSVSEVSSEVESTLSFQQMKDPTAVSEKVDELVSQLVTASLDKEILKHELLHKDQQFHEASKTIELLKKFVMLLEMEKEVAVEENANLGYKLTSLLEENRELATEALFMKNEAVGLARCVLKMRDDHFHKVCILQNRIYSLQASRNSEPVSDKVSYGCFGLDKHKTKKKKENKTEEKKPGFKWLKKLNTINLFTKCSLNPSAAAPSCCTFDLPY

SEQ ID NO: 70116 - protein, 301 aa, Arabidopsis thaliana
  peptide (1)..(301): Ceres Seq. ID no. 2151910
  misc_feature (4)..(301): Homolog of NCBI NO: 9294158 NR Description: contains similarity to unknown
  misc_feature (4)..(301): Homolog of NCBI NO: 30684631 NR Description: expressed protein [Arabidopsis thaliana]
  misc_feature (4)..(287): Homolog of NCBI NO: 22330107 NR Description: hypothetical protein; protein id: At1g48405.1
  misc_feature (4)..(147): Homolog of NCBI NO: 8778711 NR Description: T1N15.1 [Arabidopsis thaliana]
  misc_feature (5)..(230): Homolog of NCBI NO: 24431596 NR Description: Unknown protein [Oryza sativa (japonica
MLETDLEARMQILRESGFQESQGDDDTFAQRAEWFYQGRPLLLSLCLDLYNGYVTLLGRSSHQTRLKPTTSLPNQLLQDDDDCISDIDSVSEVSSEVESTLSFQQMKDPTAVSEKVDELVSQLVTASLDKEILKHELLHKDQQFHEASKTIELLKKFVMLLEMEKEVAVEENANLGYKLTSLLEENRELATEALFMKNEAVGLARCVLKMRDDHFHKVCILQNRIYSLQASRNSEPVSDKVSYGCFGLDKHKTKKKKENKTEEKKPGFKWLKKLNTINLFTKCSLNPSAAAPSCCTFDLPY

SEQ ID NO: 70117 - protein, 292 aa, Arabidopsis thaliana
  peptide (1)..(292): Ceres Seq. ID no. 2151911
  misc_feature (1)..(292): Homolog of NCBI NO: 9294158 NR Description: contains similarity to unknown
  misc_feature (1)..(292): Homolog of NCBI NO: 30684631 NR Description: expressed protein [Arabidopsis thaliana]
  misc_feature (1)..(278): Homolog of NCBI NO: 22330107 NR Description: hypothetical protein; protein id: At1g48405.1
  misc_feature (1)..(138): Homolog of NCBI NO: 8778711 NR Description: T1N15.1 [Arabidopsis thaliana]
  misc_feature (1)..(221): Homolog of NCBI NO: 24431596 NR Description: Unknown protein [Oryza sativa (japonica
MQILRESGFQESQGDDDTFAQRAEWFYQGRPLLLSLCLDLYNGYVTLLGRSSHQTRLKPTTSLPNQLLQDDDDCISDIDSVSEVSSEVESTLSFQQMKDPTAVSEKVDELVSQLVTASLDKEILKHELLHKDQQFHEASKTIELLKKFVMLLEMEKEVAVEENANLGYKLTSLLEENRELATEALFMKNEAVGLARCVLKMRDDHFHKVCILQNRIYSLQASRNSEPVSDKVSYGCFGLDKHKTKKKKENKTEEKKPGFKWLKKLNTINLFTKCSLNPSAAAPSCCTFDLPY

SEQ ID NO: 70118 - DNA, 1821 bp, Arabidopsis thaliana
  misc_feature (1)..(1821): Ceres Seq. ID no. 2152085
  misc_feature: MA Experiment ID: 20000227 Result: Up-regulated in Transcription
  misc_feature: MA Experiment 20000227 PARAMETER Experiment Name: At_Root-Tips-vs-Tops_P Parameter: Tissue Value: Root Tips vs. Root Tops
  misc_feature: MA Experiment ID: 20000439 Result: Up-regulated in Transcription
  misc_feature: MA Experiment 20000439 PARAMETER Experiment Name: At_Roots__P Parameter: Age (day) Value: 14 vs. 21
  misc_feature: MA Experiment 20000439 PARAMETER Experiment Name: At_Roots__P Parameter: Organism Value: A. thaliana
  misc_feature: MA Experiment 20000439 PARAMETER Experiment Name: At_Roots__P Parameter: Tissue Value: Roots vs. Whole Plant
atggtaagagatgatttgcggagtgtgggaatgctgggcttaggggagtcattaatcgcattaaacgagggacatcaaattatatacctcactggtttaagctttgattccaagaaaagggaaatgaattctaacaactggctcgcgttccctctatcaccaactcactcttctttgccgcctcacattcactcttcacaaaattctcatttcaatctaggtttggtcaacgacaatatcgacaacccttttcaaaaccaaggatggaatatgatcaatccacatggtggaggcggcgaaggtggagaggttccaaaagtggctgatttcttaggagtgagcaaatcgggggatcatcacaccgatcacaacctcgtaccttataacgacattcatcaaaccaacgcctccgactactactttcaaaccaatagcttgttacctacagtcgtcacttgtgcctctaatgctcctaataattatgagcttcaagagagtgcacacaatttgcaatctctcactctctctatgggaagtactggagctgccgctgcagaagtcgccactgtgaaagcctcgccggctgagactagtgccgataatagtagcagcactaccaacacaagtggaggagccatcgttgaggctacaccgagacggactttggaaacttttggacaacgaacctctatctatcgtggagttacaagacatagatggaccggtagatatgaagctcatctttgggataatagctgtagaagagaaggacaatcaaggaaaggaagacaaggtgggtatgacaaagaagagaaagcagccagagcatatgatctagctgcacttaaatattggggtccctctactactaccaactttccgataactaactacgagaaggaagtagaggagatgaaaaacatgacgagacaagagtttgtggcttctataagaaggaaaagtagcggattctcgcgtggtgcatccatgtatcgtggagtaacaaggcatcatcaacatggaagatggcaagcaaggatcggccgagttgctggaaacaaagatctctacttgggaacattcagcacggaggaagaagcagcagaagcttatgacatagctgcgataaagtttcgaggtctaaacgcggttacaaactttgagataaatcggtatgatgtgaaagccatcctggagagcaacacacttcctataggaggtggtgcggctaaacggctcaaagaagctcaagctctagaatcatcaagaaaacgagaggaaatgatagccctcggatcaaatttccatcaatatggtgcagcgagcggctcgagctctgttgcttccagctctaggcttcagcttcaaccttaccctctaagcattcaacaaccttttgagcatcttcatcatcatcagcctttacttactctacagaacaacaacgatatctctcagtatcatgattcctttagttacattcagacgcagcttcatcttcaccaacaacaaaccaacaattacttgcagtcttctagtcacacttcacagctctacaatgcttatcttcagagtaaccctggtctgcttcatggatttgtctctgataataacaacacttcagggtttcttggaaacaatgggattggtattgggtcaagctctaccgttggatcatcggctgaggaagagtttccagccgtgaaagtcgattacgatatgcctccttccggtggagctacagggtatggaggatggaatagtggagagtctgctcaaggatcgaatccaggaggtgttttcacgatgtggaatgaataa

SEQ ID NO: 70119 - protein, 606 aa, Arabidopsis thaliana
  peptide (1)..(606): Ceres Seq. ID no. 2152086
  misc_feature (229)..(299): Pfam Name: AP2 domain Pfam Description: AP2 domain
  misc_feature (42)..(606): Homolog of NCBI NO: 15223777 NR Description: ovule development protein, putative; protein id:
  misc_feature (91)..(606): Homolog of NCBI NO: 25405447 NR Description: hypothetical protein F11M15.6 [imported] - thaliana >gi|4836931|gb|AAD30633.1|AC006085_6 Hypothetical
  misc_feature (80)..(606): Homolog of NCBI NO: 9294411 NR Description: contains similarity to unknown
  misc_feature (91)..(606): Homolog of NCBI NO: 15232375 NR Description: ovule development protein, putative; protein id:
  misc_feature (45)..(604): Homolog of NCBI NO: 21304227 NR Description: ovule development aintegumenta-like protein BNM3
  misc_feature (166)..(465): Homolog of NCBI NO: 32490266 NR Description: OSJNBb0116K07.8 [Oryza sativa (japonica
  misc_feature (158)..(604): Homolog of NCBI NO: 34907686 NR Description: putative ovule development protein
  misc_feature (63)..(473): Homolog of NCBI NO: 21069051 NR Description: AP2/EREBP transcription factor BABY BOOM1 napus] >gi|21069055|gb|AAM33802.1| AP2/EREBP transcription factor
  misc_feature (63)..(448): Homolog of NCBI NO: 21069053 NR Description: AP2/EREBP transcription factor BABY BOOM2
  misc_feature (14)..(415): Homolog of NCBI NO: 15237965 NR Description: ovule development protein, putative; protein id: [Arabidopsis thaliana] >gi|11358596|pir||T51580 ovule development
MVRDDLRSVGMLGLGESLIALNEGHQIIYLTGLSFDSKKREMNSNNWLAFPLSPTHSSLPPHIHSSQNSHFNLGLVNDNIDNPFQNQGWNMINPHGGGGEGGEVPKVADFLGVSKSGDHHTDHNLVPYNDIHQTNASDYYFQTNSLLPTVVTCASNAPNNYELQESAHNLQSLTLSMGSTGAAAAEVATVKASPAETSADNSSSTTNTSGGAIVEATPRRTLETFGQRTSIYRGVTRHRWTGRYEAHLWDNSCRREGQSRKGRQGGYDKEEKAARAYDLAALKYWGPSTTTNFPITNYEKEVEEMKNMTRQEFVASIRRKSSGFSRGASMYRGVTRHHQHGRWQARIGRVAGNKDLYLGTFSTEEEAAEAYDIAAIKFRGLNAVTNFEINRYDVKAILESNTLPIGGGAAKRLKEAQALESSRKREEMIALGSNFHQYGAASGSSSVASSSRLQLQPYPLSIQQPFEHLHHHQPLLTLQNNNDISQYHDSFSYIQTQLHLHQQQTNNYLQSSSHTSQLYNAYLQSNPGLLHGFVSDNNNTSGFLGNNGIGIGSSSTVGSSAEEEFPAVKVDYDMPPSGGATGYGGWNSGESAQGSNPGGVFTMWNE

SEQ ID NO: 70120 - protein, 596 aa, Arabidopsis thaliana
  peptide (1)..(596): Ceres Seq. ID no. 2152087
  misc_feature (219)..(289): Pfam Name: AP2 domain Pfam Description: AP2 domain
  misc_feature (32)..(596): Homolog of NCBI NO: 15223777 NR Description: ovule development protein, putative; protein id:
  misc_feature (81)..(596): Homolog of NCBI NO: 25405447 NR Description: hypothetical protein F11M15.6 [imported] - thaliana >gi|4836931|gb|AAD30633.1|AC006085_6 Hypothetical
  misc_feature (70)..(596): Homolog of NCBI NO: 9294411 NR Description: contains similarity to unknown
  misc_feature (81)..(596): Homolog of NCBI NO: 15232375 NR Description: ovule development protein, putative; protein id:
  misc_feature (35)..(594): Homolog of NCBI NO: 21304227 NR Description: ovule development aintegumenta-like protein BNM3
  misc_feature (156)..(455): Homolog of NCBI NO: 32490266 NR Description: OSJNBb0116K07.8 [Oryza sativa (japonica
  misc_feature (148)..(594): Homolog of NCBI NO: 34907686 NR Description: putative ovule development protein
  misc_feature (53)..(463): Homolog of NCBI NO: 21069051 NR Description: AP2/EREBP transcription factor BABY BOOM1 napus] >gi|21069055|gb|AAM33802.1| AP2/EREBP transcription factor
  misc_feature (53)..(438): Homolog of NCBI NO: 21069053 NR Description: AP2/EREBP transcription factor BABY BOOM2
  misc_feature (4)..(405): Homolog of NCBI NO: 15237965 NR Description: ovule development protein, putative; protein id: [Arabidopsis thaliana] >gi|11358596|pir||T51580 ovule development
MLGLGESLIALNEGHQIIYLTGLSFDSKKREMNSNNWLAFPLSPTHSSLPPHIHSSQNSHFNLGLVNDNIDNPFQNQGWNMINPHGGGGEGGEVPKVADFLGVSKSGDHHTDHNLVPYNDIHQTNASDYYFQTNSLLPTVVTCASNAPNNYELQESAHNLQSLTLSMGSTGAAAAEVATVKASPAETSADNSSSTTNTSGGAIVEATPRRTLETFGQRTSIYRGVTRHRWTGRYEAHLWDNSCRREGQSRKGRQGGYDKEEKAARAYDLAALKYWGPSTTTNFPITNYEKEVEEMKNMTRQEFVASIRRKSSGFSRGASMYRGVTRHHQHGRWQARIGRVAGNKDLYLGTFSTEEEAAEAYDIAAIKFRGLNAVTNFEINRYDVKAILESNTLPIGGGAAKRLKEAQALESSRKREEMIALGSNFHQYGAASGSSSVASSSRLQLQPYPLSIQQPFEHLHHHQPLLTLQNNNDISQYHDSFSYIQTQLHLHQQQTNNYLQSSSHTSQLYNAYLQSNPGLLHGFVSDNNNTSGFLGNNGIGIGSSSTVGSSAEEEFPAVKVDYDMPPSGGATGYGGWNSGESAQGSNPGGVFTMWNE

SEQ ID NO: 70121 - protein, 565 aa, Arabidopsis thaliana
  peptide (1)..(565): Ceres Seq. ID no. 2152088
  misc_feature (188)..(258): Pfam Name: AP2 domain Pfam Description: AP2 domain
  misc_feature (1)..(565): Homolog of NCBI NO: 15223777 NR Description: ovule development protein, putative; protein id:
  misc_feature (50)..(565): Homolog of NCBI NO: 25405447 NR Description: hypothetical protein F11M15.6 [imported] - thaliana >gi|4836931|gb|AAD30633.1|AC006085_6 Hypothetical
  misc_feature (39)..(565): Homolog of NCBI NO: 9294411 NR Description: contains similarity to unknown
  misc_feature (50)..(565): Homolog of NCBI NO: 15232375 NR Description: ovule development protein, putative; protein id:
  misc_feature (4)..(563): Homolog of NCBI NO: 21304227 NR Description: ovule development aintegumenta-like protein BNM3
  misc_feature (125)..(424): Homolog of NCBI NO: 32490266 NR Description: OSJNBb0116K07.8 [Oryza sativa (japonica
  misc_feature (117)..(563): Homolog of NCBI NO: 34907686 NR Description: putative ovule development protein
  misc_feature (22)..(432): Homolog of NCBI NO: 21069051 NR Description: AP2/EREBP transcription factor BABY BOOM1 napus] >gi|21069055|gb|AAM33802.1| AP2/EREBP transcription factor
  misc_feature (22)..(407): Homolog of NCBI NO: 21069053 NR Description: AP2/EREBP transcription factor BABY BOOM2
  misc_feature (1)..(374): Homolog of NCBI NO: 15237965 NR Description: ovule development protein, putative; protein id: [Arabidopsis thaliana] >gi|11358596|pir||T51580 ovule development
MNSNNWLAFPLSPTHSSLPPHIHSSQNSHFNLGLVNDNIDNPFQNQGWNMINPHGGGGEGGEVPKVADFLGVSKSGDHHTDHNLVPYNDIHQTNASDYYFQTNSLLPTVVTCASNAPNNYELQESAHNLQSLTLSMGSTGAAAAEVATVKASPAETSADNSSSTTNTSGGAIVEATPRRTLETFGQRTSIYRGVTRHRWTGRYEAHLWDNSCRREGQSRKGRQGGYDKEEKAARAYDLAALKYWGPSTTTNFPITNYEKEVEEMKNMTRQEFVASIRRKSSGFSRGASMYRGVTRHHQHGRWQARIGRVAGNKDLYLGTFSTEEEAAEAYDIAAIKFRGLNAVTNFEINRYDVKAILESNTLPIGGGAAKRLKEAQALESSRKREEMIALGSNFHQYGAASGSSSVASSSRLQLQPYPLSIQQPFEHLHHHQPLLTLQNNNDISQYHDSFSYIQTQLHLHQQQTNNYLQSSSHTSQLYNAYLQSNPGLLHGFVSDNNNTSGFLGNNGIGIGSSSTVGSSAEEEFPAVKVDYDMPPSGGATGYGGWNSGESAQGSNPGGVFTMWNE

SEQ ID NO: 70122 - DNA, 1530 bp, Arabidopsis thaliana
  misc_feature (1)..(1530): Ceres Seq. ID no. 2152700
  misc_feature: MA Experiment ID: 20000184 Result: Down-regulated in Transcription
  misc_feature: MA Experiment 20000184 PARAMETER Experiment Name: At_Shoots__P Parameter: Age (day) Value: 7
  misc_feature: MA Experiment 20000184 PARAMETER Experiment Name: At_Shoots__P Parameter: Tissue Value: Shoots vs. Whole Plant
  misc_feature: MA Experiment ID: 20000437 Result: Up-regulated in Transcription
  misc_feature: MA Experiment 20000437 PARAMETER Experiment Name: At_Drought_P Parameter: Age (day) Value: 8
  misc_feature: MA Experiment 20000437 PARAMETER Experiment Name: At_Drought_P Parameter: Organism Value: A. thaliana
  misc_feature: MA Experiment 20000437 PARAMETER Experiment Name: At_Drought_P Parameter: Plant Line Value: WS
  misc_feature: MA Experiment 20000437 PARAMETER Experiment Name: At_Drought_P Parameter: Timepoint (hr) Value: 24
  misc_feature: MA Experiment 20000437 PARAMETER Experiment Name: At_Drought_P Parameter: Tissue Value: Whole Plant
  misc_feature: MA Experiment 20000437 PARAMETER Experiment Name: At_Drought_P Parameter: Treatment Value: Drought vs. No Drought
  misc_feature: MA Experiment ID: 20001557 Result: Down-regulated in Transcription
  misc_feature: MA Experiment 20001557 PARAMETER Experiment Name: At_Drought_Soil_Dry_P Parameter: Age (day) Value: 27
  misc_feature: MA Experiment 20001557 PARAMETER Experiment Name: At_Drought_Soil_Dry_P Parameter: Organism Value: A. thaliana
  misc_feature: MA Experiment 20001557 PARAMETER Experiment Name: At_Drought_Soil_Dry_P Parameter: Plant Line Value: WS
  misc_feature: MA Experiment 20001557 PARAMETER Experiment Name: At_Drought_Soil_Dry_P Parameter: Post Timepoint (hr) Value: 3
  misc_feature: MA Experiment 20001557 PARAMETER Experiment Name: At_Drought_Soil_Dry_P Parameter: Post-Treatment Value: Re-Water vs. No Drought
  misc_feature: MA Experiment 20001557 PARAMETER Experiment Name: At_Drought_Soil_Dry_P Parameter: Timepoint (day) Value: 13
  misc_feature: MA Experiment 20001557 PARAMETER Experiment Name: At_Drought_Soil_Dry_P Parameter: Treatment Value: Drought vs. No Drought
  misc_feature: MA Experiment ID: 20001558 Result: Down-regulated in Transcription
  misc_feature: MA Experiment 20001558 PARAMETER Experiment Name: At_Drought_Soil_Dry_P Parameter: Age (day) Value: 27
  misc_feature: MA Experiment 20001558 PARAMETER Experiment Name: At_Drought_Soil_Dry_P Parameter: Organism Value: A. thaliana
  misc_feature: MA Experiment 20001558 PARAMETER Experiment Name: At_Drought_Soil_Dry_P Parameter: Plant Line Value: WS
  misc_feature: MA Experiment 20001558 PARAMETER Experiment Name: At_Drought_Soil_Dry_P Parameter: Post Timepoint (hr) Value: 6
  misc_feature: MA Experiment 20001558 PARAMETER Experiment Name: At_Drought_Soil_Dry_P Parameter: Post-Treatment Value: Re-Water vs. No Drought
  misc_feature: MA Experiment 20001558 PARAMETER Experiment Name: At_Drought_Soil_Dry_P Parameter: Timepoint (day) Value: 13
  misc_feature: MA Experiment 20001558 PARAMETER Experiment Name: At_Drought_Soil_Dry_P Parameter: Treatment Value: Drought vs. No Drought
  misc_feature: MA Experiment ID: 20001905 Result: Up-regulated in Transcription
  misc_feature: MA Experiment 20001905 PARAMETER Experiment Name: At_Drought_Reproduction_P Parameter: Age (day) Value: 40
  misc_feature: MA Experiment 20001905 PARAMETER Experiment Name: At_Drought_Reproduction_P Parameter: Organism Value: A. thaliana
  misc_feature: MA Experiment 20001905 PARAMETER Experiment Name: At_Drought_Reproduction_P Parameter: Plant Line Value: WS
  misc_feature: MA Experiment 20001905 PARAMETER Experiment Name: At_Drought_Reproduction_P Parameter: Timepoint (day) Value: 10
  misc_feature: MA Experiment 20001905 PARAMETER Experiment Name: At_Drought_Reproduction_P Parameter: Tissue Value: Rosettes
  misc_feature: MA Experiment 20001905 PARAMETER Experiment Name: At_Drought_Reproduction_P Parameter: Treatment Value: Drought vs. No Drought
  misc_feature: MA Experiment ID: 20001911 Result: Up-regulated in Transcription
  misc_feature: MA Experiment 20001911 PARAMETER Experiment Name: At_Drought_Reproduction_P Parameter: Age (day) Value: 40
  misc_feature: MA Experiment 20001911 PARAMETER Experiment Name: At_Drought_Reproduction_P Parameter: Organism Value: A. thaliana
  misc_feature: MA Experiment 20001911 PARAMETER Experiment Name: At_Drought_Reproduction_P Parameter: Plant Line Value: WS
  misc_feature: MA Experiment 20001911 PARAMETER Experiment Name: At_Drought_Reproduction_P Parameter: Timepoint (day) Value: 10
  misc_feature: MA Experiment 20001911 PARAMETER Experiment Name: At_Drought_Reproduction_P Parameter: Tissue Value: Flowers
  misc_feature: MA Experiment 20001911 PARAMETER Experiment Name: At_Drought_Reproduction_P Parameter: Treatment Value: Drought vs. No Drought
atggatttggagagtgaaagctctgttcttgaatctgttgaagataataatggtttgattggtgatcttgataaagagttgaattcaccggttgagacttctcctcttatatcaaaaggatttggtttaagaaaatggaagaggaggttaaggagagatcttgttaaggatgatacttctgtgagtatggagaatagtaaagctctgaagagggtgttgtcaggattagttgatccgaatgctaaacaaatgcatttgccaggacctgaagttagacaagatagtgttggttctgttggctcggtgaatagtgtggttggttttgtaatgggtggggagagttatggcaatggtcttgcttttgcagctggtgttgattcggataacagtgaggatcggagtagtacaatgagtcattcttgggacaaacatagaggaaaggtctcgggtgggaagagtgtgattagttcgggggatagtagtcaacaaaggaagagtagtgtagagaagagtaataaacttagaggagaaaggatcaaaattgagaaggaaaactctcattccagcatggaatctgctgactcaagaagctccaactttgtgtttatgcagggtgcttcctatagtttgagtagcagagaacaaggcggaagaagaatgatggattatgacgatgaaaatagtgatcatgacgcacatacttcgaagagaaaggataacgtggaagaagaagaagaagaaacagaagactattcacaaggagactgtgttgaagagtctcaaatcaagagcaatggttcatcagacaatctggatccattaatagtagccgtcaacagtttccagactttgcaagaagccctccaaaaagaacttcaaaaattccaagagcttgggaaagaagaacctataacatcactgcatgatggaggagaaagcagcagttgcatacacgcaggacacgaaggagctagtgaagcaagctcttcttaccggtttgggtctgaaaagatgggagaaatggaattaacttctctagattccgagatactaaacctggtgaacaatgtagagcatctggagatcaaactagaagaagcaaagcgtattctcgaggttaaagaaacacaaatccgtgaactcgaatctaccataaacgtttcagagacgtgtaacggaggaacagagatcgggatagaagacatcttccagcaaaaggtggaggcagagattgaatatatcatattctcaagatcagtgggaaacctaaagagacggatcaaactgattgaagaagagaagacattggggctatcaaagcttgataaagcagaaacaaaagctgagaatctaaagaatcaagctcaagatttacaaaaccattgtgtagagatcacagagattcaagaagtggagtgcctgaagaagagagcatttaagaccactagatgtcttcttctacagttaggcttgctctttatactgtattattctctgttaccagaaccggagattgctgttcccacatga

SEQ ID NO: 70123 - protein, 509 aa, Arabidopsis thaliana
  peptide (1)..(509): Ceres Seq. ID no. 2152701
  misc_feature (1)..(509): Homolog of NCBI NO: 15241152 NR Description: unknown protein; protein id: At5g56210.1 thaliana] >gi|9758748|dbj|BAB09112.1| gene_id:K24C1.2~unknown
  misc_feature (145)..(509): Homolog of NCBI NO: 26451720 NR Description: unknown protein [Arabidopsis thaliana]
  misc_feature (145)..(483): Homolog of NCBI NO: 15236196 NR Description: putative protein; protein id: At4g26450.1
  misc_feature (34)..(322): Homolog of NCBI NO: 26451720 NR Description: unknown protein [Arabidopsis thaliana]
  misc_feature (34)..(322): Homolog of NCBI NO: 15236196 NR Description: putative protein; protein id: At4g26450.1
  misc_feature (9)..(388): Homolog of NCBI NO: 18399981 NR Description: expressed protein; protein id: At3g13360.1, by cDNA: gi_15010791 [Arabidopsis thaliana] AT3g13360/MDC11_15 [Arabidopsis thaliana]
  misc_feature (9)..(388): Homolog of NCBI NO: 9294542 NR Description: emb|CAA18225.1~gene_id:MDC11.20~similar to
  misc_feature (240)..(451): Homolog of NCBI NO: 18399981 NR Description: expressed protein; protein id: At3g13360.1, by cDNA: gi_15010791 [Arabidopsis thaliana] AT3g13360/MDC11_15 [Arabidopsis thaliana]
  misc_feature (240)..(451): Homolog of NCBI NO: 9294542 NR Description: emb|CAA18225.1~gene_id:MDC11.20~similar to
MDLESESSVLESVEDNNGLIGDLDKELNSPVETSPLISKGFGLRKWKRRLRRDLVKDDTSVSMENSKALKRVLSGLVDPNAKQMHLPGPEVRQDSVGSVGSVNSVVGFVMGGESYGNGLAFAAGVDSDNSEDRSSTMSHSWDKHRGKVSGGKSVISSGDSSQQRKSSVEKSNKLRGERIKIEKENSHSSMESADSRSSNFVFMQGASYSLSSREQGGRRMMDYDDENSDHDAHTSKRKDNVEEEEEETEDYSQGDCVEESQIKSNGSSDNLDPLIVAVNSFQTLQEALQKELQKFQELGKEEPITSLHDGGESSSCIHAGHEGASEASSSYRFGSEKMGEMELTSLDSEILNLVNNVEHLEIKLEEAKRILEVKETQIRELESTINVSETCNGGTEIGIEDIFQQKVEAEIEYIIFSRSVGNLKRRIKLIEEEKTLGLSKLDKAETKAENLKNQAQDLQNHCVEITEIQEVECLKKRAFKTTRCLLLQLGLLFILYYSLLPEPEIAVPT

SEQ ID NO: 70124 - protein, 447 aa, Arabidopsis thaliana
  peptide (1)..(447): Ceres Seq. ID no. 2152702
  misc_feature (1)..(447): Homolog of NCBI NO: 15241152 NR Description: unknown protein; protein id: At5g56210.1 thaliana] >gi|9758748|dbj|BAB09112.1| gene_id:K24C1.2~unknown
  misc_feature (83)..(447): Homolog of NCBI NO: 26451720 NR Description: unknown protein [Arabidopsis thaliana]
  misc_feature (83)..(421): Homolog of NCBI NO: 15236196 NR Description: putative protein; protein id: At4g26450.1
  misc_feature (1)..(260): Homolog of NCBI NO: 26451720 NR Description: unknown protein [Arabidopsis thaliana]
  misc_feature (1)..(260): Homolog of NCBI NO: 15236196 NR Description: putative protein; protein id: At4g26450.1
  misc_feature (1)..(326): Homolog of NCBI NO: 18399981 NR Description: expressed protein; protein id: At3g13360.1, by cDNA: gi_15010791 [Arabidopsis thaliana] AT3g13360/MDC11_15 [Arabidopsis thaliana]
  misc_feature (1)..(326): Homolog of NCBI NO: 9294542 NR Description: emb|CAA18225.1~gene_id:MDC11.20~similar to
  misc_feature (178)..(389): Homolog of NCBI NO: 18399981 NR Description: expressed protein; protein id: At3g13360.1, by cDNA: gi_15010791 [Arabidopsis thaliana] AT3g13360/MDC11_15 [Arabidopsis thaliana]
  misc_feature (178)..(389): Homolog of NCBI NO: 9294542 NR Description: emb|CAA18225.1~gene_id:MDC11.20~similar to
MENSKALKRVLSGLVDPNAKQMHLPGPEVRQDSVGSVGSVNSVVGFVMGGESYGNGLAFAAGVDSDNSEDRSSTMSHSWDKHRGKVSGGKSVISSGDSSQQRKSSVEKSNKLRGERIKIEKENSHSSMESADSRSSNFVFMQGASYSLSSREQGGRRMMDYDDENSDHDAHTSKRKDNVEEEEEETEDYSQGDCVEESQIKSNGSSDNLDPLIVAVNSFQTLQEALQKELQKFQELGKEEPITSLHDGGESSSCIHAGHEGASEASSSYRFGSEKMGEMELTSLDSEILNLVNNVEHLEIKLEEAKRILEVKETQIRELESTINVSETCNGGTEIGIEDIFQQKVEAEIEYIIFSRSVGNLKRRIKLIEEEKTLGLSKLDKAETKAENLKNQAQDLQNHCVEITEIQEVECLKKRAFKTTRCLLLQLGLLFILYYSLLPEPEIAVPT

SEQ ID NO: 70125 - protein, 426 aa, Arabidopsis thaliana
  peptide (1)..(426): Ceres Seq. ID no. 2152703
  misc_feature (1)..(426): Homolog of NCBI NO: 15241152 NR Description: unknown protein; protein id: At5g56210.1 thaliana] >gi|9758748|dbj|BAB09112.1| gene_id:K24C1.2~unknown
  misc_feature (62)..(426): Homolog of NCBI NO: 26451720 NR Description: unknown protein [Arabidopsis thaliana]
  misc_feature (62)..(400): Homolog of NCBI NO: 15236196 NR Description: putative protein; protein id: At4g26450.1
  misc_feature (1)..(239): Homolog of NCBI NO: 26451720 NR Description: unknown protein [Arabidopsis thaliana]
  misc_feature (1)..(239): Homolog of NCBI NO: 15236196 NR Description: putative protein; protein id: At4g26450.1
  misc_feature (1)..(305): Homolog of NCBI NO: 18399981 NR Description: expressed protein; protein id: At3g13360.1, by cDNA: gi_15010791 [Arabidopsis thaliana] AT3g13360/MDC11_15 [Arabidopsis thaliana]
  misc_feature (1)..(305): Homolog of NCBI NO: 9294542 NR Description: emb|CAA18225.1~gene_id:MDC11.20~similar to
  misc_feature (157)..(368): Homolog of NCBI NO: 18399981 NR Description: expressed protein; protein id: At3g13360.1, by cDNA: gi_15010791 [Arabidopsis thaliana] AT3g13360/MDC11_15 [Arabidopsis thaliana]
  misc_feature (157)..(368): Homolog of NCBI NO: 9294542 NR Description: emb|CAA18225.1~gene_id:MDC11.20~similar to
MHLPGPEVRQDSVGSVGSVNSVVGFVMGGESYGNGLAFAAGVDSDNSEDRSSTMSHSWDKHRGKVSGGKSVISSGDSSQQRKSSVEKSNKLRGERIKIEKENSHSSMESADSRSSNFVFMQGASYSLSSREQGGRRMMDYDDENSDHDAHTSKRKDNVEEEEEETEDYSQGDCVEESQIKSNGSSDNLDPLIVAVNSFQTLQEALQKELQKFQELGKEEPITSLHDGGESSSCIHAGHEGASEASSSYRFGSEKMGEMELTSLDSEILNLVNNVEHLEIKLEEAKRILEVKETQIRELESTINVSETCNGGTEIGIEDIFQQKVEAEIEYIIFSRSVGNLKRRIKLIEEEKTLGLSKLDKAETKAENLKNQAQDLQNHCVEITEIQEVECLKKRAFKTTRCLLLQLGLLFILYYSLLPEPEIAVPT

SEQ ID NO: 70126 - DNA, 1089 bp, Arabidopsis thaliana
  misc_feature (1)..(1089): Ceres Seq. ID no. 2153201
  misc_feature: MA Experiment ID: 20001910 Result: Up-regulated in Transcription
  misc_feature: MA Experiment 20001910 PARAMETER Experiment Name: At_Drought_Reproduction_P Parameter: Age (day) Value: 37
  misc_feature: MA Experiment 20001910 PARAMETER Experiment Name: At_Drought_Reproduction_P Parameter: Organism Value: A. thaliana
  misc_feature: MA Experiment 20001910 PARAMETER Experiment Name: At_Drought_Reproduction_P Parameter: Plant Line Value: WS
  misc_feature: MA Experiment 20001910 PARAMETER Experiment Name: At_Drought_Reproduction_P Parameter: Timepoint (day) Value: 7
  misc_feature: MA Experiment 20001910 PARAMETER Experiment Name: At_Drought_Reproduction_P Parameter: Tissue Value: Flowers
  misc_feature: MA Experiment 20001910 PARAMETER Experiment Name: At_Drought_Reproduction_P Parameter: Treatment Value: Drought vs. No Drought
atgagattagtgattcaccttcatatttttaatcctaatctcatttccgatcaaaatgtctctcatggctggcttcatcttaagagaggagagaaggagatggatgctgaaaccgtggagatgttgtcatttcgaatgccgtctatcggaagccaacctacggcatttgctgcaaaaataacggacaatccaaagaccgtggcacaactcaagtcggctgcatcgccttcacctcatagtaccgtgacgtgcggttaccaagctcatgtggcagggttctttcgaaacgtcaccgttttatggtccaagaatctcatgaatcattccctcaccgtaatggtgtcgagtttagacaatgacatgaattattgttgtaagattgatctcgtgaagccatggcagttttggagcaaaagagggtcaaagtcattcgacgtagagggaaactttgtggaggtcttttgggatcttcgatcagcaaaattggctggaaacggtagccccgaacccgtgtcagactattacgtggcagtagtttctgatgaagaggttgttttattgttgggagatttaaagcaaaaggcttataagcggaccaagtcaagaccggcattggtggaagggttcatatactttaaaaaagaaagcatatttgggaagaaaacgttttcgactcgggcaaggtttgacgaacaaagaaaggaacatgaagtggtggtggagagctctaatggagcagcggagccagagatgtggataagcgttgatgggatcgtggttgtgaacgtgaagaatctacaatggaaatttaggggaaaccaaatggtgatggtggatagaacaccggtaatggtctactatgatgttcatgattggttgtttgcaagttcggagactgcagcgagttcagggttgtttttgtttaagcctgttccggttggagcgatggtagatgagagctttagcgatgcggaggaaggagatagcggaggagggagtagtcctttgagtcgttataattcagcatcaagtggttttggaccattgcatgacttttgtttgtttctttatgcttggaaacttgaatga

SEQ ID NO: 70127 - protein, 362 aa, Arabidopsis thaliana
  peptide (1)..(362): Ceres Seq. ID no. 2153202
  misc_feature (75)..(361): Pfam Name: Plant protein of unknown function (DUF868) Pfam Description: Plant protein of unknown function (DUF868)
  misc_feature (41)..(362): Homolog of NCBI NO: 15238927 NR Description: putative protein; protein id: At5g48270.1 thaliana] >gi|8777417|dbj|BAA97007.1|
  misc_feature (42)..(362): Homolog of NCBI NO: 15228105 NR Description: hypothetical protein; protein id: At2g04220.1 thaliana] >gi|20198211|gb|AAD27916.2| hypothetical protein thaliana] >gi|20198251|gb|AAM15482.1| hypothetical protein
  misc_feature (48)..(310): Homolog of NCBI NO: 15235452 NR Description: putative protein; protein id: At4g12690.1, by cDNA: 12923. [Arabidopsis thaliana] >gi|7459232|pir||T06627
  misc_feature (328)..(362): Homolog of NCBI NO: 15235452 NR Description: putative protein; protein id: At4g12690.1, by cDNA: 12923. [Arabidopsis thaliana] >gi|7459232|pir||T06627
  misc_feature (113)..(362): Homolog of NCBI NO: 25334990 NR Description: hypothetical protein At2g04220 [imported] -
  misc_feature (125)..(312): Homolog of NCBI NO: 20804936 NR Description: P0456E05.14 [Oryza sativa (japonica
  misc_feature (46)..(114): Homolog of NCBI NO: 20804936 NR Description: P0456E05.14 [Oryza sativa (japonica
  misc_feature (80)..(310): Homolog of NCBI NO: 22331055 NR Description: hypothetical protein; protein id: At3g13229.1 thaliana] >gi|9294527|dbj|BAB02790.1|
  misc_feature (78)..(311): Homolog of NCBI NO: 14719318 NR Description: hypothetical protein [Oryza sativa]
  misc_feature (53)..(309): Homolog of NCBI NO: 30102999 NR Description: hypothetical protein [Oryza sativa (japonica
MRLVIHLHIFNPNLISDQNVSHGWLHLKRGEKEMDAETVEMLSFRMPSIGSQPTAFAAKITDNPKTVAQLKSAASPSPHSTVTCGYQAHVAGFFRNVTVLWSKNLMNHSLTVMVSSLDNDMNYCCKIDLVKPWQFWSKRGSKSFDVEGNFVEVFWDLRSAKLAGNGSPEPVSDYYVAVVSDEEVVLLLGDLKQKAYKRTKSRPALVEGFIYFKKESIFGKKTFSTRARFDEQRKEHEVVVESSNGAAEPEMWISVDGIVVVNVKNLQWKFRGNQMVMVDRTPVMVYYDVHDWLFASSETAASSGLFLFKPVPVGAMVDESFSDAEEGDSGGGSSPLSRYNSASSGFGPLHDFCLFLYAWKLE

SEQ ID NO: 70128 - protein, 329 aa, Arabidopsis thaliana
  peptide (1)..(329): Ceres Seq. ID no. 2153203
  misc_feature (42)..(328): Pfam Name: Plant protein of unknown function (DUF868) Pfam Description: Plant protein of unknown function (DUF868)
  misc_feature (8)..(329): Homolog of NCBI NO: 15238927 NR Description: putative protein; protein id: At5g48270.1 thaliana] >gi|8777417|dbj|BAA97007.1|
  misc_feature (9)..(329): Homolog of NCBI NO: 15228105 NR Description: hypothetical protein; protein id: At2g04220.1 thaliana] >gi|20198211|gb|AAD27916.2| hypothetical protein thaliana] >gi|20198251|gb|AAM15482.1| hypothetical protein
  misc_feature (15)..(277): Homolog of NCBI NO: 15235452 NR Description: putative protein; protein id: At4g12690.1, by cDNA: 12923. [Arabidopsis thaliana] >gi|7459232|pir||T06627
  misc_feature (295)..(329): Homolog of NCBI NO: 15235452 NR Description: putative protein; protein id: At4g12690.1, by cDNA: 12923. [Arabidopsis thaliana] >gi|7459232|pir||T06627
  misc_feature (80)..(329): Homolog of NCBI NO: 25334990 NR Description: hypothetical protein At2g04220 [imported] -
  misc_feature (92)..(279): Homolog of NCBI NO: 20804936 NR Description: P0456E05.14 [Oryza sativa (japonica
  misc_feature (13)..(81): Homolog of NCBI NO: 20804936 NR Description: P0456E05.14 [Oryza sativa (japonica
  misc_feature (47)..(277): Homolog of NCBI NO: 22331055 NR Description: hypothetical protein; protein id: At3g13229.1 thaliana] >gi|9294527|dbj|BAB02790.1|
  misc_feature (45)..(278): Homolog of NCBI NO: 14719318 NR Description: hypothetical protein [Oryza sativa]
  misc_feature (20)..(276): Homolog of NCBI NO: 30102999 NR Description: hypothetical protein [Oryza sativa (japonica
MDAETVEMLSFRMPSIGSQPTAFAAKITDNPKTVAQLKSAASPSPHSTVTCGYQAHVAGFFRNVTVLWSKNLMNHSLTVMVSSLDNDMNYCCKIDLVKPWQFWSKRGSKSFDVEGNFVEVFWDLRSAKLAGNGSPEPVSDYYVAVVSDEEVVLLLGDLKQKAYKRTKSRPALVEGFIYFKKESIFGKKTFSTRARFDEQRKEHEVVVESSNGAAEPEMWISVDGIVVVNVKNLQWKFRGNQMVMVDRTPVMVYYDVHDWLFASSETAASSGLFLFKPVPVGAMVDESFSDAEEGDSGGGSSPLSRYNSASSGFGPLHDFCLFLYAWKLE

SEQ ID NO: 70129 - protein, 322 aa, Arabidopsis thaliana
  peptide (1)..(322): Ceres Seq. ID no. 2153204
  misc_feature (35)..(321): Pfam Name: Plant protein of unknown function (DUF868) Pfam Description: Plant protein of unknown function (DUF868)
  misc_feature (1)..(322): Homolog of NCBI NO: 15238927 NR Description: putative protein; protein id: At5g48270.1 thaliana] >gi|8777417|dbj|BAA97007.1|
  misc_feature (2)..(322): Homolog of NCBI NO: 15228105 NR Description: hypothetical protein; protein id: At2g04220.1 thaliana] >gi|20198211|gb|AAD27916.2| hypothetical protein thaliana] >gi|20198251|gb|AAM15482.1| hypothetical protein
  misc_feature (8)..(270): Homolog of NCBI NO: 15235452 NR Description: putative protein; protein id: At4g12690.1, by cDNA: 12923. [Arabidopsis thaliana] >gi|7459232|pir||T06627
  misc_feature (288)..(322): Homolog of NCBI NO: 15235452 NR Description: putative protein; protein id: At4g12690.1, by cDNA: 12923. [Arabidopsis thaliana] >gi|7459232|pir||T06627
  misc_feature (73)..(322): Homolog of NCBI NO: 25334990 NR Description: hypothetical protein At2g04220 [imported] -
  misc_feature (85)..(272): Homolog of NCBI NO: 20804936 NR Description: P0456E05.14 [Oryza sativa (japonica
  misc_feature (6)..(74): Homolog of NCBI NO: 20804936 NR Description: P0456E05.14 [Oryza sativa (japonica
  misc_feature (40)..(270): Homolog of NCBI NO: 22331055 NR Description: hypothetical protein; protein id: At3g13229.1 thaliana] >gi|9294527|dbj|BAB02790.1|
  misc_feature (38)..(271): Homolog of NCBI NO: 14719318 NR Description: hypothetical protein [Oryza sativa]
  misc_feature (13)..(269): Homolog of NCBI NO: 30102999 NR Description: hypothetical protein [Oryza sativa (japonica
MLSFRMPSIGSQPTAFAAKITDNPKTVAQLKSAASPSPHSTVTCGYQAHVAGFFRNVTVLWSKNLMNHSLTVMVSSLDNDMNYCCKIDLVKPWQFWSKRGSKSFDVEGNFVEVFWDLRSAKLAGNGSPEPVSDYYVAVVSDEEVVLLLGDLKQKAYKRTKSRPALVEGFIYFKKESIFGKKTFSTRARFDEQRKEHEVVVESSNGAAEPEMWISVDGIVVVNVKNLQWKFRGNQMVMVDRTPVMVYYDVHDWLFASSETAASSGLFLFKPVPVGAMVDESFSDAEEGDSGGGSSPLSRYNSASSGFGPLHDFCLFLYAWKLE

SEQ ID NO: 70130 - DNA, 2631 bp, Arabidopsis thaliana
  misc_feature (1)..(2631): Ceres Seq. ID no. 2153549
  misc_feature: MA Experiment ID: 20000171 Result: Down-regulated in Transcription
  misc_feature: MA Experiment 20000171 PARAMETER Experiment Name: At_42deg_Heat_P Parameter: Age (day) Value: 14
  misc_feature: MA Experiment 20000171 PARAMETER Experiment Name: At_42deg_Heat_P Parameter: Organism Value: A. thaliana
  misc_feature: MA Experiment 20000171 PARAMETER Experiment Name: At_42deg_Heat_P Parameter: Plant Line Value: WS
  misc_feature: MA Experiment 20000171 PARAMETER Experiment Name: At_42deg_Heat_P Parameter: Temperature (deg C) Value: 42 vs. 22
  misc_feature: MA Experiment 20000171 PARAMETER Experiment Name: At_42deg_Heat_P Parameter: Timepoint (hr) Value: 1
  misc_feature: MA Experiment 20000171 PARAMETER Experiment Name: At_42deg_Heat_P Parameter: Tissue Value: Aerial
  misc_feature: MA Experiment ID: 20000173 Result: Down-regulated in Transcription
  misc_feature: MA Experiment 20000173 PARAMETER Experiment Name: At_42deg_Heat_P Parameter: Age (day) Value: 14
  misc_feature: MA Experiment 20000173 PARAMETER Experiment Name: At_42deg_Heat_P Parameter: Organism Value: A. thaliana
  misc_feature: MA Experiment 20000173 PARAMETER Experiment Name: At_42deg_Heat_P Parameter: Plant Line Value: WS
  misc_feature: MA Experiment 20000173 PARAMETER Experiment Name: At_42deg_Heat_P Parameter: Temperature (deg C) Value: 42 vs. 22
  misc_feature: MA Experiment 20000173 PARAMETER Experiment Name: At_42deg_Heat_P Parameter: Timepoint (hr) Value: 6
  misc_feature: MA Experiment 20000173 PARAMETER Experiment Name: At_42deg_Heat_P Parameter: Tissue Value: Aerial
  misc_feature: MA Experiment ID: 20000182 Result: Down-regulated in Transcription
  misc_feature: MA Experiment 20000182 PARAMETER Experiment Name: At_2mM_SA_P Parameter: Age (day) Value: 14
  misc_feature: MA Experiment 20000182 PARAMETER Experiment Name: At_2mM_SA_P Parameter: Organism Value: A. thaliana
  misc_feature: MA Experiment 20000182 PARAMETER Experiment Name: At_2mM_SA_P Parameter: Plant Line Value: WS
  misc_feature: MA Experiment 20000182 PARAMETER Experiment Name: At_2mM_SA_P Parameter: Timepoint (hr) Value: 6
  misc_feature: MA Experiment 20000182 PARAMETER Experiment Name: At_2mM_SA_P Parameter: Tissue Value: Aerial
  misc_feature: MA Experiment 20000182 PARAMETER Experiment Name: At_2mM_SA_P Parameter: Treatment Value: 2mM SA vs. No Treatment
  misc_feature: MA Experiment ID: 20000265 Result: Up-regulated in Transcription
  misc_feature: MA Experiment 20000265 PARAMETER Experiment Name: At_Open_Flower_P Parameter: Age (day) Value: 21
  misc_feature: MA Experiment 20000265 PARAMETER Experiment Name: At_Open_Flower_P Parameter: Plant Line Value: WS
  misc_feature: MA Experiment 20000265 PARAMETER Experiment Name: At_Open_Flower_P Parameter: Tissue Value: Closed Flower vs. Whole Plant
  misc_feature: MA Experiment ID: 20001248 Result: Down-regulated in Transcription
  misc_feature: MA Experiment 20001248 PARAMETER Experiment Name: At_Far-red-induction_P Parameter: Age (day) Value: 7
  misc_feature: MA Experiment 20001248 PARAMETER Experiment Name: At_Far-red-induction_P Parameter: Light Value: Far-red vs. White
  misc_feature: MA Experiment 20001248 PARAMETER Experiment Name: At_Far-red-induction_P Parameter: Organism Value: A. thaliana
  misc_feature: MA Experiment 20001248 PARAMETER Experiment Name: At_Far-red-induction_P Parameter: Plant Line Value: Columbia
  misc_feature: MA Experiment 20001248 PARAMETER Experiment Name: At_Far-red-induction_P Parameter: Timepoint (hr) Value: 4
  misc_feature: MA Experiment 20001248 PARAMETER Experiment Name: At_Far-red-induction_P Parameter: Tissue Value: Whole Plant
  misc_feature: MA Experiment ID: 20001450 Result: Down-regulated in Transcription
  misc_feature: MA Experiment 20001450 PARAMETER Experiment Name: At_Far-red-induction_P Parameter: Age (day) Value: 7
  misc_feature: MA Experiment 20001450 PARAMETER Experiment Name: At_Far-red-induction_P Parameter: Light Value: Far-red vs. White
  misc_feature: MA Experiment 20001450 PARAMETER Experiment Name: At_Far-red-induction_P Parameter: Organism Value: A. thaliana
  misc_feature: MA Experiment 20001450 PARAMETER Experiment Name: At_Far-red-induction_P Parameter: Plant Line Value: Columbia
  misc_feature: MA Experiment 20001450 PARAMETER Experiment Name: At_Far-red-induction_P Parameter: Timepoint (hr) Value: 8
  misc_feature: MA Experiment 20001450 PARAMETER Experiment Name: At_Far-red-induction_P Parameter: Tissue Value: Whole Plant
  misc_feature: MA Experiment ID: 20001451 Result: Down-regulated in Transcription
  misc_feature: MA Experiment 20001451 PARAMETER Experiment Name: At_Far-red-induction_P Parameter: Age (day) Value: 7
  misc_feature: MA Experiment 20001451 PARAMETER Experiment Name: At_Far-red-induction_P Parameter: Light Value: Far-red vs. White
  misc_feature: MA Experiment 20001451 PARAMETER Experiment Name: At_Far-red-induction_P Parameter: Organism Value: A. thaliana
  misc_feature: MA Experiment 20001451 PARAMETER Experiment Name: At_Far-red-induction_P Parameter: Plant Line Value: Columbia
  misc_feature: MA Experiment 20001451 PARAMETER Experiment Name: At_Far-red-induction_P Parameter: Timepoint (hr) Value: 24
  misc_feature: MA Experiment 20001451 PARAMETER Experiment Name: At_Far-red-induction_P Parameter: Tissue Value: Whole Plant
atggcttgtcgtttccctctgcattcttcgtcaccttctcaattcctttcaccggaaaatcgtcagagactacccagaaattacccttcaatctcatgccaaaacaattcagctacgaacgttgtccatgaagatggtgatgataacgacaaagccaagacaaaccaagtcaatcttctcgcaataccaatcacactcactataatctccgcttctctagccaaaccgtcgttcgcggctgcgaaggtaacggagagaaagagaactcagaagaaacctcaggaggctttgacacttgaacagcttaaagcttggtccaaagatttacctgtagtttcgaatcgtataccttatactgacattttgagcttaaaagctgaaggtaagcttaagcatgtgataaagcctcctaatttaagtttgcggcaaaaggcagagcctgtgttagtagttttggaggattctagagtattaaggactgtgttgccttctttagagggtaataagaggttttgggaacaatgggatgagttagggattgatgtacaatgtgttaatgcttatactcctccggttaagagacctcctgtgccgtctccttatttaggatttttgtggaaagttcctgcttatatgttaacatgggttaagccaaagaaggagtctaaacgtgctgctgagttgaagagaatgagggaggatttcaagaggcagaggaaggaggagattgagacgatgaaagaggaaagagtgatgatggaaaagacaatgaaggcgcagaagaaacaacaggagaggaagaaaaggaaggctgttaggaagaagaaatacgaggagtctctgcgtgaggcgaggaaaaattatcgagatatggcggatatgtgggcaagattggctcaggatcctaatgtggctactgctcttggattggtattcttttatatattttaccgtgtggtggttctcaactataggaagcaaaagaaggattatgaagacaggttgaagattgagaaggcggaagcagatgagaggaagaaaatgagggagttggaaagggagatggagggaattgaggaagaggatgaggaggttgaggaaggtacaggtgagaaaaatccttacttacagatggcgatgcagttcatgaagtcaggtgcacgtgtgagacgagcatcaaataagaggttacctgagtatcttgagagaggtgtggatgtcaaatttacagatgttgctggacttgggaagattcgtcttgaacttgaggaaatcgttaagttttttactcatggagagatgtaccgcaggagaggggtcaagattccaggtggtattcttttatgtgggcctcctggggtcggaaaaactttactggcaaaagctgtagctggtgaagcaggagtcaatttcttctctatctctgcttctcagtttgtggaaatatatgttggtgttggtgcatctcgtgtccgagcattataccaagaagctagagaaaatgctccatctgtggtcttcattgatgaattggatgctgttggaagggagcgtgggttaataaagggttctggaggacaagaaagggatgccactcttaatcagctacttgtttctttagatggttttgaaggaaggggagaggtcatcaccattgcttccacaaacagaccagacattctcgatcctgcgcttgtgaggcctggacggttcgaccgcaaaatctttatccctaaacctggtcttattggacggatggaaattctgcaggttcatgctcgtaagaagccgatggctgaagatttagactatatggcagttgctagcatgacagatggcatggttggagcagagcttgctaatattgttgagatcgcggcaattaatatgatgcgtgatggaagaacagagttaacaacagatgatttgcttcaagctgcacaaatagaagaaagaggaatgttagatagaaaagacaggagcttggagacatggcgacaagttgcgatcaatgaagctgcaatggctgttgtagcagtgaactttcctgatatgaagaatatagaatttctgacaatcaaccctagagctggtagagaattgggttatgtccgggtgaagatggatcatatcaaatttaaggaaggcatgcttagtcgacaatccatcttggatcacatcactgttcagttagcaccccgtgctgcagatgaactatggtacggtgaggatcagttaagcacgatatgggctgaaacatcggataacgcaagatcagctgctcgatcattggttcttggtggtctttctgataagcatcatggcttgaataacttctgggtagctgatcgaattaacgatattgatgtggaggcattgcggatattgaacatgtgttacgagcgtgctaaagagattcttggaagaaacaggacgctcatggacgaggtggtagagaaactggttcaaaagaaaagtctaacgaaacaagaattcttcactcttgttgagctctatgggtccagtaaaccaatgccaccgagtatccttgaacttaggaagatcaaacggcttgagctagaagagatggtgctgaaactggacatgactaccgcaagaaacagttcataa

SEQ ID NO: 70131 - protein, 876 aa, Arabidopsis thaliana
  peptide (1)..(876): Ceres Seq. ID no. 2153550
  misc_feature (638)..(835): Pfam Name: Peptidase family M41 Pfam Description: Peptidase family M41
  misc_feature (379)..(772): Homolog of NCBI NO: 17228756 NR Description: cell division protein [Nostoc sp. PCC 7120]
  misc_feature (367)..(771): Homolog of NCBI NO: 33864841 NR Description: cell division protein FtsH2 [Synechococcus sp. WH >gi|33632364|emb|CAE06820.1| cell division protein FtsH2
  misc_feature (366)..(772): Homolog of NCBI NO: 33864065 NR Description: cell division protein FtsH2 [Prochlorococcus str. MIT 9313] >gi|33635649|emb|CAE21973.1| cell division protein
  misc_feature (379)..(772): Homolog of NCBI NO: 22297675 NR Description: cell division protein [Thermosynechococcus BP-1] >gi|22293852|dbj|BAC07684.1| cell division protein
  misc_feature (379)..(772): Homolog of NCBI NO: 16329602 NR Description: cell division protein; FtsH [Synechocystis sp.
  misc_feature (788)..(836): Homolog of NCBI NO: 16329602 NR Description: cell division protein; FtsH [Synechocystis sp.
  misc_feature (788)..(837): Homolog of NCBI NO: 22297675 NR Description: cell division protein [Thermosynechococcus BP-1] >gi|22293852|dbj|BAC07684.1| cell division protein
  misc_feature (788)..(836): Homolog of NCBI NO: 33864065 NR Description: cell division protein FtsH2 [Prochlorococcus str. MIT 9313] >gi|33635649|emb|CAE21973.1| cell division protein
  misc_feature (783)..(836): Homolog of NCBI NO: 33864841 NR Description: cell division protein FtsH2 [Synechococcus sp. WH >gi|33632364|emb|CAE06820.1| cell division protein FtsH2
  misc_feature (788)..(831): Homolog of NCBI NO: 17228756 NR Description: cell division protein [Nostoc sp. PCC 7120]
MACRFPLHSSSPSQFLSPENRQRLPRNYPSISCQNNSATNVVHEDGDDNDKAKTNQVNLLAIPITLTIISASLAKPSFAAAKVTERKRTQKKPQEALTLEQLKAWSKDLPVVSNRIPYTDILSLKAEGKLKHVIKPPNLSLRQKAEPVLVVLEDSRVLRTVLPSLEGNKRFWEQWDELGIDVQCVNAYTPPVKRPPVPSPYLGFLWKVPAYMLTWVKPKKESKRAAELKRMREDFKRQRKEEIETMKEERVMMEKTMKAQKKQQERKKRKAVRKKKYEESLREARKNYRDMADMWARLAQDPNVATALGLVFFYIFYRVVVLNYRKQKKDYEDRLKIEKAEADERKKMRELEREMEGIEEEDEEVEEGTGEKNPYLQMAMQFMKSGARVRRASNKRLPEYLERGVDVKFTDVAGLGKIRLELEEIVKFFTHGEMYRRRGVKIPGGILLCGPPGVGKTLLAKAVAGEAGVNFFSISASQFVEIYVGVGASRVRALYQEARENAPSVVFIDELDAVGRERGLIKGSGGQERDATLNQLLVSLDGFEGRGEVITIASTNRPDILDPALVRPGRFDRKIFIPKPGLIGRMEILQVHARKKPMAEDLDYMAVASMTDGMVGAELANIVEIAAINMMRDGRTELTTDDLLQAAQIEERGMLDRKDRSLETWRQVAINEAAMAVVAVNFPDMKNIEFLTINPRAGRELGYVRVKMDHIKFKEGMLSRQSILDHITVQLAPRAADELWYGEDQLSTIWAETSDNARSAARSLVLGGLSDKHHGLNNFWVADRINDIDVEALRILNMCYERAKEILGRNRTLMDEVVEKLVQKKSLTKQEFFTLVELYGSSKPMPPSILELRKIKRLELEEMVLKLDMTTARNSS

SEQ ID NO: 70132 - protein, 665 aa, Arabidopsis thaliana
  peptide (1)..(665): Ceres Seq. ID no. 2153551
  misc_feature (427)..(624): Pfam Name: Peptidase family M41 Pfam Description: Peptidase family M41
  misc_feature (156)..(560): Homolog of NCBI NO: 33864841 NR Description: cell division protein FtsH2 [Synechococcus sp. WH >gi|33632364|emb|CAE06820.1| cell division protein FtsH2
  misc_feature (572)..(625): Homolog of NCBI NO: 33864841 NR Description: cell division protein FtsH2 [Synechococcus sp. WH >gi|33632364|emb|CAE06820.1| cell division protein FtsH2
  misc_feature (155)..(561): Homolog of NCBI NO: 33864065 NR Description: cell division protein FtsH2 [Prochlorococcus str. MIT 9313] >gi|33635649|emb|CAE21973.1| cell division protein
  misc_feature (577)..(625): Homolog of NCBI NO: 33864065 NR Description: cell division protein FtsH2 [Prochlorococcus str. MIT 9313] >gi|33635649|emb|CAE21973.1| cell division protein
  misc_feature (168)..(561): Homolog of NCBI NO: 22297675 NR Description: cell division protein [Thermosynechococcus BP-1] >gi|22293852|dbj|BAC07684.1| cell division protein
  misc_feature (577)..(626): Homolog of NCBI NO: 22297675 NR Description: cell division protein [Thermosynechococcus BP-1] >gi|22293852|dbj|BAC07684.1| cell division protein
  misc_feature (168)..(561): Homolog of NCBI NO: 16329602 NR Description: cell division protein; FtsH [Synechocystis sp.
  misc_feature (577)..(625): Homolog of NCBI NO: 16329602 NR Description: cell division protein; FtsH [Synechocystis sp.
  misc_feature (168)..(561): Homolog of NCBI NO: 17228756 NR Description: cell division protein [Nostoc sp. PCC 7120]
  misc_feature (577)..(620): Homolog of NCBI NO: 17228756 NR Description: cell division protein [Nostoc sp. PCC 7120]
MLTWVKPKKESKRAAELKRMREDFKRQRKEEIETMKEERVMMEKTMKAQKKQQERKKRKAVRKKKYEESLREARKNYRDMADMWARLAQDPNVATALGLVFFYIFYRVVVLNYRKQKKDYEDRLKIEKAEADERKKMRELEREMEGIEEEDEEVEEGTGEKNPYLQMAMQFMKSGARVRRASNKRLPEYLERGVDVKFTDVAGLGKIRLELEEIVKFFTHGEMYRRRGVKIPGGILLCGPPGVGKTLLAKAVAGEAGVNFFSISASQFVEIYVGVGASRVRALYQEARENAPSVVFIDELDAVGRERGLIKGSGGQERDATLNQLLVSLDGFEGRGEVITIASTNRPDILDPALVRPGRFDRKIFIPKPGLIGRMEILQVHARKKPMAEDLDYMAVASMTDGMVGAELANIVEIAAINMMRDGRTELTTDDLLQAAQIEERGMLDRKDRSLETWRQVAINEAAMAVVAVNFPDMKNIEFLTINPRAGRELGYVRVKMDHIKFKEGMLSRQSILDHITVQLAPRAADELWYGEDQLSTIWAETSDNARSAARSLVLGGLSDKHHGLNNFWVADRINDIDVEALRILNMCYERAKEILGRNRTLMDEVVEKLVQKKSLTKQEFFTLVELYGSSKPMPPSILELRKIKRLELEEMVLKLDMTTARNSS

SEQ ID NO: 70133 - protein, 646 aa, Arabidopsis thaliana
  peptide (1)..(646): Ceres Seq. ID no. 2153552
  misc_feature (408)..(605): Pfam Name: Peptidase family M41 Pfam Description: Peptidase family M41
  misc_feature (137)..(541): Homolog of NCBI NO: 33864841 NR Description: cell division protein FtsH2 [Synechococcus sp. WH >gi|33632364|emb|CAE06820.1| cell division protein FtsH2
  misc_feature (553)..(606): Homolog of NCBI NO: 33864841 NR Description: cell division protein FtsH2 [Synechococcus sp. WH >gi|33632364|emb|CAE06820.1| cell division protein FtsH2
  misc_feature (136)..(542): Homolog of NCBI NO: 33864065 NR Description: cell division protein FtsH2 [Prochlorococcus str. MIT 9313] >gi|33635649|emb|CAE21973.1| cell division protein
  misc_feature (558)..(606): Homolog of NCBI NO: 33864065 NR Description: cell division protein FtsH2 [Prochlorococcus str. MIT 9313] >gi|33635649|emb|CAE21973.1| cell division protein
  misc_feature (149)..(542): Homolog of NCBI NO: 22297675 NR Description: cell division protein [Thermosynechococcus BP-1] >gi|22293852|dbj|BAC07684.1| cell division protein
  misc_feature (558)..(607): Homolog of NCBI NO: 22297675 NR Description: cell division protein [Thermosynechococcus BP-1] >gi|22293852|dbj|BAC07684.1| cell division protein
  misc_feature (149)..(542): Homolog of NCBI NO: 16329602 NR Description: cell division protein; FtsH [Synechocystis sp.
  misc_feature (558)..(606): Homolog of NCBI NO: 16329602 NR Description: cell division protein; FtsH [Synechocystis sp.
  misc_feature (149)..(542): Homolog of NCBI NO: 17228756 NR Description: cell division protein [Nostoc sp. PCC 7120]
  misc_feature (558)..(601): Homolog of NCBI NO: 17228756 NR Description: cell division protein [Nostoc sp. PCC 7120]
MREDFKRQRKEEIETMKEERVMMEKTMKAQKKQQERKKRKAVRKKKYEESLREARKNYRDMADMWARLAQDPNVATALGLVFFYIFYRVVVLNYRKQKKDYEDRLKIEKAEADERKKMRELEREMEGIEEEDEEVEEGTGEKNPYLQMAMQFMKSGARVRRASNKRLPEYLERGVDVKFTDVAGLGKIRLELEEIVKFFTHGEMYRRRGVKIPGGILLCGPPGVGKTLLAKAVAGEAGVNFFSISASQFVEIYVGVGASRVRALYQEARENAPSVVFIDELDAVGRERGLIKGSGGQERDATLNQLLVSLDGFEGRGEVITIASTNRPDILDPALVRPGRFDRKIFIPKPGLIGRMEILQVHARKKPMAEDLDYMAVASMTDGMVGAELANIVEIAAINMMRDGRTELTTDDLLQAAQIEERGMLDRKDRSLETWRQVAINEAAMAVVAVNFPDMKNIEFLTINPRAGRELGYVRVKMDHIKFKEGMLSRQSILDHITVQLAPRAADELWYGEDQLSTIWAETSDNARSAARSLVLGGLSDKHHGLNNFWVADRINDIDVEALRILNMCYERAKEILGRNRTLMDEVVEKLVQKKSLTKQEFFTLVELYGSSKPMPPSILELRKIKRLELEEMVLKLDMTTARNSS

SEQ ID NO: 70134 - DNA, 1476 bp, Arabidopsis thaliana
  misc_feature (1)..(1476): Ceres Seq. ID no. 2156310
  misc_feature: MA Experiment ID: 20000315 Result: Down-regulated in Transcription
  misc_feature: MA Experiment 20000315 PARAMETER Experiment Name: At_14day_Shoots-Roots_Sub_P Parameter: Age (day) Value: 14
  misc_feature: MA Experiment 20000315 PARAMETER Experiment Name: At_14day_Shoots-Roots_Sub_P Parameter: Organism Value: A. thaliana
  misc_feature: MA Experiment 20000315 PARAMETER Experiment Name: At_14day_Shoots-Roots_Sub_P Parameter: Plant Line Value: WS
  misc_feature: MA Experiment 20000315 PARAMETER Experiment Name: At_14day_Shoots-Roots_Sub_P Parameter: Tissue Value: Shoots vs. Whole Plant
  misc_feature: MA Experiment ID: 20000327 Result: Up-regulated in Transcription
  misc_feature: MA Experiment 20000327 PARAMETER Experiment Name: At_42deg_Heat_Sub_P Parameter: Age (day) Value: 14
  misc_feature: MA Experiment 20000327 PARAMETER Experiment Name: At_42deg_Heat_Sub_P Parameter: Organism Value: A. thaliana
  misc_feature: MA Experiment 20000327 PARAMETER Experiment Name: At_42deg_Heat_Sub_P Parameter: Plant Line Value: WS
  misc_feature: MA Experiment 20000327 PARAMETER Experiment Name: At_42deg_Heat_Sub_P Parameter: Temperature (deg C) Value: 42 vs. 22
  misc_feature: MA Experiment 20000327 PARAMETER Experiment Name: At_42deg_Heat_Sub_P Parameter: Timepoint (hr) Value: 1
  misc_feature: MA Experiment 20000327 PARAMETER Experiment Name: At_42deg_Heat_Sub_P Parameter: Tissue Value: Aerial
  misc_feature: MA Experiment ID: 20000328 Result: Up-regulated in Transcription
  misc_feature: MA Experiment 20000328 PARAMETER Experiment Name: At_42deg_Heat_Sub_P Parameter: Age (day) Value: 14
  misc_feature: MA Experiment 20000328 PARAMETER Experiment Name: At_42deg_Heat_Sub_P Parameter: Organism Value: A. thaliana
  misc_feature: MA Experiment 20000328 PARAMETER Experiment Name: At_42deg_Heat_Sub_P Parameter: Plant Line Value: WS
  misc_feature: MA Experiment 20000328 PARAMETER Experiment Name: At_42deg_Heat_Sub_P Parameter: Temperature (deg C) Value: 42 vs. 22
  misc_feature: MA Experiment 20000328 PARAMETER Experiment Name: At_42deg_Heat_Sub_P Parameter: Timepoint (hr) Value: 6
  misc_feature: MA Experiment 20000328 PARAMETER Experiment Name: At_42deg_Heat_Sub_P Parameter: Tissue Value: Aerial
  misc_feature: Pfam Name: PPR Pfam Description: PPR repeat
atgctgattcgttgcgttgcggttgcgaagacgaggttcaacaccaccggcgtagtatcaaggctcgtgtcttcacttgcagatggttcggacacgtcatcagtcgcaaatcggaatagcttgaaggagatactgagaaagaacggtccacgacgcagcgttacctctctgcttcaggaacggatcgattcgggtcatgccgtctctttatcggagctccgattgatttccaagcgtctcattagatcaaatcgttacgatctcgctctccagatgatggagtggatggagaatcaaaaagatattgaatttagtgtttatgacattgctcttagattggatttgatcatcaaaactcatggcttgaaacaaggagaggagtattttgagaagctgctacatagttctgtgtctatgagagtagcgaaatcggcttatcttccgcttcttcgtgcttatgtgaagaataaaatggttaaagaagcggaagctctaatggagaagttgaatggattagggtttcttgttactccacacccgtttaacgaaatgatgaagctttatgaagctagtggtcagtatgagaaagtagttatggttgtttcgatgatgaaagggaataagataccaagaaacgttctttcgtataatctttggatgaatgcatgttgtgaagtgtctggagttgcggctgtggaaacggtttataaggaaatggttggtgataagagtgttgaagttgggtggagttcgttgtgtactttagctaatgtttatattaagagtggttttgatgagaaggctaggttggtgcttgaggatgcggaaaagatgttgaatagaagtaataggcttggatatttctttcttatcacgctttatgcgtctttagggaataaggaaggagttgttcgtttgtgggaagtttctaaatcggtttgtggtaggattagttgtgtgaactacatatgtgtattgtcgtctttggtgaaaactggtgatcttgaagaggctgaaagggtgtttagtgagtgggaggctcaatgttttaactatgatgttagggtctccaatgttcttttgggtgcttatgtgcgtaatggagaaatccggaaagccgagtcattgcatggttgtgtgttggagagaggaggtactccaaactacaagacctgggaaatcttaatggagggatgggtgaaatgtgagaatatggagaaagccattgatgctatgcaccaagtgtttgtactaatgaggcggtgtcattggaggccatcccataacatcgtcatggcgattgccgagtactttgagaaagaggagaaaattgaagaagcaactgcatatgttagagatttgcatcgtcttggtcttgcaagcttaccattatacagattgttacttagaatgcatgaacatgccaaaagaccagcttatgatatctatgaaatgatgaagttggacaaactatga

SEQ ID NO: 70135 - protein, 491 aa, Arabidopsis thaliana
  peptide (1)..(491): Ceres Seq. ID no. 2156311
  misc_feature: Pfam Name: PPR Pfam Description: PPR repeat
  misc_feature (1)..(491): Homolog of NCBI NO: 15240937 NR Description: putative protein; protein id: At5g27460.1
  misc_feature (2)..(474): Homolog of NCBI NO: 22329290 NR Description: hypothetical protein; protein id: At1g02150.1, by cDNA: gi_20453084 [Arabidopsis thaliana]
  misc_feature (2)..(474): Homolog of NCBI NO: 20453085 NR Description: At1g02150/T7I23.8 [Arabidopsis thaliana]
  misc_feature (51)..(491): Homolog of NCBI NO: 15235508 NR Description: hypothetical protein; protein id: At4g02820.1, by cDNA: gi_17064737 [Arabidopsis thaliana]
  misc_feature (51)..(491): Homolog of NCBI NO: 17064738 NR Description: Unknown protein [Arabidopsis thaliana]
  misc_feature (72)..(442): Homolog of NCBI NO: 32488964 NR Description: OSJNBb0038F03.9 [Oryza sativa (japonica
  misc_feature (38)..(489): Homolog of NCBI NO: 37535774 NR Description: putative leaf protein [Oryza sativa (japonica group)] >gi|22165052|gb|AAM93669.1| putative leaf protein [Oryza
  misc_feature (42)..(458): Homolog of NCBI NO: 15225409 NR Description: hypothetical protein; protein id: At2g20710.1
  misc_feature (78)..(447): Homolog of NCBI NO: 15219808 NR Description: hypothetical protein; protein id: At1g60770.1
  misc_feature (50)..(489): Homolog of NCBI NO: 37535776 NR Description: putative leaf protein [Oryza sativa (japonica group)] >gi|22165054|gb|AAM93671.1| putative leaf protein [Oryza
MLIRCVAVAKTRFNTTGVVSRLVSSLADGSDTSSVANRNSLKEILRKNGPRRSVTSLLQERIDSGHAVSLSELRLISKRLIRSNRYDLALQMMEWMENQKDIEFSVYDIALRLDLIIKTHGLKQGEEYFEKLLHSSVSMRVAKSAYLPLLRAYVKNKMVKEAEALMEKLNGLGFLVTPHPFNEMMKLYEASGQYEKVVMVVSMMKGNKIPRNVLSYNLWMNACCEVSGVAAVETVYKEMVGDKSVEVGWSSLCTLANVYIKSGFDEKARLVLEDAEKMLNRSNRLGYFFLITLYASLGNKEGVVRLWEVSKSVCGRISCVNYICVLSSLVKTGDLEEAERVFSEWEAQCFNYDVRVSNVLLGAYVRNGEIRKAESLHGCVLERGGTPNYKTWEILMEGWVKCENMEKAIDAMHQVFVLMRRCHWRPSHNIVMAIAEYFEKEEKIEEATAYVRDLHRLGLASLPLYRLLLRMHEHAKRPAYDIYEMMKLDKL

SEQ ID NO: 70136 - protein, 400 aa, Arabidopsis thaliana
  peptide (1)..(400): Ceres Seq. ID no. 2156312
  misc_feature: Pfam Name: PPR Pfam Description: PPR repeat
  misc_feature (1)..(400): Homolog of NCBI NO: 15240937 NR Description: putative protein; protein id: At5g27460.1
  misc_feature (1)..(383): Homolog of NCBI NO: 22329290 NR Description: hypothetical protein; protein id: At1g02150.1, by cDNA: gi_20453084 [Arabidopsis thaliana]
  misc_feature (1)..(383): Homolog of NCBI NO: 20453085 NR Description: At1g02150/T7I23.8 [Arabidopsis thaliana]
  misc_feature (1)..(400): Homolog of NCBI NO: 15235508 NR Description: hypothetical protein; protein id: At4g02820.1, by cDNA: gi_17064737 [Arabidopsis thaliana]
  misc_feature (1)..(400): Homolog of NCBI NO: 17064738 NR Description: Unknown protein [Arabidopsis thaliana]
  misc_feature (1)..(351): Homolog of NCBI NO: 32488964 NR Description: OSJNBb0038F03.9 [Oryza sativa (japonica
  misc_feature (1)..(398): Homolog of NCBI NO: 37535774 NR Description: putative leaf protein [Oryza sativa (japonica group)] >gi|22165052|gb|AAM93669.1| putative leaf protein [Oryza
  misc_feature (1)..(367): Homolog of NCBI NO: 15225409 NR Description: hypothetical protein; protein id: At2g20710.1
  misc_feature (1)..(356): Homolog of NCBI NO: 15219808 NR Description: hypothetical protein; protein id: At1g60770.1
  misc_feature (1)..(398): Homolog of NCBI NO: 37535776 NR Description: putative leaf protein [Oryza sativa (japonica group)] >gi|22165054|gb|AAM93671.1| putative leaf protein [Oryza
MMEWMENQKDIEFSVYDIALRLDLIIKTHGLKQGEEYFEKLLHSSVSMRVAKSAYLPLLRAYVKNKMVKEAEALMEKLNGLGFLVTPHPFNEMMKLYEASGQYEKVVMVVSMMKGNKIPRNVLSYNLWMNACCEVSGVAAVETVYKEMVGDKSVEVGWSSLCTLANVYIKSGFDEKARLVLEDAEKMLNRSNRLGYFFLITLYASLGNKEGVVRLWEVSKSVCGRISCVNYICVLSSLVKTGDLEEAERVFSEWEAQCFNYDVRVSNVLLGAYVRNGEIRKAESLHGCVLERGGTPNYKTWEILMEGWVKCENMEKAIDAMHQVFVLMRRCHWRPSHNIVMAIAEYFEKEEKIEEATAYVRDLHRLGLASLPLYRLLLRMHEHAKRPAYDIYEMMKLDKL

SEQ ID NO: 70137 - protein, 399 aa, Arabidopsis thaliana
  peptide (1)..(399): Ceres Seq. ID no. 2156313
  misc_feature: Pfam Name: PPR Pfam Description: PPR repeat
  misc_feature (1)..(399): Homolog of NCBI NO: 15240937 NR Description: putative protein; protein id: At5g27460.1
  misc_feature (1)..(382): Homolog of NCBI NO: 22329290 NR Description: hypothetical protein; protein id: At1g02150.1, by cDNA: gi_20453084 [Arabidopsis thaliana]
  misc_feature (1)..(382): Homolog of NCBI NO: 20453085 NR Description: At1g02150/T7I23.8 [Arabidopsis thaliana]
  misc_feature (1)..(399): Homolog of NCBI NO: 15235508 NR Description: hypothetical protein; protein id: At4g02820.1, by cDNA: gi_17064737 [Arabidopsis thaliana]
  misc_feature (1)..(399): Homolog of NCBI NO: 17064738 NR Description: Unknown protein [Arabidopsis thaliana]
  misc_feature (1)..(350): Homolog of NCBI NO: 32488964 NR Description: OSJNBb0038F03.9 [Oryza sativa (japonica
  misc_feature (1)..(397): Homolog of NCBI NO: 37535774 NR Description: putative leaf protein [Oryza sativa (japonica group)] >gi|22165052|gb|AAM93669.1| putative leaf protein [Oryza
  misc_feature (1)..(366): Homolog of NCBI NO: 15225409 NR Description: hypothetical protein; protein id: At2g20710.1
  misc_feature (1)..(355): Homolog of NCBI NO: 15219808 NR Description: hypothetical protein; protein id: At1g60770.1
  misc_feature (1)..(397): Homolog of NCBI NO: 37535776 NR Description: putative leaf protein [Oryza sativa (japonica group)] >gi|22165054|gb|AAM93671.1| putative leaf protein [Oryza
MEWMENQKDIEFSVYDIALRLDLIIKTHGLKQGEEYFEKLLHSSVSMRVAKSAYLPLLRAYVKNKMVKEAEALMEKLNGLGFLVTPHPFNEMMKLYEASGQYEKVVMVVSMMKGNKIPRNVLSYNLWMNACCEVSGVAAVETVYKEMVGDKSVEVGWSSLCTLANVYIKSGFDEKARLVLEDAEKMLNRSNRLGYFFLITLYASLGNKEGVVRLWEVSKSVCGRISCVNYICVLSSLVKTGDLEEAERVFSEWEAQCFNYDVRVSNVLLGAYVRNGEIRKAESLHGCVLERGGTPNYKTWEILMEGWVKCENMEKAIDAMHQVFVLMRRCHWRPSHNIVMAIAEYFEKEEKIEEATAYVRDLHRLGLASLPLYRLLLRMHEHAKRPAYDIYEMMKLDKL

SEQ ID NO: 70138 - DNA, 1068 bp, Arabidopsis thaliana
  misc_feature (1)..(1068): Ceres Seq. ID no. 2156549
  misc_feature: MA Experiment ID: 20000307 Result: Up-regulated in Transcription
  misc_feature: MA Experiment 20000307 PARAMETER Experiment Name: At_Germinating_Seeds_Sub_P Parameter: Age (hr) Value: 24 vs. 0
  misc_feature: MA Experiment 20000307 PARAMETER Experiment Name: At_Germinating_Seeds_Sub_P Parameter: Organism Value: A. thaliana
  misc_feature: MA Experiment 20000307 PARAMETER Experiment Name: At_Germinating_Seeds_Sub_P Parameter: Plant Line Value: WS
  misc_feature: MA Experiment 20000307 PARAMETER Experiment Name: At_Germinating_Seeds_Sub_P Parameter: Tissue Value: Germinating Seeds
  misc_feature: MA Experiment ID: 20000314 Result: Up-regulated in Transcription
  misc_feature: MA Experiment 20000314 PARAMETER Experiment Name: At_14day_Shoots-Roots_Sub_P Parameter: Age (day) Value: 14
  misc_feature: MA Experiment 20000314 PARAMETER Experiment Name: At_14day_Shoots-Roots_Sub_P Parameter: Organism Value: A. thaliana
  misc_feature: MA Experiment 20000314 PARAMETER Experiment Name: At_14day_Shoots-Roots_Sub_P Parameter: Plant Line Value: WS
  misc_feature: MA Experiment 20000314 PARAMETER Experiment Name: At_14day_Shoots-Roots_Sub_P Parameter: Tissue Value: Roots vs. Whole Plant
atggagaagattattgacgtagcttatggtgcatcagtgaaggcgggtttgacgttgttggagaagaatctgttgccggatcttgtcattaggcggctcatacgtctgcttttggccagtcgtctccgttccgtttacaaacccacggcggagatgcaactctccgatctcctccgttttgttgactctctaaagaagatgcctatagctatcaataccgagacggcaaagactcaacactatgaattaccaacagctttcttcgaacatgctcttggaagaaacatcaaatacagctgttgttactattcaaacgattcaagtagcttagaagaggcaggggaagctatgttggctctttcttgtgaaagagctaaagtggaagatggtcaaagtgttcttgatatcggatgtggctggggatctttgactttgtacattgcacgcaagtacagcaaatgcaagttaaccggtatctgcaactccaaaacgcagaaagcatttatcgatgagaaatgccggaaactcgggcttcagaatgtcgaaatcattgctgcggatattagcacttttgagcatgaagggacatacgatcggatattctccatcgaaatgttcgagcatatgaaaaactatggagagctactgaagaagataggaaactggatgaaggaagatagtcttctgtttgttcactatctctgccataagacatatgcttaccactttgaggatgtgaatgacgatgactggatcacaagacacttcttcagcggaggaacaatgccatcagcagatcttctcctatatttccaagaaaatgtttcgattatggatcattggctcgttaacgggacgcattatgcaaagacaagtgaagagtggctgaaaggaatggataaggagatagttgccgtaaaagagataatggaagtgacttatgggaaagaagaagcagtgaagtggacggtttactggagaaccttcttcatcgcgcttgctgagcttttcgcatacaacaatggagacgagtggatgattgcacacttcctcttcaagaagaaatga

SEQ ID NO: 70139 - protein, 355 aa, Arabidopsis thaliana
  peptide (1)..(355): Ceres Seq. ID no. 2156550
  misc_feature (184)..(354): Pfam Name: Cyclopropane-fatty-acyl-phospholipid synthase Pfam Description: Cyclopropane-fatty-acyl-phospholipid synthase
  misc_feature (1)..(355): Homolog of NCBI NO: 30689611 NR Description: expressed protein [Arabidopsis thaliana]
  misc_feature (1)..(355): Homolog of NCBI NO: 21593795 NR Description: coclaurine N-methyltransferase [Arabidopsis
  misc_feature (1)..(355): Homolog of NCBI NO: 18418151 NR Description: putative protein; protein id: At4g33110.1, by cDNA: 4369. [Arabidopsis thaliana] >gi|22531140|gb|AAM97074.1|
  misc_feature (1)..(355): Homolog of NCBI NO: 26451688 NR Description: unknown protein [Arabidopsis thaliana]
  misc_feature (67)..(355): Homolog of NCBI NO: 7486450 NR Description: hypothetical protein F4I10.50 - Arabidopsis >gi|4455326|emb|CAB36786.1| putative protein [Arabidopsis >gi|7270259|emb|CAB80029.1| putative protein [Arabidopsis
  misc_feature (11)..(355): Homolog of NCBI NO: 16754879 NR Description: coclaurine N-methyltransferase [Coptis japonica]
  misc_feature (20)..(355): Homolog of NCBI NO: 33413898 NR Description: S-adenosyl-L-methionine:coclaurine
  misc_feature (19)..(355): Homolog of NCBI NO: 21242125 NR Description: conserved hypothetical protein [Xanthomonas pv. citri str. 306] >gi|21107536|gb|AAM36243.1| conserved
  misc_feature (17)..(354): Homolog of NCBI NO: 39997416 NR Description: cyclopropane-fatty-acyl-phospholipid synthase,
  misc_feature (19)..(355): Homolog of NCBI NO: 21230783 NR Description: conserved hypothetical protein [Xanthomonas pv. campestris str. ATCC 33913] >gi|21112382|gb|AAM40624.1| hypothetical protein [Xanthomonas campestris pv. campestris str.
MEKIIDVAYGASVKAGLTLLEKNLLPDLVIRRLIRLLLASRLRSVYKPTAEMQLSDLLRFVDSLKKMPIAINTETAKTQHYELPTAFFEHALGRNIKYSCCYYSNDSSSLEEAGEAMLALSCERAKVEDGQSVLDIGCGWGSLTLYIARKYSKCKLTGICNSKTQKAFIDEKCRKLGLQNVEIIAADISTFEHEGTYDRIFSIEMFEHMKNYGELLKKIGNWMKEDSLLFVHYLCHKTYAYHFEDVNDDDWITRHFFSGGTMPSADLLLYFQENVSIMDHWLVNGTHYAKTSEEWLKGMDKEIVAVKEIMEVTYGKEEAVKWTVYWRTFFIALAELFAYNNGDEWMIAHFLFKKK

SEQ ID NO: 70140 - protein, 304 aa, Arabidopsis thaliana
  peptide (1)..(304): Ceres Seq. ID no. 2156551
  misc_feature (133)..(303): Pfam Name: Cyclopropane-fatty-acyl-phospholipid synthase Pfam Description: Cyclopropane-fatty-acyl-phospholipid synthase
  misc_feature (1)..(304): Homolog of NCBI NO: 30689611 NR Description: expressed protein [Arabidopsis thaliana]
  misc_feature (1)..(304): Homolog of NCBI NO: 21593795 NR Description: coclaurine N-methyltransferase [Arabidopsis
  misc_feature (1)..(304): Homolog of NCBI NO: 18418151 NR Description: putative protein; protein id: At4g33110.1, by cDNA: 4369. [Arabidopsis thaliana] >gi|22531140|gb|AAM97074.1|
  misc_feature (1)..(304): Homolog of NCBI NO: 26451688 NR Description: unknown protein [Arabidopsis thaliana]
  misc_feature (16)..(304): Homolog of NCBI NO: 7486450 NR Description: hypothetical protein F4I10.50 - Arabidopsis >gi|4455326|emb|CAB36786.1| putative protein [Arabidopsis >gi|7270259|emb|CAB80029.1| putative protein [Arabidopsis
  misc_feature (1)..(304): Homolog of NCBI NO: 16754879 NR Description: coclaurine N-methyltransferase [Coptis japonica]
  misc_feature (1)..(304): Homolog of NCBI NO: 33413898 NR Description: S-adenosyl-L-methionine:coclaurine
  misc_feature (1)..(304): Homolog of NCBI NO: 21242125 NR Description: conserved hypothetical protein [Xanthomonas pv. citri str. 306] >gi|21107536|gb|AAM36243.1| conserved
  misc_feature (1)..(303): Homolog of NCBI NO: 39997416 NR Description: cyclopropane-fatty-acyl-phospholipid synthase,
  misc_feature (1)..(304): Homolog of NCBI NO: 21230783 NR Description: conserved hypothetical protein [Xanthomonas pv. campestris str. ATCC 33913] >gi|21112382|gb|AAM40624.1| hypothetical protein [Xanthomonas campestris pv. campestris str.
MQLSDLLRFVDSLKKMPIAINTETAKTQHYELPTAFFEHALGRNIKYSCCYYSNDSSSLEEAGEAMLALSCERAKVEDGQSVLDIGCGWGSLTLYIARKYSKCKLTGICNSKTQKAFIDEKCRKLGLQNVEIIAADISTFEHEGTYDRIFSIEMFEHMKNYGELLKKIGNWMKEDSLLFVHYLCHKTYAYHFEDVNDDDWITRHFFSGGTMPSADLLLYFQENVSIMDHWLVNGTHYAKTSEEWLKGMDKEIVAVKEIMEVTYGKEEAVKWTVYWRTFFIALAELFAYNNGDEWMIAHFLFKKK

SEQ ID NO: 70141 - protein, 289 aa, Arabidopsis thaliana
  peptide (1)..(289): Ceres Seq. ID no. 2156552
  misc_feature (118)..(288): Pfam Name: Cyclopropane-fatty-acyl-phospholipid synthase Pfam Description: Cyclopropane-fatty-acyl-phospholipid synthase
  misc_feature (1)..(289): Homolog of NCBI NO: 30689611 NR Description: expressed protein [Arabidopsis thaliana]
  misc_feature (1)..(289): Homolog of NCBI NO: 21593795 NR Description: coclaurine N-methyltransferase [Arabidopsis
  misc_feature (1)..(289): Homolog of NCBI NO: 18418151 NR Description: putative protein; protein id: At4g33110.1, by cDNA: 4369. [Arabidopsis thaliana] >gi|22531140|gb|AAM97074.1|
  misc_feature (1)..(289): Homolog of NCBI NO: 26451688 NR Description: unknown protein [Arabidopsis thaliana]
  misc_feature (1)..(289): Homolog of NCBI NO: 7486450 NR Description: hypothetical protein F4I10.50 - Arabidopsis >gi|4455326|emb|CAB36786.1| putative protein [Arabidopsis >gi|7270259|emb|CAB80029.1| putative protein [Arabidopsis
  misc_feature (1)..(289): Homolog of NCBI NO: 16754879 NR Description: coclaurine N-methyltransferase [Coptis japonica]
  misc_feature (1)..(289): Homolog of NCBI NO: 33413898 NR Description: S-adenosyl-L-methionine:coclaurine
  misc_feature (1)..(289): Homolog of NCBI NO: 21242125 NR Description: conserved hypothetical protein [Xanthomonas pv. citri str. 306] >gi|21107536|gb|AAM36243.1| conserved
  misc_feature (1)..(288): Homolog of NCBI NO: 39997416 NR Description: cyclopropane-fatty-acyl-phospholipid synthase,
  misc_feature (1)..(289): Homolog of NCBI NO: 21230783 NR Description: conserved hypothetical protein [Xanthomonas pv. campestris str. ATCC 33913] >gi|21112382|gb|AAM40624.1| hypothetical protein [Xanthomonas campestris pv. campestris str.
MPIAINTETAKTQHYELPTAFFEHALGRNIKYSCCYYSNDSSSLEEAGEAMLALSCERAKVEDGQSVLDIGCGWGSLTLYIARKYSKCKLTGICNSKTQKAFIDEKCRKLGLQNVEIIAADISTFEHEGTYDRIFSIEMFEHMKNYGELLKKIGNWMKEDSLLFVHYLCHKTYAYHFEDVNDDDWITRHFFSGGTMPSADLLLYFQENVSIMDHWLVNGTHYAKTSEEWLKGMDKEIVAVKEIMEVTYGKEEAVKWTVYWRTFFIALAELFAYNNGDEWMIAHFLFKKK

SEQ ID NO: 70142 - DNA, 846 bp, Arabidopsis thaliana
  misc_feature (1)..(846): Ceres Seq. ID no. 2157541
  misc_feature: MA Experiment ID: 20000169 Result: Up-regulated in Transcription
  misc_feature: MA Experiment 20000169 PARAMETER Experiment Name: At_100uM_ABA_P Parameter: Age (day) Value: 14
  misc_feature: MA Experiment 20000169 PARAMETER Experiment Name: At_100uM_ABA_P Parameter: Organism Value: A. thaliana
  misc_feature: MA Experiment 20000169 PARAMETER Experiment Name: At_100uM_ABA_P Parameter: Plant Line Value: WS
  misc_feature: MA Experiment 20000169 PARAMETER Experiment Name: At_100uM_ABA_P Parameter: Timepoint (hr) Value: 6
  misc_feature: MA Experiment 20000169 PARAMETER Experiment Name: At_100uM_ABA_P Parameter: Tissue Value: Aerial
  misc_feature: MA Experiment 20000169 PARAMETER Experiment Name: At_100uM_ABA_P Parameter: Treatment Value: 100uM ABA vs. No Treatment
  misc_feature: MA Experiment ID: 20000171 Result: Up-regulated in Transcription
  misc_feature: MA Experiment 20000171 PARAMETER Experiment Name: At_42deg_Heat_P Parameter: Age (day) Value: 14
  misc_feature: MA Experiment 20000171 PARAMETER Experiment Name: At_42deg_Heat_P Parameter: Organism Value: A. thaliana
  misc_feature: MA Experiment 20000171 PARAMETER Experiment Name: At_42deg_Heat_P Parameter: Plant Line Value: WS
  misc_feature: MA Experiment 20000171 PARAMETER Experiment Name: At_42deg_Heat_P Parameter: Temperature (deg C) Value: 42 vs. 22
  misc_feature: MA Experiment 20000171 PARAMETER Experiment Name: At_42deg_Heat_P Parameter: Timepoint (hr) Value: 1
  misc_feature: MA Experiment 20000171 PARAMETER Experiment Name: At_42deg_Heat_P Parameter: Tissue Value: Aerial
  misc_feature: MA Experiment ID: 20000173 Result: Up-regulated in Transcription
  misc_feature: MA Experiment 20000173 PARAMETER Experiment Name: At_42deg_Heat_P Parameter: Age (day) Value: 14
  misc_feature: MA Experiment 20000173 PARAMETER Experiment Name: At_42deg_Heat_P Parameter: Organism Value: A. thaliana
  misc_feature: MA Experiment 20000173 PARAMETER Experiment Name: At_42deg_Heat_P Parameter: Plant Line Value: WS
  misc_feature: MA Experiment 20000173 PARAMETER Experiment Name: At_42deg_Heat_P Parameter: Temperature (deg C) Value: 42 vs. 22
  misc_feature: MA Experiment 20000173 PARAMETER Experiment Name: At_42deg_Heat_P Parameter: Timepoint (hr) Value: 6
  misc_feature: MA Experiment 20000173 PARAMETER Experiment Name: At_42deg_Heat_P Parameter: Tissue Value: Aerial
  misc_feature: MA Experiment ID: 20000227 Result: Down-regulated in Transcription
  misc_feature: MA Experiment 20000227 PARAMETER Experiment Name: At_Root-Tips-vs-Tops_P Parameter: Tissue Value: Root Tips vs. Root Tops
  misc_feature: MA Experiment ID: 20000234 Result: Down-regulated in Transcription
  misc_feature: MA Experiment 20000234 PARAMETER Experiment Name: At_Siliques_P Parameter: Age (day) Value: 21
  misc_feature: MA Experiment 20000234 PARAMETER Experiment Name: At_Siliques_P Parameter: Organism Value: A. thaliana
  misc_feature: MA Experiment 20000234 PARAMETER Experiment Name: At_Siliques_P Parameter: Plant Line Value: WS
  misc_feature: MA Experiment 20000234 PARAMETER Experiment Name: At_Siliques_P Parameter: Tissue Value: Less Than 5mm Siliques vs. Whole Plant
  misc_feature: MA Experiment ID: 20000235 Result: Down-regulated in Transcription
  misc_feature: MA Experiment 20000235 PARAMETER Experiment Name: At_Siliques_P Parameter: Age (day) Value: 21
  misc_feature: MA Experiment 20000235 PARAMETER Experiment Name: At_Siliques_P Parameter: Organism Value: A. thaliana
  misc_feature: MA Experiment 20000235 PARAMETER Experiment Name: At_Siliques_P Parameter: Plant Line Value: WS
  misc_feature: MA Experiment 20000235 PARAMETER Experiment Name: At_Siliques_P Parameter: Tissue Value: 5-10mm Siliques vs. Whole Plant
  misc_feature: MA Experiment ID: 20000264 Result: Down-regulated in Transcription
  misc_feature: MA Experiment 20000264 PARAMETER Experiment Name: At_Open_Flower_P Parameter: Age (day) Value: 21
  misc_feature: MA Experiment 20000264 PARAMETER Experiment Name: At_Open_Flower_P Parameter: Plant Line Value: WS
  misc_feature: MA Experiment 20000264 PARAMETER Experiment Name: At_Open_Flower_P Parameter: Tissue Value: Open Flower vs. Whole Plant
  misc_feature: MA Experiment ID: 20000265 Result: Down-regulated in Transcription
  misc_feature: MA Experiment 20000265 PARAMETER Experiment Name: At_Open_Flower_P Parameter: Age (day) Value: 21
  misc_feature: MA Experiment 20000265 PARAMETER Experiment Name: At_Open_Flower_P Parameter: Plant Line Value: WS
  misc_feature: MA Experiment 20000265 PARAMETER Experiment Name: At_Open_Flower_P Parameter: Tissue Value: Closed Flower vs. Whole Plant
  misc_feature: MA Experiment ID: 20000267 Result: Up-regulated in Transcription
  misc_feature: MA Experiment 20000267 PARAMETER Experiment Name: At_Drought_P Parameter: Age (day) Value: 7
  misc_feature: MA Experiment 20000267 PARAMETER Experiment Name: At_Drought_P Parameter: Organism Value: A. thaliana
  misc_feature: MA Experiment 20000267 PARAMETER Experiment Name: At_Drought_P Parameter: Plant Line Value: WS
  misc_feature: MA Experiment 20000267 PARAMETER Experiment Name: At_Drought_P Parameter: Timepoint (hr) Value: 6
  misc_feature: MA Experiment 20000267 PARAMETER Experiment Name: At_Drought_P Parameter: Tissue Value: Whole Plant
  misc_feature: MA Experiment 20000267 PARAMETER Experiment Name: At_Drought_P Parameter: Treatment Value: Drought vs. No Drought
  misc_feature: MA Experiment ID: 20000286 Result: Down-regulated in Transcription
  misc_feature: MA Experiment 20000286 PARAMETER Experiment Name: At_Open_Flower_P Parameter: Age (day) Value: 21
  misc_feature: MA Experiment 20000286 PARAMETER Experiment Name: At_Open_Flower_P Parameter: Plant Line Value: WS
  misc_feature: MA Experiment 20000286 PARAMETER Experiment Name: At_Open_Flower_P Parameter: Tissue Value: Half Open vs. Whole Plant
  misc_feature: MA Experiment ID: 20000436 Result: Up-regulated in Transcription
  misc_feature: MA Experiment 20000436 PARAMETER Experiment Name: At_Drought_P Parameter: Age (day) Value: 7
  misc_feature: MA Experiment 20000436 PARAMETER Experiment Name: At_Drought_P Parameter: Organism Value: A. thaliana
  misc_feature: MA Experiment 20000436 PARAMETER Experiment Name: At_Drought_P Parameter: Plant Line Value: WS
  misc_feature: MA Experiment 20000436 PARAMETER Experiment Name: At_Drought_P Parameter: Timepoint (hr) Value: 12
  misc_feature: MA Experiment 20000436 PARAMETER Experiment Name: At_Drought_P Parameter: Tissue Value: Whole Plant
  misc_feature: MA Experiment 20000436 PARAMETER Experiment Name: At_Drought_P Parameter: Treatment Value: Drought vs. No Drought
  misc_feature: MA Experiment ID: 20000437 Result: Up-regulated in Transcription
  misc_feature: MA Experiment 20000437 PARAMETER Experiment Name: At_Drought_P Parameter: Age (day) Value: 8
  misc_feature: MA Experiment 20000437 PARAMETER Experiment Name: At_Drought_P Parameter: Organism Value: A. thaliana
  misc_feature: MA Experiment 20000437 PARAMETER Experiment Name: At_Drought_P Parameter: Plant Line Value: WS
  misc_feature: MA Experiment 20000437 PARAMETER Experiment Name: At_Drought_P Parameter: Timepoint (hr) Value: 24
  misc_feature: MA Experiment 20000437 PARAMETER Experiment Name: At_Drought_P Parameter: Tissue Value: Whole Plant
  misc_feature: MA Experiment 20000437 PARAMETER Experiment Name: At_Drought_P Parameter: Treatment Value: Drought vs. No Drought
  misc_feature: MA Experiment ID: 20000441 Result: Down-regulated in Transcription
  misc_feature: MA Experiment 20000441 PARAMETER Experiment Name: At_1uM_BR-BRZ__P Parameter: Tissue Value: Shoot Apices
  misc_feature: MA Experiment 20000441 PARAMETER Experiment Name: At_1uM_BR-BRZ__P Parameter: Treatment Value: 1uM BR vs. No Treatment
  misc_feature: MA Experiment ID: 20000451 Result: Down-regulated in Transcription
  misc_feature: MA Experiment 20000451 PARAMETER Experiment Name: At_CS6879_Shoots-Roots_P Parameter: Age (day) Value: 14
  misc_feature: MA Experiment 20000451 PARAMETER Experiment Name: At_CS6879_Shoots-Roots_P Parameter: Organism Value: A. thaliana
  misc_feature: MA Experiment 20000451 PARAMETER Experiment Name: At_CS6879_Shoots-Roots_P Parameter: Plant Line Value: CS6879 vs. WS
  misc_feature: MA Experiment 20000451 PARAMETER Experiment Name: At_CS6879_Shoots-Roots_P Parameter: Tissue Value: Roots
  misc_feature: MA Experiment ID: 20000452 Result: Up-regulated in Transcription
  misc_feature: MA Experiment 20000452 PARAMETER Experiment Name: At_CS6879_Shoots-Roots_P Parameter: Age (day) Value: 14
  misc_feature: MA Experiment 20000452 PARAMETER Experiment Name: At_CS6879_Shoots-Roots_P Parameter: Organism Value: A. thaliana
  misc_feature: MA Experiment 20000452 PARAMETER Experiment Name: At_CS6879_Shoots-Roots_P Parameter: Plant Line Value: CS6879 vs. WS
  misc_feature: MA Experiment 20000452 PARAMETER Experiment Name: At_CS6879_Shoots-Roots_P Parameter: Tissue Value: Shoots
  misc_feature: MA Experiment ID: 20000453 Result: Up-regulated in Transcription
  misc_feature: MA Experiment 20000453 PARAMETER Experiment Name: At_100uM_ABA_P Parameter: Age (day) Value: 15
  misc_feature: MA Experiment 20000453 PARAMETER Experiment Name: At_100uM_ABA_P Parameter: Organism Value: A. thaliana
  misc_feature: MA Experiment 20000453 PARAMETER Experiment Name: At_100uM_ABA_P Parameter: Plant Line Value: WS
  misc_feature: MA Experiment 20000453 PARAMETER Experiment Name: At_100uM_ABA_P Parameter: Timepoint (hr) Value: 24
  misc_feature: MA Experiment 20000453 PARAMETER Experiment Name: At_100uM_ABA_P Parameter: Tissue Value: Aerial
  misc_feature: MA Experiment 20000453 PARAMETER Experiment Name: At_100uM_ABA_P Parameter: Treatment Value: 100uM ABA vs. No Treatment
  misc_feature: MA Experiment ID: 20000573 Result: Down-regulated in Transcription
  misc_feature: MA Experiment 20000573 PARAMETER Experiment Name: At_100uM_ABA_Mutants__P Parameter: Organism Value: A. thaliana
  misc_feature: MA Experiment 20000573 PARAMETER Experiment Name: At_100uM_ABA_Mutants__P Parameter: Plant Line Value: CS22 vs. Ler wt
  misc_feature: MA Experiment 20000573 PARAMETER Experiment Name: At_100uM_ABA_Mutants__P Parameter: Timepoint (hr) Value: N/A
  misc_feature: MA Experiment 20000573 PARAMETER Experiment Name: At_100uM_ABA_Mutants__P Parameter: Tissue Value: Whole Plant
  misc_feature: MA Experiment 20000573 PARAMETER Experiment Name: At_100uM_ABA_Mutants__P Parameter: Treatment Value: None
  misc_feature: MA Experiment ID: 20000574 Result: Down-regulated in Transcription
  misc_feature: MA Experiment 20000574 PARAMETER Experiment Name: At_100uM_ABA_Mutants__P Parameter: Organism Value: A. thaliana
  misc_feature: MA Experiment 20000574 PARAMETER Experiment Name: At_100uM_ABA_Mutants__P Parameter: Plant Line Value: CS23 vs. Ler wt
  misc_feature: MA Experiment 20000574 PARAMETER Experiment Name: At_100uM_ABA_Mutants__P Parameter: Timepoint (hr) Value: N/A
  misc_feature: MA Experiment 20000574 PARAMETER Experiment Name: At_100uM_ABA_Mutants__P Parameter: Tissue Value: Whole Plant
  misc_feature: MA Experiment 20000574 PARAMETER Experiment Name: At_100uM_ABA_Mutants__P Parameter: Treatment Value: None
  misc_feature: MA Experiment ID: 20001248 Result: Down-regulated in Transcription
  misc_feature: MA Experiment 20001248 PARAMETER Experiment Name: At_Far-red-induction_P Parameter: Age (day) Value: 7
  misc_feature: MA Experiment 20001248 PARAMETER Experiment Name: At_Far-red-induction_P Parameter: Light Value: Far-red vs. White
  misc_feature: MA Experiment 20001248 PARAMETER Experiment Name: At_Far-red-induction_P Parameter: Organism Value: A. thaliana
  misc_feature: MA Experiment 20001248 PARAMETER Experiment Name: At_Far-red-induction_P Parameter: Plant Line Value: Columbia
  misc_feature: MA Experiment 20001248 PARAMETER Experiment Name: At_Far-red-induction_P Parameter: Timepoint (hr) Value: 4
  misc_feature: MA Experiment 20001248 PARAMETER Experiment Name: At_Far-red-induction_P Parameter: Tissue Value: Whole Plant
  misc_feature: MA Experiment ID: 20001554 Result: Up-regulated in Transcription
  misc_feature: MA Experiment 20001554 PARAMETER Experiment Name: At_Drought_Soil_Dry_P Parameter: Age (day) Value: 21
  misc_feature: MA Experiment 20001554 PARAMETER Experiment Name: At_Drought_Soil_Dry_P Parameter: Organism Value: A. thaliana
  misc_feature: MA Experiment 20001554 PARAMETER Experiment Name: At_Drought_Soil_Dry_P Parameter: Plant Line Value: WS
  misc_feature: MA Experiment 20001554 PARAMETER Experiment Name: At_Drought_Soil_Dry_P Parameter: Post Timepoint (hr) Value: None
  misc_feature: MA Experiment 20001554 PARAMETER Experiment Name: At_Drought_Soil_Dry_P Parameter: Post-Treatment Value: None
  misc_feature: MA Experiment 20001554 PARAMETER Experiment Name: At_Drought_Soil_Dry_P Parameter: Timepoint (day) Value: 7
  misc_feature: MA Experiment 20001554 PARAMETER Experiment Name: At_Drought_Soil_Dry_P Parameter: Treatment Value: Drought vs. No Drought
  misc_feature: MA Experiment ID: 20001555 Result: Up-regulated in Transcription
  misc_feature: MA Experiment 20001555 PARAMETER Experiment Name: At_Drought_Soil_Dry_P Parameter: Age (day) Value: 24
  misc_feature: MA Experiment 20001555 PARAMETER Experiment Name: At_Drought_Soil_Dry_P Parameter: Organism Value: A. thaliana
  misc_feature: MA Experiment 20001555 PARAMETER Experiment Name: At_Drought_Soil_Dry_P Parameter: Plant Line Value: WS
  misc_feature: MA Experiment 20001555 PARAMETER Experiment Name: At_Drought_Soil_Dry_P Parameter: Post Timepoint (hr) Value: None
  misc_feature: MA Experiment 20001555 PARAMETER Experiment Name: At_Drought_Soil_Dry_P Parameter: Post-Treatment Value: None
  misc_feature: MA Experiment 20001555 PARAMETER Experiment Name: At_Drought_Soil_Dry_P Parameter: Timepoint (day) Value: 10
  misc_feature: MA Experiment 20001555 PARAMETER Experiment Name: At_Drought_Soil_Dry_P Parameter: Treatment Value: Drought vs. No Drought
  misc_feature: MA Experiment ID: 20001556 Result: Up-regulated in Transcription
  misc_feature: MA Experiment 20001556 PARAMETER Experiment Name: At_Drought_Soil_Dry_P Parameter: Age (day) Value: 26
  misc_feature: MA Experiment 20001556 PARAMETER Experiment Name: At_Drought_Soil_Dry_P Parameter: Organism Value: A. thaliana
  misc_feature: MA Experiment 20001556 PARAMETER Experiment Name: At_Drought_Soil_Dry_P Parameter: Plant Line Value: WS
  misc_feature: MA Experiment 20001556 PARAMETER Experiment Name: At_Drought_Soil_Dry_P Parameter: Post Timepoint (hr) Value: None
  misc_feature: MA Experiment 20001556 PARAMETER Experiment Name: At_Drought_Soil_Dry_P Parameter: Post-Treatment Value: None
  misc_feature: MA Experiment 20001556 PARAMETER Experiment Name: At_Drought_Soil_Dry_P Parameter: Timepoint (day) Value: 12
  misc_feature: MA Experiment 20001556 PARAMETER Experiment Name: At_Drought_Soil_Dry_P Parameter: Treatment Value: Drought vs. No Drought
  misc_feature: MA Experiment ID: 20001557 Result: Down-regulated in Transcription
  misc_feature: MA Experiment 20001557 PARAMETER Experiment Name: At_Drought_Soil_Dry_P Parameter: Age (day) Value: 27
  misc_feature: MA Experiment 20001557 PARAMETER Experiment Name: At_Drought_Soil_Dry_P Parameter: Organism Value: A. thaliana
  misc_feature: MA Experiment 20001557 PARAMETER Experiment Name: At_Drought_Soil_Dry_P Parameter: Plant Line Value: WS
  misc_feature: MA Experiment 20001557 PARAMETER Experiment Name: At_Drought_Soil_Dry_P Parameter: Post Timepoint (hr) Value: 3
  misc_feature: MA Experiment 20001557 PARAMETER Experiment Name: At_Drought_Soil_Dry_P Parameter: Post-Treatment Value: Re-Water vs. No Drought
  misc_feature: MA Experiment 20001557 PARAMETER Experiment Name: At_Drought_Soil_Dry_P Parameter: Timepoint (day) Value: 13
  misc_feature: MA Experiment 20001557 PARAMETER Experiment Name: At_Drought_Soil_Dry_P Parameter: Treatment Value: Drought vs. No Drought
  misc_feature: MA Experiment ID: 20001558 Result: Down-regulated in Transcription
  misc_feature: MA Experiment 20001558 PARAMETER Experiment Name: At_Drought_Soil_Dry_P Parameter: Age (day) Value: 27
  misc_feature: MA Experiment 20001558 PARAMETER Experiment Name: At_Drought_Soil_Dry_P Parameter: Organism Value: A. thaliana
  misc_feature: MA Experiment 20001558 PARAMETER Experiment Name: At_Drought_Soil_Dry_P Parameter: Plant Line Value: WS
  misc_feature: MA Experiment 20001558 PARAMETER Experiment Name: At_Drought_Soil_Dry_P Parameter: Post Timepoint (hr) Value: 6
  misc_feature: MA Experiment 20001558 PARAMETER Experiment Name: At_Drought_Soil_Dry_P Parameter: Post-Treatment Value: Re-Water vs. No Drought
  misc_feature: MA Experiment 20001558 PARAMETER Experiment Name: At_Drought_Soil_Dry_P Parameter: Timepoint (day) Value: 13
  misc_feature: MA Experiment 20001558 PARAMETER Experiment Name: At_Drought_Soil_Dry_P Parameter: Treatment Value: Drought vs. No Drought
  misc_feature: MA Experiment ID: 20001904 Result: Up-regulated in Transcription
  misc_feature: MA Experiment 20001904 PARAMETER Experiment Name: At_Drought_Reproduction_P Parameter: Age (day) Value: 37
  misc_feature: MA Experiment 20001904 PARAMETER Experiment Name: At_Drought_Reproduction_P Parameter: Organism Value: A. thaliana
  misc_feature: MA Experiment 20001904 PARAMETER Experiment Name: At_Drought_Reproduction_P Parameter: Plant Line Value: WS
  misc_feature: MA Experiment 20001904 PARAMETER Experiment Name: At_Drought_Reproduction_P Parameter: Timepoint (day) Value: 7
  misc_feature: MA Experiment 20001904 PARAMETER Experiment Name: At_Drought_Reproduction_P Parameter: Tissue Value: Rosettes
  misc_feature: MA Experiment 20001904 PARAMETER Experiment Name: At_Drought_Reproduction_P Parameter: Treatment Value: Drought vs. No Drought
  misc_feature: MA Experiment ID: 20001906 Result: Up-regulated in Transcription
  misc_feature: MA Experiment 20001906 PARAMETER Experiment Name: At_Drought_Reproduction_P Parameter: Age (day) Value: 35
  misc_feature: MA Experiment 20001906 PARAMETER Experiment Name: At_Drought_Reproduction_P Parameter: Organism Value: A. thaliana
  misc_feature: MA Experiment 20001906 PARAMETER Experiment Name: At_Drought_Reproduction_P Parameter: Plant Line Value: WS
  misc_feature: MA Experiment 20001906 PARAMETER Experiment Name: At_Drought_Reproduction_P Parameter: Timepoint (day) Value: 5
  misc_feature: MA Experiment 20001906 PARAMETER Experiment Name: At_Drought_Reproduction_P Parameter: Tissue Value: Siliques
  misc_feature: MA Experiment 20001906 PARAMETER Experiment Name: At_Drought_Reproduction_P Parameter: Treatment Value: Drought vs. No Drought
  misc_feature: MA Experiment ID: 20001907 Result: Up-regulated in Transcription
  misc_feature: MA Experiment 20001907 PARAMETER Experiment Name: At_Drought_Reproduction_P Parameter: Age (day) Value: 37
  misc_feature: MA Experiment 20001907 PARAMETER Experiment Name: At_Drought_Reproduction_P Parameter: Organism Value: A. thaliana
  misc_feature: MA Experiment 20001907 PARAMETER Experiment Name: At_Drought_Reproduction_P Parameter: Plant Line Value: WS
  misc_feature: MA Experiment 20001907 PARAMETER Experiment Name: At_Drought_Reproduction_P Parameter: Timepoint (day) Value: 7
  misc_feature: MA Experiment 20001907 PARAMETER Experiment Name: At_Drought_Reproduction_P Parameter: Tissue Value: Siliques
  misc_feature: MA Experiment 20001907 PARAMETER Experiment Name: At_Drought_Reproduction_P Parameter: Treatment Value: Drought vs. No Drought
  misc_feature: MA Experiment ID: 20001910 Result: Up-regulated in Transcription
  misc_feature: MA Experiment 20001910 PARAMETER Experiment Name: At_Drought_Reproduction_P Parameter: Age (day) Value: 37
  misc_feature: MA Experiment 20001910 PARAMETER Experiment Name: At_Drought_Reproduction_P Parameter: Organism Value: A. thaliana
  misc_feature: MA Experiment 20001910 PARAMETER Experiment Name: At_Drought_Reproduction_P Parameter: Plant Line Value: WS
  misc_feature: MA Experiment 20001910 PARAMETER Experiment Name: At_Drought_Reproduction_P Parameter: Timepoint (day) Value: 7
  misc_feature: MA Experiment 20001910 PARAMETER Experiment Name: At_Drought_Reproduction_P Parameter: Tissue Value: Flowers
  misc_feature: MA Experiment 20001910 PARAMETER Experiment Name: At_Drought_Reproduction_P Parameter: Treatment Value: Drought vs. No Drought
  misc_feature: MA Experiment ID: 20001911 Result: Up-regulated in Transcription
  misc_feature: MA Experiment 20001911 PARAMETER Experiment Name: At_Drought_Reproduction_P Parameter: Age (day) Value: 40
  misc_feature: MA Experiment 20001911 PARAMETER Experiment Name: At_Drought_Reproduction_P Parameter: Organism Value: A. thaliana
  misc_feature: MA Experiment 20001911 PARAMETER Experiment Name: At_Drought_Reproduction_P Parameter: Plant Line Value: WS
  misc_feature: MA Experiment 20001911 PARAMETER Experiment Name: At_Drought_Reproduction_P Parameter: Timepoint (day) Value: 10
  misc_feature: MA Experiment 20001911 PARAMETER Experiment Name: At_Drought_Reproduction_P Parameter: Tissue Value: Flowers
  misc_feature: MA Experiment 20001911 PARAMETER Experiment Name: At_Drought_Reproduction_P Parameter: Treatment Value: Drought vs. No Drought
atgagagctcaggttttattatgtccaacaataacagcttatggtcgtctctattgtgcgccacgtagacttcaccgctacaattcatcatcatcatcatctcagtttctgaatctcaatctctctcgcttctccggtgctctcttcttccacatggagcaattccagagtggaactggctcgagcggcaagagagggatggtggaaaatttgaagcggtacggtgtgatatcgtcgaaaagagtagctcaagttatggaggctttagatagaggtctctttgtaccagttggttcttcagcttatgttgatactcctgtacctataggttataatgctaccatttctgctccgcatatgcatgctacttgcttgcagctcttggaagataagctccaccccgggatgcgcgctttagatgtcggctcaggaaccgggtacttgactggctgttttgctttgatggttggagctgagggacgtgttgttggcgtggatcatatccctgaattggttgatatgtctatcaagaatatcgaaaagagtgttgctgcttcctttcttaagaaaggatctctctccttacatgttggggatggaagaaaaggttggcaagagtttgcaccgtatgatgcaatacacgtaggagcagcggcatcagaaatccctcagccccttttggatcagctaaaacccggtggacgaatggtgattccactaggaacctattttcaagagctcaaggtaatcgacaaaaacgaggatggttcaatcaaggtacataccgaaacttcagtccggtatgtgcccctcactagccgtgtcgaacagttaggaggattttga

SEQ ID NO: 70143 - protein, 281 aa, Arabidopsis thaliana
  peptide (1)..(281): Ceres Seq. ID no. 2157542
  misc_feature (61)..(276): Pfam Name: Protein-L-isoaspartate(D-aspartate) Pfam Description: Protein-L-isoaspartate(D-aspartate)
  misc_feature (56)..(281): Homolog of NCBI NO: 26451260 NR Description: unknown protein [Arabidopsis thaliana]
  misc_feature (144)..(281): Homolog of NCBI NO: 15240639 NR Description: putative protein; protein id: At5g50240.1
  misc_feature (1)..(53): Homolog of NCBI NO: 15240639 NR Description: putative protein; protein id: At5g50240.1
  misc_feature (52)..(280): Homolog of NCBI NO: 1322021 NR Description: L-isoaspartyl methyltransferase
  misc_feature (52)..(280): Homolog of NCBI NO: 22331684 NR Description: similar to protein-L-isoaspartate(D-aspartate);
  misc_feature (52)..(278): Homolog of NCBI NO: 38345249 NR Description: OSJNBb0011N17.10 [Oryza sativa (japonica
  misc_feature (52)..(278): Homolog of NCBI NO: 2499570 NR Description: PROTEIN-L-ISOASPARTATE O-METHYLTRANSFERASE
  misc_feature (59)..(277): Homolog of NCBI NO: 417489 NR Description: PROTEIN-L-ISOASPARTATE(D-ASPARTATE)
  misc_feature (59)..(277): Homolog of NCBI NO: 2507187 NR Description: Protein-L-isoaspartate(D-aspartate)
  misc_feature (59)..(277): Homolog of NCBI NO: 29436595 NR Description: protein-L-isoaspartate (D-aspartate)
MRAQVLLCPTITAYGRLYCAPRRLHRYNSSSSSSQFLNLNLSRFSGALFFHMEQFQSGTGSSGKRGMVENLKRYGVISSKRVAQVMEALDRGLFVPVGSSAYVDTPVPIGYNATISAPHMHATCLQLLEDKLHPGMRALDVGSGTGYLTGCFALMVGAEGRVVGVDHIPELVDMSIKNIEKSVAASFLKKGSLSLHVGDGRKGWQEFAPYDAIHVGAAASEIPQPLLDQLKPGGRMVIPLGTYFQELKVIDKNEDGSIKVHTETSVRYVPLTSRVEQLGGF

SEQ ID NO: 70144 - protein, 230 aa, Arabidopsis thaliana
  peptide (1)..(230): Ceres Seq. ID no. 2157543
  misc_feature (10)..(225): Pfam Name: Protein-L-isoaspartate(D-aspartate) Pfam Description: Protein-L-isoaspartate(D-aspartate)
  misc_feature (8)..(226): Homolog of NCBI NO: 4885539 NR Description: protein-L-isoaspartate (D-aspartate) [Homo sapiens] >gi|1332399|dbj|BAA05028.1| PIMT isozyme I [Homo
  misc_feature (5)..(230): Homolog of NCBI NO: 26451260 NR Description: unknown protein [Arabidopsis thaliana]
  misc_feature (93)..(230): Homolog of NCBI NO: 15240639 NR Description: putative protein; protein id: At5g50240.1
  misc_feature (1)..(229): Homolog of NCBI NO: 1322021 NR Description: L-isoaspartyl methyltransferase
  misc_feature (1)..(229): Homolog of NCBI NO: 22331684 NR Description: similar to protein-L-isoaspartate(D-aspartate);
  misc_feature (1)..(227): Homolog of NCBI NO: 38345249 NR Description: OSJNBb0011N17.10 [Oryza sativa (japonica
  misc_feature (1)..(227): Homolog of NCBI NO: 2499570 NR Description: PROTEIN-L-ISOASPARTATE O-METHYLTRANSFERASE
  misc_feature (8)..(226): Homolog of NCBI NO: 417489 NR Description: PROTEIN-L-ISOASPARTATE(D-ASPARTATE)
  misc_feature (8)..(226): Homolog of NCBI NO: 2507187 NR Description: Protein-L-isoaspartate(D-aspartate)
  misc_feature (8)..(226): Homolog of NCBI NO: 29436595 NR Description: protein-L-isoaspartate (D-aspartate)
MEQFQSGTGSSGKRGMVENLKRYGVISSKRVAQVMEALDRGLFVPVGSSAYVDTPVPIGYNATISAPHMHATCLQLLEDKLHPGMRALDVGSGTGYLTGCFALMVGAEGRVVGVDHIPELVDMSIKNIEKSVAASFLKKGSLSLHVGDGRKGWQEFAPYDAIHVGAAASEIPQPLLDQLKPGGRMVIPLGTYFQELKVIDKNEDGSIKVHTETSVRYVPLTSRVEQLGGF

SEQ ID NO: 70145 - protein, 215 aa, Arabidopsis thaliana
  peptide (1)..(215): Ceres Seq. ID no. 2157544
  misc_feature (1)..(210): Pfam Name: Protein-L-isoaspartate(D-aspartate) Pfam Description: Protein-L-isoaspartate(D-aspartate)
  misc_feature (1)..(215): Homolog of NCBI NO: 26451260 NR Description: unknown protein [Arabidopsis thaliana]
  misc_feature (78)..(215): Homolog of NCBI NO: 15240639 NR Description: putative protein; protein id: At5g50240.1
  misc_feature (1)..(214): Homolog of NCBI NO: 1322021 NR Description: L-isoaspartyl methyltransferase
  misc_feature (1)..(214): Homolog of NCBI NO: 22331684 NR Description: similar to protein-L-isoaspartate(D-aspartate);
  misc_feature (1)..(212): Homolog of NCBI NO: 38345249 NR Description: OSJNBb0011N17.10 [Oryza sativa (japonica
  misc_feature (1)..(212): Homolog of NCBI NO: 2499570 NR Description: PROTEIN-L-ISOASPARTATE O-METHYLTRANSFERASE
  misc_feature (1)..(211): Homolog of NCBI NO: 417489 NR Description: PROTEIN-L-ISOASPARTATE(D-ASPARTATE)
  misc_feature (1)..(211): Homolog of NCBI NO: 29436595 NR Description: protein-L-isoaspartate (D-aspartate)
  misc_feature (1)..(211): Homolog of NCBI NO: 2507187 NR Description: Protein-L-isoaspartate(D-aspartate)
  misc_feature (1)..(211): Homolog of NCBI NO: 4885539 NR Description: protein-L-isoaspartate (D-aspartate) [Homo sapiens] >gi|1332399|dbj|BAA05028.1| PIMT isozyme I [Homo
MVENLKRYGVISSKRVAQVMEALDRGLFVPVGSSAYVDTPVPIGYNATISAPHMHATCLQLLEDKLHPGMRALDVGSGTGYLTGCFALMVGAEGRVVGVDHIPELVDMSIKNIEKSVAASFLKKGSLSLHVGDGRKGWQEFAPYDAIHVGAAASEIPQPLLDQLKPGGRMVIPLGTYFQELKVIDKNEDGSIKVHTETSVRYVPLTSRVEQLGGF

SEQ ID NO: 70146 - DNA, 912 bp, Arabidopsis thaliana
  misc_feature (1)..(912): Ceres Seq. ID no. 2157561
  misc_feature: MA Experiment ID: 20001451 Result: Up-regulated in Transcription
  misc_feature: MA Experiment 20001451 PARAMETER Experiment Name: At_Far-red-induction_P Parameter: Age (day) Value: 7
  misc_feature: MA Experiment 20001451 PARAMETER Experiment Name: At_Far-red-induction_P Parameter: Light Value: Far-red vs. White
  misc_feature: MA Experiment 20001451 PARAMETER Experiment Name: At_Far-red-induction_P Parameter: Organism Value: A. thaliana
  misc_feature: MA Experiment 20001451 PARAMETER Experiment Name: At_Far-red-induction_P Parameter: Plant Line Value: Columbia
  misc_feature: MA Experiment 20001451 PARAMETER Experiment Name: At_Far-red-induction_P Parameter: Timepoint (hr) Value: 24
  misc_feature: MA Experiment 20001451 PARAMETER Experiment Name: At_Far-red-induction_P Parameter: Tissue Value: Whole Plant
atgaaaatcttgatcttgattctatcctttgtgacactctttgagatttgcgttgtggacgcatgtcgatcatactgtggaaacataaccgttgattatccgtttgggatccgaaacggatgtgggcatccagggtatagagatctattgttttgtatgaacgatgtgttgatgtttcacataagttcaggttcttatagagttttggacatcgattacgcatatcagtccataacactgcatgatcctcacatgtcgaactgcgaaaccatcgtgctcggtggcaaaggcaatggctttgaagctgaggattggagaactccatatttcaatcctacctcagataatgtctttatgttgatcggatgttctcctaaatctcctatatttcaaggcttcccggaaaagaaagtgccgtgccgcaacatctctggaatgagctgcgaagaatacatgtcatgtccagcttgggacatggtcggatacagacaaccgggtatacattccgggtcaggtccacccatgtgttgtggggtcgggttcgaatccgtaaaagcgattaatctaagtaagttggagtgtgaaggatacagtagtgcgtataatctagcacccttgaaacttagaggaccctctgattgggcttatgggatacgtgttaagtatgaactccaaggaagtgatgcgttttgtcgtgcgtgtgttgcaacttctgggacttgtggctatgaacctgctgatggtggagggcttagacatgtttgcatgtgtgacaaccataattccactacaaactgtgattcagttatatcaccaaccggtgcatcatcaagtgttcgaccaaaagctatcggatcactgatcatctacttcatagctatgaacataggctttcagagaagacagcgatga

SEQ ID NO: 70147 - protein, 303 aa, Arabidopsis thaliana
  peptide (1)..(303): Ceres Seq. ID no. 2157562
  misc_feature (1)..(285): Homolog of NCBI NO: 15240650 NR Description: unknown protein; protein id: At5g50290.1 thaliana] >gi|9759031|dbj|BAB09400.1| gene_id:K6A12.15~unknown
  misc_feature (284)..(303): Homolog of NCBI NO: 15240650 NR Description: unknown protein; protein id: At5g50290.1 thaliana] >gi|9759031|dbj|BAB09400.1| gene_id:K6A12.15~unknown
  misc_feature (5)..(272): Homolog of NCBI NO: 15229029 NR Description: unknown protein; protein id: At3g17350.1 thaliana] >gi|11994552|dbj|BAB02739.1|
  misc_feature (5)..(266): Homolog of NCBI NO: 18391149 NR Description: Expressed protein; protein id: At1g10380.1, by cDNA: 156978., supported by cDNA: gi_16323146 [Arabidopsis >gi|16323147|gb|AAL15308.1| At1g10380/F14N23_32 [Arabidopsis
  misc_feature (5)..(266): Homolog of NCBI NO: 25372857 NR Description: protein F14N23.27 [imported] - Arabidopsis >gi|4914341|gb|AAD32889.1|AC005489_27 F14N23.27 [Arabidopsis
  misc_feature (22)..(266): Homolog of NCBI NO: 18391330 NR Description: Expressed protein; protein id: At1g11915.1, by cDNA: gi_13507566, supported by cDNA: gi_15293302 [Arabidopsis
MKILILILSFVTLFEICVVDACRSYCGNITVDYPFGIRNGCGHPGYRDLLFCMNDVLMFHISSGSYRVLDIDYAYQSITLHDPHMSNCETIVLGGKGNGFEAEDWRTPYFNPTSDNVFMLIGCSPKSPIFQGFPEKKVPCRNISGMSCEEYMSCPAWDMVGYRQPGIHSGSGPPMCCGVGFESVKAINLSKLECEGYSSAYNLAPLKLRGPSDWAYGIRVKYELQGSDAFCRACVATSGTCGYEPADGGGLRHVCMCDNHNSTTNCDSVISPTGASSSVRPKAIGSLIIYFIAMNIGFQRRQR

SEQ ID NO: 70148 - protein, 251 aa, Arabidopsis thaliana
  peptide (1)..(251): Ceres Seq. ID no. 2157563
  misc_feature (1)..(233): Homolog of NCBI NO: 15240650 NR Description: unknown protein; protein id: At5g50290.1 thaliana] >gi|9759031|dbj|BAB09400.1| gene_id:K6A12.15~unknown
  misc_feature (232)..(251): Homolog of NCBI NO: 15240650 NR Description: unknown protein; protein id: At5g50290.1 thaliana] >gi|9759031|dbj|BAB09400.1| gene_id:K6A12.15~unknown
  misc_feature (1)..(220): Homolog of NCBI NO: 15229029 NR Description: unknown protein; protein id: At3g17350.1 thaliana] >gi|11994552|dbj|BAB02739.1|
  misc_feature (1)..(214): Homolog of NCBI NO: 18391149 NR Description: Expressed protein; protein id: At1g10380.1, by cDNA: 156978., supported by cDNA: gi_16323146 [Arabidopsis >gi|16323147|gb|AAL15308.1| At1g10380/F14N23_32 [Arabidopsis
  misc_feature (1)..(214): Homolog of NCBI NO: 25372857 NR Description: protein F14N23.27 [imported] - Arabidopsis >gi|4914341|gb|AAD32889.1|AC005489_27 F14N23.27 [Arabidopsis
  misc_feature (1)..(214): Homolog of NCBI NO: 18391330 NR Description: Expressed protein; protein id: At1g11915.1, by cDNA: gi_13507566, supported by cDNA: gi_15293302 [Arabidopsis
MNDVLMFHISSGSYRVLDIDYAYQSITLHDPHMSNCETIVLGGKGNGFEAEDWRTPYFNPTSDNVFMLIGCSPKSPIFQGFPEKKVPCRNISGMSCEEYMSCPAWDMVGYRQPGIHSGSGPPMCCGVGFESVKAINLSKLECEGYSSAYNLAPLKLRGPSDWAYGIRVKYELQGSDAFCRACVATSGTCGYEPADGGGLRHVCMCDNHNSTTNCDSVISPTGASSSVRPKAIGSLIIYFIAMNIGFQRRQR

SEQ ID NO: 70149 - protein, 246 aa, Arabidopsis thaliana
  peptide (1)..(246): Ceres Seq. ID no. 2157564
  misc_feature (1)..(228): Homolog of NCBI NO: 15240650 NR Description: unknown protein; protein id: At5g50290.1 thaliana] >gi|9759031|dbj|BAB09400.1| gene_id:K6A12.15~unknown
  misc_feature (227)..(246): Homolog of NCBI NO: 15240650 NR Description: unknown protein; protein id: At5g50290.1 thaliana] >gi|9759031|dbj|BAB09400.1| gene_id:K6A12.15~unknown
  misc_feature (1)..(215): Homolog of NCBI NO: 15229029 NR Description: unknown protein; protein id: At3g17350.1 thaliana] >gi|11994552|dbj|BAB02739.1|
  misc_feature (1)..(209): Homolog of NCBI NO: 18391149 NR Description: Expressed protein; protein id: At1g10380.1, by cDNA: 156978., supported by cDNA: gi_16323146 [Arabidopsis >gi|16323147|gb|AAL15308.1| At1g10380/F14N23_32 [Arabidopsis
  misc_feature (1)..(209): Homolog of NCBI NO: 25372857 NR Description: protein F14N23.27 [imported] - Arabidopsis >gi|4914341|gb|AAD32889.1|AC005489_27 F14N23.27 [Arabidopsis
  misc_feature (1)..(209): Homolog of NCBI NO: 18391330 NR Description: Expressed protein; protein id: At1g11915.1, by cDNA: gi_13507566, supported by cDNA: gi_15293302 [Arabidopsis
MFHISSGSYRVLDIDYAYQSITLHDPHMSNCETIVLGGKGNGFEAEDWRTPYFNPTSDNVFMLIGCSPKSPIFQGFPEKKVPCRNISGMSCEEYMSCPAWDMVGYRQPGIHSGSGPPMCCGVGFESVKAINLSKLECEGYSSAYNLAPLKLRGPSDWAYGIRVKYELQGSDAFCRACVATSGTCGYEPADGGGLRHVCMCDNHNSTTNCDSVISPTGASSSVRPKAIGSLIIYFIAMNIGFQRRQR

SEQ ID NO: 70150 - DNA, 2085 bp, Arabidopsis thaliana
  misc_feature (1)..(2085): Ceres Seq. ID no. 2157684
  misc_feature: MA Experiment ID: 20000307 Result: Down-regulated in Transcription
  misc_feature: MA Experiment 20000307 PARAMETER Experiment Name: At_Germinating_Seeds_Sub_P Parameter: Age (hr) Value: 24 vs. 0
  misc_feature: MA Experiment 20000307 PARAMETER Experiment Name: At_Germinating_Seeds_Sub_P Parameter: Organism Value: A. thaliana
  misc_feature: MA Experiment 20000307 PARAMETER Experiment Name: At_Germinating_Seeds_Sub_P Parameter: Plant Line Value: WS
  misc_feature: MA Experiment 20000307 PARAMETER Experiment Name: At_Germinating_Seeds_Sub_P Parameter: Tissue Value: Germinating Seeds
  misc_feature: MA Experiment ID: 20000328 Result: Down-regulated in Transcription
  misc_feature: MA Experiment 20000328 PARAMETER Experiment Name: At_42deg_Heat_Sub_P Parameter: Age (day) Value: 14
  misc_feature: MA Experiment 20000328 PARAMETER Experiment Name: At_42deg_Heat_Sub_P Parameter: Organism Value: A. thaliana
  misc_feature: MA Experiment 20000328 PARAMETER Experiment Name: At_42deg_Heat_Sub_P Parameter: Plant Line Value: WS
  misc_feature: MA Experiment 20000328 PARAMETER Experiment Name: At_42deg_Heat_Sub_P Parameter: Temperature (deg C) Value: 42 vs. 22
  misc_feature: MA Experiment 20000328 PARAMETER Experiment Name: At_42deg_Heat_Sub_P Parameter: Timepoint (hr) Value: 6
  misc_feature: MA Experiment 20000328 PARAMETER Experiment Name: At_42deg_Heat_Sub_P Parameter: Tissue Value: Aerial
atgtcggaagcatcttgtcttgcttctcctttgctctacaccaattctggaatccattctgattctttctacgcttcgcttattgatagtgccactcataaagctcagctgaagcaaatccacgcacgtttacttgttttaggtttgcagttcagtggtttcttgatcaccaagctcattcacgctagctcttcctttggtgacattacttttgcacgccaagtgttcgacgatttacctcgtcctcaaatattcccttggaatgctataatcaggggttattcaaggaacaatcacttccaagatgctcttctcatgtattccaatatgcaactcgctcgtgtttctcctgattctttcactttccctcatcttcttaaagcttgcagcggtttgtctcatcttcagatgggtagattcgttcatgctcaggtgttcaggcttggatttgatgcggatgtgtttgttcagaacggtctcattgccttgtatgcgaaatgtaggcgtttgggatctgcgagaactgtgtttgaaggactgccattgccagagaggacgatagtctcatggactgctatcgtttcagcttatgctcagaacggtgagcctatggaggctcttgagatttttagtcagatgaggaagatggatgtgaagcctgactgggtagctcttgtcagcgttctcaatgctttcacttgcttgcaggatttgaagcaagggagatctattcatgcttctgttgtgaagatgggtcttgaaatagagcctgacttactcatctctctcaacaccatgtatgcaaaatgtggccaagttgcaactgccaagattctgtttgataagatgaagtcacctaacctgattttgtggaacgccatgatctctggctatgcgaagaacggttatgccagggaagctattgatatgtttcatgagatgatcaataaagatgttagacccgacaccatctctataacatctgccatttcggcttgcgctcaagtaggttctcttgagcaggctcgcagtatgtatgaatatgtaggcagaagtgactacagggatgacgttttcataagcagcgcattaatcgatatgtttgctaaatgtggaagtgtagaaggcgcaaggttggtttttgaccgaacacttgacagggatgttgtggtgtggagtgctatgattgttgggtatggattgcacgggcgggcaagagaagcaatcagtctgtaccgtgcaatggagcgtggtggagtacatcccaatgacgtcacttttctggggcttctcatggcctgtaaccattcaggcatggtaagagaaggctggtggtttttcaaccggatggcggatcacaaaataaatccacaacagcaacattatgcatgtgtcattgatcttctcgggcgtgctggtcatctggatcaagcttatgaagtgatcaaatgcatgccggtccagcccggtgtaacggtttggggagcactcctaagcgcttgcaagaagcatcgccacgttgaactgggagaatatgcagctcaacagcttttctcaatagacccatccaacacaggccactatgtacagctctctaatctgtatgctgcagcacgtttgtgggaccgtgttgcagaggtgcgagtgagaatgaaggagaaaggattgaacaaagacgttggatgtagctgggttgaagtaaggggaaggttggaggctttccgagtgggtgataagtcacatccgagatatgaagagatagagagacaagtagagtggatagagagtagattgaaggaaggtggatttgtggctaacaaggatgcttcattgcacgatctcaacgatgaagaagctgaagagactttgtgcagccacagcgagaggatcgcgattgcgtatgggcttataagtacaccccaaggcacaccactgcggatcacaaagaatctgagagcatgcgtaaactgtcatgctgctacaaagcttatctcgaagctagtggacagagagattgttgtgagagatacaaataggttccaccattttaaggatggagtttgttcctgtggtgattattggtaa

SEQ ID NO: 70151 - protein, 694 aa, Arabidopsis thaliana
  peptide (1)..(694): Ceres Seq. ID no. 2157685
  misc_feature (425)..(459): Pfam Name: PPR repeat Pfam Description: PPR repeat
  misc_feature (38)..(694): Homolog of NCBI NO: 15220337 NR Description: hypothetical protein; protein id: At1g11290.1
  misc_feature (15)..(694): Homolog of NCBI NO: 15234006 NR Description: putative protein; protein id: At4g18750.1
  misc_feature (11)..(694): Homolog of NCBI NO: 18418348 NR Description: putative protein; protein id: At4g33990.1
  misc_feature (16)..(694): Homolog of NCBI NO: 34915012 NR Description: P0458A05.10 [Oryza sativa (japonica
  misc_feature (40)..(694): Homolog of NCBI NO: 34903762 NR Description: unnamed protein product [Oryza sativa (japonica group)] >gi|7340873|dbj|BAA92963.1| unnamed protein product
  misc_feature (25)..(694): Homolog of NCBI NO: 37536510 NR Description: hypothetical protein [Oryza sativa (japonica group)] >gi|12039323|gb|AAG46111.1| hypothetical protein [Oryza >gi|31433315|gb|AAP54844.1| hypothetical protein [Oryza sativa
  misc_feature (1)..(694): Homolog of NCBI NO: 34897884 NR Description: Similar to Arabidopsis thaliana DNA chromosome 4,
  misc_feature (9)..(694): Homolog of NCBI NO: 15231617 NR Description: unknown protein; protein id: At3g26780.1
  misc_feature (26)..(694): Homolog of NCBI NO: 15231970 NR Description: unknown protein; protein id: At3g08820.1 thaliana] >gi|6403507|gb|AAF07847.1|AC010871_23 unknown protein
  misc_feature (38)..(694): Homolog of NCBI NO: 11281371 NR Description: hypothetical protein T8H10.30 - Arabidopsis >gi|6706414|emb|CAB66100.1| putative protein [Arabidopsis
MSEASCLASPLLYTNSGIHSDSFYASLIDSATHKAQLKQIHARLLVLGLQFSGFLITKLIHASSSFGDITFARQVFDDLPRPQIFPWNAIIRGYSRNNHFQDALLMYSNMQLARVSPDSFTFPHLLKACSGLSHLQMGRFVHAQVFRLGFDADVFVQNGLIALYAKCRRLGSARTVFEGLPLPERTIVSWTAIVSAYAQNGEPMEALEIFSQMRKMDVKPDWVALVSVLNAFTCLQDLKQGRSIHASVVKMGLEIEPDLLISLNTMYAKCGQVATAKILFDKMKSPNLILWNAMISGYAKNGYAREAIDMFHEMINKDVRPDTISITSAISACAQVGSLEQARSMYEYVGRSDYRDDVFISSALIDMFAKCGSVEGARLVFDRTLDRDVVVWSAMIVGYGLHGRAREAISLYRAMERGGVHPNDVTFLGLLMACNHSGMVREGWWFFNRMADHKINPQQQHYACVIDLLGRAGHLDQAYEVIKCMPVQPGVTVWGALLSACKKHRHVELGEYAAQQLFSIDPSNTGHYVQLSNLYAAARLWDRVAEVRVRMKEKGLNKDVGCSWVEVRGRLEAFRVGDKSHPRYEEIERQVEWIESRLKEGGFVANKDASLHDLNDEEAEETLCSHSERIAIAYGLISTPQGTPLRITKNLRACVNCHAATKLISKLVDREIVVRDTNRFHHFKDGVCSCGDYW

SEQ ID NO: 70152 - protein, 589 aa, Arabidopsis thaliana
  peptide (1)..(589): Ceres Seq. ID no. 2157686
  misc_feature (320)..(354): Pfam Name: PPR repeat Pfam Description: PPR repeat
  misc_feature (1)..(589): Homolog of NCBI NO: 15220337 NR Description: hypothetical protein; protein id: At1g11290.1
  misc_feature (1)..(589): Homolog of NCBI NO: 15234006 NR Description: putative protein; protein id: At4g18750.1
  misc_feature (1)..(589): Homolog of NCBI NO: 18418348 NR Description: putative protein; protein id: At4g33990.1
  misc_feature (1)..(589): Homolog of NCBI NO: 34915012 NR Description: P0458A05.10 [Oryza sativa (japonica
  misc_feature (1)..(589): Homolog of NCBI NO: 34903762 NR Description: unnamed protein product [Oryza sativa (japonica group)] >gi|7340873|dbj|BAA92963.1| unnamed protein product
  misc_feature (1)..(589): Homolog of NCBI NO: 37536510 NR Description: hypothetical protein [Oryza sativa (japonica group)] >gi|12039323|gb|AAG46111.1| hypothetical protein [Oryza >gi|31433315|gb|AAP54844.1| hypothetical protein [Oryza sativa
  misc_feature (1)..(589): Homolog of NCBI NO: 34897884 NR Description: Similar to Arabidopsis thaliana DNA chromosome 4,
  misc_feature (1)..(589): Homolog of NCBI NO: 15231617 NR Description: unknown protein; protein id: At3g26780.1
  misc_feature (1)..(589): Homolog of NCBI NO: 15231970 NR Description: unknown protein; protein id: At3g08820.1 thaliana] >gi|6403507|gb|AAF07847.1|AC010871_23 unknown protein
  misc_feature (1)..(589): Homolog of NCBI NO: 11281371 NR Description: hypothetical protein T8H10.30 - Arabidopsis >gi|6706414|emb|CAB66100.1| putative protein [Arabidopsis
MYSNMQLARVSPDSFTFPHLLKACSGLSHLQMGRFVHAQVFRLGFDADVFVQNGLIALYAKCRRLGSARTVFEGLPLPERTIVSWTAIVSAYAQNGEPMEALEIFSQMRKMDVKPDWVALVSVLNAFTCLQDLKQGRSIHASVVKMGLEIEPDLLISLNTMYAKCGQVATAKILFDKMKSPNLILWNAMISGYAKNGYAREAIDMFHEMINKDVRPDTISITSAISACAQVGSLEQARSMYEYVGRSDYRDDVFISSALIDMFAKCGSVEGARLVFDRTLDRDVVVWSAMIVGYGLHGRAREAISLYRAMERGGVHPNDVTFLGLLMACNHSGMVREGWWFFNRMADHKINPQQQHYACVIDLLGRAGHLDQAYEVIKCMPVQPGVTVWGALLSACKKHRHVELGEYAAQQLFSIDPSNTGHYVQLSNLYAAARLWDRVAEVRVRMKEKGLNKDVGCSWVEVRGRLEAFRVGDKSHPRYEEIERQVEWIESRLKEGGFVANKDASLHDLNDEEAEETLCSHSERIAIAYGLISTPQGTPLRITKNLRACVNCHAATKLISKLVDREIVVRDTNRFHHFKDGVCSCGDYW

SEQ ID NO: 70153 - protein, 585 aa, Arabidopsis thaliana
  peptide (1)..(585): Ceres Seq. ID no. 2157687
  misc_feature (316)..(350): Pfam Name: PPR repeat Pfam Description: PPR repeat
  misc_feature (1)..(585): Homolog of NCBI NO: 15220337 NR Description: hypothetical protein; protein id: At1g11290.1
  misc_feature (1)..(585): Homolog of NCBI NO: 15234006 NR Description: putative protein; protein id: At4g18750.1
  misc_feature (1)..(585): Homolog of NCBI NO: 18418348 NR Description: putative protein; protein id: At4g33990.1
  misc_feature (1)..(585): Homolog of NCBI NO: 34915012 NR Description: P0458A05.10 [Oryza sativa (japonica
  misc_feature (1)..(585): Homolog of NCBI NO: 34903762 NR Description: unnamed protein product [Oryza sativa (japonica group)] >gi|7340873|dbj|BAA92963.1| unnamed protein product
  misc_feature (1)..(585): Homolog of NCBI NO: 37536510 NR Description: hypothetical protein [Oryza sativa (japonica group)] >gi|12039323|gb|AAG46111.1| hypothetical protein [Oryza >gi|31433315|gb|AAP54844.1| hypothetical protein [Oryza sativa
  misc_feature (1)..(585): Homolog of NCBI NO: 34897884 NR Description: Similar to Arabidopsis thaliana DNA chromosome 4,
  misc_feature (1)..(585): Homolog of NCBI NO: 15231617 NR Description: unknown protein; protein id: At3g26780.1
  misc_feature (1)..(585): Homolog of NCBI NO: 15231970 NR Description: unknown protein; protein id: At3g08820.1 thaliana] >gi|6403507|gb|AAF07847.1|AC010871_23 unknown protein
  misc_feature (1)..(585): Homolog of NCBI NO: 11281371 NR Description: hypothetical protein T8H10.30 - Arabidopsis >gi|6706414|emb|CAB66100.1| putative protein [Arabidopsis
MQLARVSPDSFTFPHLLKACSGLSHLQMGRFVHAQVFRLGFDADVFVQNGLIALYAKCRRLGSARTVFEGLPLPERTIVSWTAIVSAYAQNGEPMEALEIFSQMRKMDVKPDWVALVSVLNAFTCLQDLKQGRSIHASVVKMGLEIEPDLLISLNTMYAKCGQVATAKILFDKMKSPNLILWNAMISGYAKNGYAREAIDMFHEMINKDVRPDTISITSAISACAQVGSLEQARSMYEYVGRSDYRDDVFISSALIDMFAKCGSVEGARLVFDRTLDRDVVVWSAMIVGYGLHGRAREAISLYRAMERGGVHPNDVTFLGLLMACNHSGMVREGWWFFNRMADHKINPQQQHYACVIDLLGRAGHLDQAYEVIKCMPVQPGVTVWGALLSACKKHRHVELGEYAAQQLFSIDPSNTGHYVQLSNLYAAARLWDRVAEVRVRMKEKGLNKDVGCSWVEVRGRLEAFRVGDKSHPRYEEIERQVEWIESRLKEGGFVANKDASLHDLNDEEAEETLCSHSERIAIAYGLISTPQGTPLRITKNLRACVNCHAATKLISKLVDREIVVRDTNRFHHFKDGVCSCGDYW

SEQ ID NO: 70154 - DNA, 1965 bp, Arabidopsis thaliana
  misc_feature (1)..(1965): Ceres Seq. ID no. 2158341
  misc_feature: MA Experiment ID: 20000184 Result: Down-regulated in Transcription
  misc_feature: MA Experiment 20000184 PARAMETER Experiment Name: At_Shoots__P Parameter: Age (day) Value: 7
  misc_feature: MA Experiment 20000184 PARAMETER Experiment Name: At_Shoots__P Parameter: Tissue Value: Shoots vs. Whole Plant
  misc_feature: MA Experiment ID: 20000495 Result: Up-regulated in Transcription
  misc_feature: MA Experiment 20000495 PARAMETER Experiment Name: At_Guard_Cells_P Parameter: Harvest Date Value: 8/2/2002
  misc_feature: MA Experiment 20000495 PARAMETER Experiment Name: At_Guard_Cells_P Parameter: Organism Value: A. thaliana
  misc_feature: MA Experiment 20000495 PARAMETER Experiment Name: At_Guard_Cells_P Parameter: Tissue Value: Guard Cells vs. Leaves
  misc_feature: MA Experiment ID: 20000794 Result: Up-regulated in Transcription
  misc_feature: MA Experiment 20000794 PARAMETER Experiment Name: At_Petals_P Parameter: Age (day) Value: 23-25 days
  misc_feature: MA Experiment 20000794 PARAMETER Experiment Name: At_Petals_P Parameter: Plant Line Value: WS
  misc_feature: MA Experiment 20000794 PARAMETER Experiment Name: At_Petals_P Parameter: Tissue Value: Petals vs. Whole plant
atgtcgacgatttgcagccacagagaacttaaagcttatcgtccgctgcaagataataatctacaggaggtgtatgcttcctcagctgctgcagtgcactacgatccagatctgaaagatgtgaacatagttgcgacatacagtgaccattacggcaatatacgccttggtagggtgaaaatgggggatctttcaccttcttgggttttggagaatcctgcctatcaagttagccgcaaaacaaaaggttcgcagctagttataccacgggattcatttcaaaatgatactggaatggaagataatgcaagccattctacaactaatcagactgatgaaagcgaaaatcagtttccaaacgtggattttgcaagcccagcaaaactgaagcggcagattttacgtcaggaaaggagaggtcaacgaactttagagctgatccgacaagaaaaggaaactgatgagcagatgcaagaagcagccattcagaagtcaatgagctttgaaaactcagtcatagggaaatacagtatatggaggagagactatgagagcccaaatgctgatgctatcttgaagcttatgagagaccagatcataatggcaaaagcatatgcaaatattgccaaatcaaaaaatgtaaccaatctgtacgttttcttgatgcagcagtgtggagaaaataaacgtgttataggtaaagcaacctctgatgctgaccttccttcaagcgctcttgatcaagcaaaagccatgggccatgcactctctcttgcaaaagacgagttatatgactgccatgaacttgcaaaaaagttccgggccatccttcagtccactgaacgcaaagtagatggactgaagaaaaagggaaccttcttaattcagctagctgccaaaacatttcccaagccattgcattgcctgagtctgcagctagcggcagactattttattctaggtttcaatgaagaggatgcagtgaaagaggatgtcagtcaaaagaagcttgaagatccttcgctctatcactatgcgatcttttcggataacgttctggctacatcagtggtggtgaactccactgtcttgaatgcaaaggaaccgcagaggcatgtgttccatatagtaactgacaaactgaattttggtgcaatgaagatgtggtttcgcatcaatgctcctgctgatgcgacgattcaagttgaaaacataaatgatttcaagtggctgaactcctcttactgctctgttctacggcagcttgaatctgcaaggctgaaagaatactatttcaaagcaaatcatccttcatcaatctcagctggcgcagataatctaaagtaccgcaacccaaagtatctatcgatgctgaatcatctcagattctaccttcctgaggtttatccgaagctggagaagattctgtttctagacgatgacattgtggtgcagaaggacctggcaccactatgggaaatagacatgcaaggaaaagtgaatggtgcggtggagacgtgcaaggagagcttccacagatttgacaagtacctcaacttctcaaatccaaagatttcagagaattttgacgctggtgcttgtgggtgggcatttgggatgaatatgtttgacctgaaagagtggaggaaacggaacattacagggatatatcactattggcaagacttgaatgaagacagaacactgtggaagctgggatcgttgccaccggggctgataacattttacaacctgacgtatgcaatggataggagctggcacgtactagggctgggatatgacccagcgctaaaccaaacagcaatagagaatgcagcggtagtgcattacaatgggaactacaagccatggctgggtttagcattcgccaagtacaaaccgtactggtccaagtacgttgagtacgacaacccttatctccgacggtgcgacatcaatgaatga

SEQ ID NO: 70155 - protein, 654 aa, Arabidopsis thaliana
  peptide (1)..(654): Ceres Seq. ID no. 2158342
  misc_feature (63)..(654): Homolog of NCBI NO: 15233046 NR Description: putative protein; protein id: At3g61130.1, by cDNA: gi_14517361 [Arabidopsis thaliana]
  misc_feature (125)..(654): Homolog of NCBI NO: 7271113 NR Description: 68 kDa protein [Cicer arietinum]
  misc_feature (133)..(654): Homolog of NCBI NO: 37533460 NR Description: hypothetical protein [Oryza sativa (japonica group)] >gi|20279459|gb|AAM18739.1| hypothetical protein [Oryza
  misc_feature (63)..(591): Homolog of NCBI NO: 14517362 NR Description: AT3g61130/T20K12_30 [Arabidopsis thaliana]
  misc_feature (189)..(653): Homolog of NCBI NO: 10177914 NR Description: emb|CAB71043.1~gene_id:MCA23.10~strong similarity
  misc_feature (189)..(653): Homolog of NCBI NO: 18422837 NR Description: putative protein; protein id: At5g47780.1, by cDNA: gi_15810326, supported by cDNA: gi_20259234 [Arabidopsis >gi|15810327|gb|AAL07051.1| unknown protein [Arabidopsis
  misc_feature (141)..(653): Homolog of NCBI NO: 38423965 NR Description: putative glycosyltransferase [Oryza sativa
  misc_feature (125)..(501): Homolog of NCBI NO: 15227235 NR Description: hypothetical protein; protein id: At2g46480.1
  misc_feature (524)..(654): Homolog of NCBI NO: 15227235 NR Description: hypothetical protein; protein id: At2g46480.1
  misc_feature (241)..(651): Homolog of NCBI NO: 18396159 NR Description: expressed protein; protein id: At3g02350.1, by cDNA: 110819., supported by cDNA: gi_19310440 [Arabidopsis >gi|26394254|sp|Q9FWA4|GLTR_ARATH Probable glycosyltransferase
MSTICSHRELKAYRPLQDNNLQEVYASSAAAVHYDPDLKDVNIVATYSDHYGNIRLGRVKMGDLSPSWVLENPAYQVSRKTKGSQLVIPRDSFQNDTGMEDNASHSTTNQTDESENQFPNVDFASPAKLKRQILRQERRGQRTLELIRQEKETDEQMQEAAIQKSMSFENSVIGKYSIWRRDYESPNADAILKLMRDQIIMAKAYANIAKSKNVTNLYVFLMQQCGENKRVIGKATSDADLPSSALDQAKAMGHALSLAKDELYDCHELAKKFRAILQSTERKVDGLKKKGTFLIQLAAKTFPKPLHCLSLQLAADYFILGFNEEDAVKEDVSQKKLEDPSLYHYAIFSDNVLATSVVVNSTVLNAKEPQRHVFHIVTDKLNFGAMKMWFRINAPADATIQVENINDFKWLNSSYCSVLRQLESARLKEYYFKANHPSSISAGADNLKYRNPKYLSMLNHLRFYLPEVYPKLEKILFLDDDIVVQKDLAPLWEIDMQGKVNGAVETCKESFHRFDKYLNFSNPKISENFDAGACGWAFGMNMFDLKEWRKRNITGIYHYWQDLNEDRTLWKLGSLPPGLITFYNLTYAMDRSWHVLGLGYDPALNQTAIENAAVVHYNGNYKPWLGLAFAKYKPYWSKYVEYDNPYLRRCDINE

SEQ ID NO: 70156 - protein, 594 aa, Arabidopsis thaliana
  peptide (1)..(594): Ceres Seq. ID no. 2158343
  misc_feature (3)..(594): Homolog of NCBI NO: 15233046 NR Description: putative protein; protein id: At3g61130.1, by cDNA: gi_14517361 [Arabidopsis thaliana]
  misc_feature (65)..(594): Homolog of NCBI NO: 7271113 NR Description: 68 kDa protein [Cicer arietinum]
  misc_feature (73)..(594): Homolog of NCBI NO: 37533460 NR Description: hypothetical protein [Oryza sativa (japonica group)] >gi|20279459|gb|AAM18739.1| hypothetical protein [Oryza
  misc_feature (3)..(531): Homolog of NCBI NO: 14517362 NR Description: AT3g61130/T20K12_30 [Arabidopsis thaliana]
  misc_feature (129)..(593): Homolog of NCBI NO: 10177914 NR Description: emb|CAB71043.1~gene_id:MCA23.10~strong similarity
  misc_feature (129)..(593): Homolog of NCBI NO: 18422837 NR Description: putative protein; protein id: At5g47780.1, by cDNA: gi_15810326, supported by cDNA: gi_20259234 [Arabidopsis >gi|15810327|gb|AAL07051.1| unknown protein [Arabidopsis
  misc_feature (81)..(593): Homolog of NCBI NO: 38423965 NR Description: putative glycosyltransferase [Oryza sativa
  misc_feature (65)..(441): Homolog of NCBI NO: 15227235 NR Description: hypothetical protein; protein id: At2g46480.1
  misc_feature (464)..(594): Homolog of NCBI NO: 15227235 NR Description: hypothetical protein; protein id: At2g46480.1
  misc_feature (181)..(591): Homolog of NCBI NO: 18396159 NR Description: expressed protein; protein id: At3g02350.1, by cDNA: 110819., supported by cDNA: gi_19310440 [Arabidopsis >gi|26394254|sp|Q9FWA4|GLTR_ARATH Probable glycosyltransferase
MGDLSPSWVLENPAYQVSRKTKGSQLVIPRDSFQNDTGMEDNASHSTTNQTDESENQFPNVDFASPAKLKRQILRQERRGQRTLELIRQEKETDEQMQEAAIQKSMSFENSVIGKYSIWRRDYESPNADAILKLMRDQIIMAKAYANIAKSKNVTNLYVFLMQQCGENKRVIGKATSDADLPSSALDQAKAMGHALSLAKDELYDCHELAKKFRAILQSTERKVDGLKKKGTFLIQLAAKTFPKPLHCLSLQLAADYFILGFNEEDAVKEDVSQKKLEDPSLYHYAIFSDNVLATSVVVNSTVLNAKEPQRHVFHIVTDKLNFGAMKMWFRINAPADATIQVENINDFKWLNSSYCSVLRQLESARLKEYYFKANHPSSISAGADNLKYRNPKYLSMLNHLRFYLPEVYPKLEKILFLDDDIVVQKDLAPLWEIDMQGKVNGAVETCKESFHRFDKYLNFSNPKISENFDAGACGWAFGMNMFDLKEWRKRNITGIYHYWQDLNEDRTLWKLGSLPPGLITFYNLTYAMDRSWHVLGLGYDPALNQTAIENAAVVHYNGNYKPWLGLAFAKYKPYWSKYVEYDNPYLRRCDINE

SEQ ID NO: 70157 - protein, 556 aa, Arabidopsis thaliana
  peptide (1)..(556): Ceres Seq. ID no. 2158344
  misc_feature (1)..(556): Homolog of NCBI NO: 15233046 NR Description: putative protein; protein id: At3g61130.1, by cDNA: gi_14517361 [Arabidopsis thaliana]
  misc_feature (27)..(556): Homolog of NCBI NO: 7271113 NR Description: 68 kDa protein [Cicer arietinum]
  misc_feature (35)..(556): Homolog of NCBI NO: 37533460 NR Description: hypothetical protein [Oryza sativa (japonica group)] >gi|20279459|gb|AAM18739.1| hypothetical protein [Oryza
  misc_feature (1)..(493): Homolog of NCBI NO: 14517362 NR Description: AT3g61130/T20K12_30 [Arabidopsis thaliana]
  misc_feature (91)..(555): Homolog of NCBI NO: 10177914 NR Description: emb|CAB71043.1~gene_id:MCA23.10~strong similarity
  misc_feature (91)..(555): Homolog of NCBI NO: 18422837 NR Description: putative protein; protein id: At5g47780.1, by cDNA: gi_15810326, supported by cDNA: gi_20259234 [Arabidopsis >gi|15810327|gb|AAL07051.1| unknown protein [Arabidopsis
  misc_feature (43)..(555): Homolog of NCBI NO: 38423965 NR Description: putative glycosyltransferase [Oryza sativa
  misc_feature (27)..(403): Homolog of NCBI NO: 15227235 NR Description: hypothetical protein; protein id: At2g46480.1
  misc_feature (426)..(556): Homolog of NCBI NO: 15227235 NR Description: hypothetical protein; protein id: At2g46480.1
  misc_feature (143)..(553): Homolog of NCBI NO: 18396159 NR Description: expressed protein; protein id: At3g02350.1, by cDNA: 110819., supported by cDNA: gi_19310440 [Arabidopsis >gi|26394254|sp|Q9FWA4|GLTR_ARATH Probable glycosyltransferase
MEDNASHSTTNQTDESENQFPNVDFASPAKLKRQILRQERRGQRTLELIRQEKETDEQMQEAAIQKSMSFENSVIGKYSIWRRDYESPNADAILKLMRDQIIMAKAYANIAKSKNVTNLYVFLMQQCGENKRVIGKATSDADLPSSALDQAKAMGHALSLAKDELYDCHELAKKFRAILQSTERKVDGLKKKGTFLIQLAAKTFPKPLHCLSLQLAADYFILGFNEEDAVKEDVSQKKLEDPSLYHYAIFSDNVLATSVVVNSTVLNAKEPQRHVFHIVTDKLNFGAMKMWFRINAPADATIQVENINDFKWLNSSYCSVLRQLESARLKEYYFKANHPSSISAGADNLKYRNPKYLSMLNHLRFYLPEVYPKLEKILFLDDDIVVQKDLAPLWEIDMQGKVNGAVETCKESFHRFDKYLNFSNPKISENFDAGACGWAFGMNMFDLKEWRKRNITGIYHYWQDLNEDRTLWKLGSLPPGLITFYNLTYAMDRSWHVLGLGYDPALNQTAIENAAVVHYNGNYKPWLGLAFAKYKPYWSKYVEYDNPYLRRCDINE

SEQ ID NO: 70158 - DNA, 2343 bp, Arabidopsis thaliana
  misc_feature (1)..(2343): Ceres Seq. ID no. 2160993
  misc_feature: MA Experiment ID: 20000184 Result: Down-regulated in Transcription
  misc_feature: MA Experiment 20000184 PARAMETER Experiment Name: At_Shoots__P Parameter: Age (day) Value: 7
  misc_feature: MA Experiment 20000184 PARAMETER Experiment Name: At_Shoots__P Parameter: Tissue Value: Shoots vs. Whole Plant
atggagtcaataaaggtttgcatgaacgcactgtgcggagcggcctctacgtcgggcgagtggaaaaaaggctggcctatgcgatccggtgatttagcttctctctgcgataagtgtgggtgtgcatacgagcaatccatattctgtgaagtgttccatgccaaggaatctggttggagagagtgtaattcatgtgacaagcgtcttcactgtggatgcattgcttctagatttatgatggagcttctagagaatggtggtgttacctgtataagttgcgccaagaaatccggactaatttctatgaatgtgagccatgaatctaacggtaaggacttcccctcatttgcttcagcagagcatgtaggcagtgttcttgagaggacaaatctcaagcacttgcttcactttcaaagaatcgaccccactcattcttctcttcaaatgaaacaagaagaatcgctgcttccttccagcctagatgctcttagacacaaaactgaaaggaaagaattgtctgcacagccaaacttgagcatttcacttggacctacgcttatgacaagcccatttcatgatgctgctgttgatgacagaagtaagactaattcgattttccaactggcccctcggtccaggcagctgcttccaaaacctgcaaattcagctcccattgctgctggcatggagcctagtgggagcctggtgtcacagattcatgtcgctcggcctcctccagaaggtcgcgggaagacccaattgcttccccgttactggcctaggattactgaccaagagctgctgcaattatctggacagtatcctcatctctcaaattccaaaattataccactctttgaaaaagttctgagtgcgagcgatgcgggtcgtattggtcgactggttcttccgaaagcatgtgcagaggcatatttcccccctatatctctacccgagggtctcccgttaaagatacaagacataaaagggaaagaatgggtgttccagttcaggttttggcctaataataacagcaggatgtacgttttggagggtgtgactccttgcatacagtccatgcagttgcaagctggtgacactgtaacattcagccgtacagaacctgaaggaaaactcgtaatgggataccgtaaagcgacgaactctacagcgacacagatgttcaagggaagcagtgaacccaatctgaacatgttttccaacagcttgaatccgggatgtggtgacatcaattggtctaaactagagaagtctgaggacatggcaaaggataacttatttcttcagtcgtccttaacttctgctaggaaacgggttcggaacattgggactaagagcaagcgtctgctcattgatagcgtagatgttctggaactgaaaataacttgggaggaggcacaggagctgttgcggcctccccaatccaccaaacccagcatctttacgctggaaaatcaagattttgaagaatatgacgaaccaccagttttcgggaagaggaccctttttgtctcacgtcaaacaggggaacaagagcaatgggtgcagtgtgatgcttgtgggaaatggcgacagctgccggtggatattcttcttccaccaaagtggtcgtgctctgataatctcttggatcctggcaggtcttcatgttccgcacctgatgaactctctccaagagaacaggatacacttgtccggcagagcaaagagttcaaaaggaggagactggcatcatcaaacgaaaagctaaaccagtcgcaggatgcatctgctctgaatagtttaggaaatgcaggcatcaccacaaccggtgaacagggggaaatcacggttgcagccacgaccaagcatccaagacaccgggcagggtgttcgtgcatcgtctgcagccaaccaccgagcggaaaaggcaaacacaagccgtcatgcacttgcactgtgtgcgaggcagtgaagagacgattcaggacgctcatgctgcggaagcggaacaaaggagaggcaggacaggcaagccagcaggcgcagtcacagtcagagtgcagggacgagacagaagtggagagcattccagcggttgaactagccgcaggggaaaacatcgacttgaactcagacccgggggcttcccgagtaagcatgatgaggcttctccaagctgcagcgtttcctctggaagcatatctgaaacaaaaggctatttccaatacagcaggagaacagcaaagcagtgatatggtcagcacagaacacggttcgtcctcagccgcacaagaaactgagaaagacacaacaaatggagctcatgatcctgtgaactaa

SEQ ID NO: 70159 - protein, 780 aa, Arabidopsis thaliana
  peptide (1)..(780): Ceres Seq. ID no. 2160994
  misc_feature (285)..(389): Pfam Name: B3 DNA binding domain Pfam Description: B3 DNA binding domain
  misc_feature (247)..(387): Homolog of NCBI NO: 15234504 NR Description: VP1 like protein; protein id: At4g21550.1
  misc_feature (365)..(697): Homolog of NCBI NO: 34394741 NR Description: VP1/ABI3 family regulatory protein-like [Oryza
  misc_feature (204)..(410): Homolog of NCBI NO: 34394741 NR Description: VP1/ABI3 family regulatory protein-like [Oryza
  misc_feature (5)..(102): Homolog of NCBI NO: 34394741 NR Description: VP1/ABI3 family regulatory protein-like [Oryza
  misc_feature (5)..(766): Homolog of NCBI NO: 30684597 NR Description: transcriptional factor B3 family [Arabidopsis >gi|17064832|gb|AAL32570.1| putative VP1/ABI3 family regulatory
  misc_feature (5)..(766): Homolog of NCBI NO: 25408077 NR Description: probable VP1/ABI3 family regulatory protein - Arabidopsis thaliana >gi|1946371|gb|AAB63089.1| putative
  misc_feature (127)..(393): Homolog of NCBI NO: 34898718 NR Description: similar to VP1/ABI3 family regulatory protein
  misc_feature (437)..(714): Homolog of NCBI NO: 34898718 NR Description: similar to VP1/ABI3 family regulatory protein
  misc_feature (5)..(97): Homolog of NCBI NO: 34898718 NR Description: similar to VP1/ABI3 family regulatory protein
  misc_feature (623)..(773): Homolog of NCBI NO: 34394741 NR Description: VP1/ABI3 family regulatory protein-like [Oryza
MESIKVCMNALCGAASTSGEWKKGWPMRSGDLASLCDKCGCAYEQSIFCEVFHAKESGWRECNSCDKRLHCGCIASRFMMELLENGGVTCISCAKKSGLISMNVSHESNGKDFPSFASAEHVGSVLERTNLKHLLHFQRIDPTHSSLQMKQEESLLPSSLDALRHKTERKELSAQPNLSISLGPTLMTSPFHDAAVDDRSKTNSIFQLAPRSRQLLPKPANSAPIAAGMEPSGSLVSQIHVARPPPEGRGKTQLLPRYWPRITDQELLQLSGQYPHLSNSKIIPLFEKVLSASDAGRIGRLVLPKACAEAYFPPISLPEGLPLKIQDIKGKEWVFQFRFWPNNNSRMYVLEGVTPCIQSMQLQAGDTVTFSRTEPEGKLVMGYRKATNSTATQMFKGSSEPNLNMFSNSLNPGCGDINWSKLEKSEDMAKDNLFLQSSLTSARKRVRNIGTKSKRLLIDSVDVLELKITWEEAQELLRPPQSTKPSIFTLENQDFEEYDEPPVFGKRTLFVSRQTGEQEQWVQCDACGKWRQLPVDILLPPKWSCSDNLLDPGRSSCSAPDELSPREQDTLVRQSKEFKRRRLASSNEKLNQSQDASALNSLGNAGITTTGEQGEITVAATTKHPRHRAGCSCIVCSQPPSGKGKHKPSCTCTVCEAVKRRFRTLMLRKRNKGEAGQASQQAQSQSECRDETEVESIPAVELAAGENIDLNSDPGASRVSMMRLLQAAAFPLEAYLKQKAISNTAGEQQSSDMVSTEHGSSSAAQETEKDTTNGAHDPVN

SEQ ID NO: 70160 - protein, 773 aa, Arabidopsis thaliana
  peptide (1)..(773): Ceres Seq. ID no. 2160995
  misc_feature (278)..(382): Pfam Name: B3 DNA binding domain Pfam Description: B3 DNA binding domain
  misc_feature (358)..(690): Homolog of NCBI NO: 34394741 NR Description: VP1/ABI3 family regulatory protein-like [Oryza
  misc_feature (197)..(403): Homolog of NCBI NO: 34394741 NR Description: VP1/ABI3 family regulatory protein-like [Oryza
  misc_feature (1)..(95): Homolog of NCBI NO: 34394741 NR Description: VP1/ABI3 family regulatory protein-like [Oryza
  misc_feature (1)..(759): Homolog of NCBI NO: 30684597 NR Description: transcriptional factor B3 family [Arabidopsis >gi|17064832|gb|AAL32570.1| putative VP1/ABI3 family regulatory
  misc_feature (1)..(759): Homolog of NCBI NO: 25408077 NR Description: probable VP1/ABI3 family regulatory protein - Arabidopsis thaliana >gi|1946371|gb|AAB63089.1| putative
  misc_feature (120)..(386): Homolog of NCBI NO: 34898718 NR Description: similar to VP1/ABI3 family regulatory protein
  misc_feature (430)..(707): Homolog of NCBI NO: 34898718 NR Description: similar to VP1/ABI3 family regulatory protein
  misc_feature (1)..(90): Homolog of NCBI NO: 34898718 NR Description: similar to VP1/ABI3 family regulatory protein
  misc_feature (616)..(766): Homolog of NCBI NO: 34394741 NR Description: VP1/ABI3 family regulatory protein-like [Oryza
  misc_feature (240)..(380): Homolog of NCBI NO: 15234504 NR Description: VP1 like protein; protein id: At4g21550.1
MNALCGAASTSGEWKKGWPMRSGDLASLCDKCGCAYEQSIFCEVFHAKESGWRECNSCDKRLHCGCIASRFMMELLENGGVTCISCAKKSGLISMNVSHESNGKDFPSFASAEHVGSVLERTNLKHLLHFQRIDPTHSSLQMKQEESLLPSSLDALRHKTERKELSAQPNLSISLGPTLMTSPFHDAAVDDRSKTNSIFQLAPRSRQLLPKPANSAPIAAGMEPSGSLVSQIHVARPPPEGRGKTQLLPRYWPRITDQELLQLSGQYPHLSNSKIIPLFEKVLSASDAGRIGRLVLPKACAEAYFPPISLPEGLPLKIQDIKGKEWVFQFRFWPNNNSRMYVLEGVTPCIQSMQLQAGDTVTFSRTEPEGKLVMGYRKATNSTATQMFKGSSEPNLNMFSNSLNPGCGDINWSKLEKSEDMAKDNLFLQSSLTSARKRVRNIGTKSKRLLIDSVDVLELKITWEEAQELLRPPQSTKPSIFTLENQDFEEYDEPPVFGKRTLFVSRQTGEQEQWVQCDACGKWRQLPVDILLPPKWSCSDNLLDPGRSSCSAPDELSPREQDTLVRQSKEFKRRRLASSNEKLNQSQDASALNSLGNAGITTTGEQGEITVAATTKHPRHRAGCSCIVCSQPPSGKGKHKPSCTCTVCEAVKRRFRTLMLRKRNKGEAGQASQQAQSQSECRDETEVESIPAVELAAGENIDLNSDPGASRVSMMRLLQAAAFPLEAYLKQKAISNTAGEQQSSDMVSTEHGSSSAAQETEKDTTNGAHDPVN

SEQ ID NO: 70161 - protein, 754 aa, Arabidopsis thaliana
  peptide (1)..(754): Ceres Seq. ID no. 2160996
  misc_feature (259)..(363): Pfam Name: B3 DNA binding domain Pfam Description: B3 DNA binding domain
  misc_feature (339)..(671): Homolog of NCBI NO: 34394741 NR Description: VP1/ABI3 family regulatory protein-like [Oryza
  misc_feature (178)..(384): Homolog of NCBI NO: 34394741 NR Description: VP1/ABI3 family regulatory protein-like [Oryza
  misc_feature (1)..(76): Homolog of NCBI NO: 34394741 NR Description: VP1/ABI3 family regulatory protein-like [Oryza
  misc_feature (1)..(740): Homolog of NCBI NO: 30684597 NR Description: transcriptional factor B3 family [Arabidopsis >gi|17064832|gb|AAL32570.1| putative VP1/ABI3 family regulatory
  misc_feature (1)..(740): Homolog of NCBI NO: 25408077 NR Description: probable VP1/ABI3 family regulatory protein - Arabidopsis thaliana >gi|1946371|gb|AAB63089.1| putative
  misc_feature (101)..(367): Homolog of NCBI NO: 34898718 NR Description: similar to VP1/ABI3 family regulatory protein
  misc_feature (411)..(688): Homolog of NCBI NO: 34898718 NR Description: similar to VP1/ABI3 family regulatory protein
  misc_feature (1)..(71): Homolog of NCBI NO: 34898718 NR Description: similar to VP1/ABI3 family regulatory protein
  misc_feature (597)..(747): Homolog of NCBI NO: 34394741 NR Description: VP1/ABI3 family regulatory protein-like [Oryza
  misc_feature (221)..(361): Homolog of NCBI NO: 15234504 NR Description: VP1 like protein; protein id: At4g21550.1
MRSGDLASLCDKCGCAYEQSIFCEVFHAKESGWRECNSCDKRLHCGCIASRFMMELLENGGVTCISCAKKSGLISMNVSHESNGKDFPSFASAEHVGSVLERTNLKHLLHFQRIDPTHSSLQMKQEESLLPSSLDALRHKTERKELSAQPNLSISLGPTLMTSPFHDAAVDDRSKTNSIFQLAPRSRQLLPKPANSAPIAAGMEPSGSLVSQIHVARPPPEGRGKTQLLPRYWPRITDQELLQLSGQYPHLSNSKIIPLFEKVLSASDAGRIGRLVLPKACAEAYFPPISLPEGLPLKIQDIKGKEWVFQFRFWPNNNSRMYVLEGVTPCIQSMQLQAGDTVTFSRTEPEGKLVMGYRKATNSTATQMFKGSSEPNLNMFSNSLNPGCGDINWSKLEKSEDMAKDNLFLQSSLTSARKRVRNIGTKSKRLLIDSVDVLELKITWEEAQELLRPPQSTKPSIFTLENQDFEEYDEPPVFGKRTLFVSRQTGEQEQWVQCDACGKWRQLPVDILLPPKWSCSDNLLDPGRSSCSAPDELSPREQDTLVRQSKEFKRRRLASSNEKLNQSQDASALNSLGNAGITTTGEQGEITVAATTKHPRHRAGCSCIVCSQPPSGKGKHKPSCTCTVCEAVKRRFRTLMLRKRNKGEAGQASQQAQSQSECRDETEVESIPAVELAAGENIDLNSDPGASRVSMMRLLQAAAFPLEAYLKQKAISNTAGEQQSSDMVSTEHGSSSAAQETEKDTTNGAHDPVN

SEQ ID NO: 70162 - DNA, 1362 bp, Arabidopsis thaliana
  misc_feature (1)..(1362): Ceres Seq. ID no. 2162086
  misc_feature: MA Experiment ID: 20000314 Result: Up-regulated in Transcription
  misc_feature: MA Experiment 20000314 PARAMETER Experiment Name: At_14day_Shoots-Roots_Sub_P Parameter: Age (day) Value: 14
  misc_feature: MA Experiment 20000314 PARAMETER Experiment Name: At_14day_Shoots-Roots_Sub_P Parameter: Organism Value: A. thaliana
  misc_feature: MA Experiment 20000314 PARAMETER Experiment Name: At_14day_Shoots-Roots_Sub_P Parameter: Plant Line Value: WS
  misc_feature: MA Experiment 20000314 PARAMETER Experiment Name: At_14day_Shoots-Roots_Sub_P Parameter: Tissue Value: Roots vs. Whole Plant
  misc_feature: MA Experiment ID: 20000328 Result: Down-regulated in Transcription
  misc_feature: MA Experiment 20000328 PARAMETER Experiment Name: At_42deg_Heat_Sub_P Parameter: Age (day) Value: 14
  misc_feature: MA Experiment 20000328 PARAMETER Experiment Name: At_42deg_Heat_Sub_P Parameter: Organism Value: A. thaliana
  misc_feature: MA Experiment 20000328 PARAMETER Experiment Name: At_42deg_Heat_Sub_P Parameter: Plant Line Value: WS
  misc_feature: MA Experiment 20000328 PARAMETER Experiment Name: At_42deg_Heat_Sub_P Parameter: Temperature (deg C) Value: 42 vs. 22
  misc_feature: MA Experiment 20000328 PARAMETER Experiment Name: At_42deg_Heat_Sub_P Parameter: Timepoint (hr) Value: 6
  misc_feature: MA Experiment 20000328 PARAMETER Experiment Name: At_42deg_Heat_Sub_P Parameter: Tissue Value: Aerial
  misc_feature: MA Experiment ID: 20000347 Result: Up-regulated in Transcription
  misc_feature: MA Experiment 20000347 PARAMETER Experiment Name: At_2mM_SA_Sub_P Parameter: Age (day) Value: 14
  misc_feature: MA Experiment 20000347 PARAMETER Experiment Name: At_2mM_SA_Sub_P Parameter: Organism Value: A. thaliana
  misc_feature: MA Experiment 20000347 PARAMETER Experiment Name: At_2mM_SA_Sub_P Parameter: Plant Line Value: WS
  misc_feature: MA Experiment 20000347 PARAMETER Experiment Name: At_2mM_SA_Sub_P Parameter: Timepoint (hr) Value: 6
  misc_feature: MA Experiment 20000347 PARAMETER Experiment Name: At_2mM_SA_Sub_P Parameter: Tissue Value: Aerial
  misc_feature: MA Experiment 20000347 PARAMETER Experiment Name: At_2mM_SA_Sub_P Parameter: Treatment Value: 2mM SA vs. No Treatment
  misc_feature: MA Experiment ID: 20000348 Result: Up-regulated in Transcription
  misc_feature: MA Experiment 20000348 PARAMETER Experiment Name: At_100uM_ABA_Sub_P Parameter: Age (day) Value: 14
  misc_feature: MA Experiment 20000348 PARAMETER Experiment Name: At_100uM_ABA_Sub_P Parameter: Organism Value: A. thaliana
  misc_feature: MA Experiment 20000348 PARAMETER Experiment Name: At_100uM_ABA_Sub_P Parameter: Plant Line Value: WS
  misc_feature: MA Experiment 20000348 PARAMETER Experiment Name: At_100uM_ABA_Sub_P Parameter: Timepoint (hr) Value: 1
  misc_feature: MA Experiment 20000348 PARAMETER Experiment Name: At_100uM_ABA_Sub_P Parameter: Tissue Value: Aerial
  misc_feature: MA Experiment 20000348 PARAMETER Experiment Name: At_100uM_ABA_Sub_P Parameter: Treatment Value: 100uM ABA vs. No Treatment
  misc_feature: MA Experiment ID: 20000440 Result: Up-regulated in Transcription
  misc_feature: MA Experiment 20000440 PARAMETER Experiment Name: At_Closed-Flower__Sub_P Parameter: Tissue Value: Closed Flower vs. Whole Plant
atggaagaactaggagtgaagagaaggatagtattggttccagttccagcacaaggtcatgtaactccgattatgcaactcgggaaggctctttactccaagggcttctccatcactgttgttctcacacagtataatcgagttagctcatccaaggacttctctgattttcatttcctcaccatcccaggcagcttgaccgagtctgatctcaaaaaccttggaccattcaagtttctcttcaagctcaatcaaatttgcgaggcaagcttcaagcaatgtattggtcaactattgcaggagcaaggtaatgatatcgcttgtgtcgtctacgatgagtacatgtacttctcccaagctgcagttaaagagtttcaacttcctagcgtcctcttcagcacgacaagtgctactgcctttgtctgtcgctctgttttgtctagagtcaacgcagagtcattcttgcttgacatgaaagatcccaaagtgtcagacaaggaatttccagggttgcatccgctaaggtacaaggacctgccaacttcagcatttgggccattagagagtatactcaaggtttacagtgagactgtcaacattcgaacagcttcggcagttatcatcaactcaacaagctgtctagagagctcatctttggcatggttacaaaaacaactgcaagttccagtgtatcctataggcccacttcacattgcagcttcagcgccttctagtttacttgaagaggacaggagttgccttgagtggttgaacaagcaaaaaataggctcagtgatttacataagtttgggaagcttggctctaatggaaactaaagacatgttggagatggcttggggtttacgtaatagcaaccaacctttcttatgggtgatccgaccgggttctattcccggctcggaatggacagagtctttaccggaggaattcagtaggttggtttcagaaagaggttacattgtgaaatgggcaccacagatagaagttctcagacatcctgcagtgggagggttttggagtcactgcggatggaactcgaccctagagagcatcggggaaggagttccgatgatctgtaggccttttacgggagatcagaaagtcaatgcgaggtacttagagagagtttggagaattggggttcaattggaaggagagctggataaaggaacagtggagagagctgtagagagattgattatggatgaagaaggagcagaaatgaggaagagagttatcaacttgaaagagaagcttcaagcctctgtcaagagtagaggttcctcattcagctcattagacaactttgtcaattccttaaaaatgatgaatttcatgtag

SEQ ID NO: 70163 - protein, 453 aa, Arabidopsis thaliana
  peptide (1)..(453): Ceres Seq. ID no. 2162087
  misc_feature (9)..(451): Pfam Name: UDP-glucoronosyl and UDP-glucosyl transferase Pfam Description: UDP-glucoronosyl and UDP-glucosyl transferase
  misc_feature (1)..(453): Homolog of NCBI NO: 30697251 NR Description: glycosyltransferase family [Arabidopsis thaliana]
  misc_feature (1)..(447): Homolog of NCBI NO: 15238467 NR Description: glucuronosyl transferase - like protein; protein
  misc_feature (1)..(450): Homolog of NCBI NO: 11258169 NR Description: glucosyltransferase-like protein - Arabidopsis
  misc_feature (1)..(450): Homolog of NCBI NO: 18408251 NR Description: glucosyltransferase-like protein; protein id: supported by cDNA: gi_15081808 [Arabidopsis thaliana]
  misc_feature (1)..(447): Homolog of NCBI NO: 15232620 NR Description: glucuronosyl transferase-like protein; protein At3g46690.1 [Arabidopsis thaliana] >gi|7433909|pir||T12981
  misc_feature (1)..(447): Homolog of NCBI NO: 26449469 NR Description: putative glucuronosyl transferase [Arabidopsis
  misc_feature (1)..(450): Homolog of NCBI NO: 15232618 NR Description: glucosyltransferase-like protein; protein id: supported by cDNA: 120105. [Arabidopsis thaliana]
  misc_feature (1)..(450): Homolog of NCBI NO: 21537102 NR Description: glucosyltransferase-like protein [Arabidopsis
  misc_feature (1)..(445): Homolog of NCBI NO: 15232619 NR Description: glucosyltransferase-like protein; protein id: [Arabidopsis thaliana] >gi|11258173|pir||T45605
  misc_feature (7)..(447): Homolog of NCBI NO: 34900662 NR Description: glucuronosyl transferase-like protein [Oryza
MEELGVKRRIVLVPVPAQGHVTPIMQLGKALYSKGFSITVVLTQYNRVSSSKDFSDFHFLTIPGSLTESDLKNLGPFKFLFKLNQICEASFKQCIGQLLQEQGNDIACVVYDEYMYFSQAAVKEFQLPSVLFSTTSATAFVCRSVLSRVNAESFLLDMKDPKVSDKEFPGLHPLRYKDLPTSAFGPLESILKVYSETVNIRTASAVIINSTSCLESSSLAWLQKQLQVPVYPIGPLHIAASAPSSLLEEDRSCLEWLNKQKIGSVIYISLGSLALMETKDMLEMAWGLRNSNQPFLWVIRPGSIPGSEWTESLPEEFSRLVSERGYIVKWAPQIEVLRHPAVGGFWSHCGWNSTLESIGEGVPMICRPFTGDQKVNARYLERVWRIGVQLEGELDKGTVERAVERLIMDEEGAEMRKRVINLKEKLQASVKSRGSSFSSLDNFVNSLKMMNFM

SEQ ID NO: 70164 - protein, 429 aa, Arabidopsis thaliana
  peptide (1)..(429): Ceres Seq. ID no. 2162088
  misc_feature (1)..(427): Pfam Name: UDP-glucoronosyl and UDP-glucosyl transferase Pfam Description: UDP-glucoronosyl and UDP-glucosyl transferase
  misc_feature (1)..(429): Homolog of NCBI NO: 30697251 NR Description: glycosyltransferase family [Arabidopsis thaliana]
  misc_feature (1)..(423): Homolog of NCBI NO: 15238467 NR Description: glucuronosyl transferase - like protein; protein
  misc_feature (1)..(426): Homolog of NCBI NO: 11258169 NR Description: glucosyltransferase-like protein - Arabidopsis
  misc_feature (1)..(426): Homolog of NCBI NO: 18408251 NR Description: glucosyltransferase-like protein; protein id: supported by cDNA: gi_15081808 [Arabidopsis thaliana]
  misc_feature (1)..(423): Homolog of NCBI NO: 15232620 NR Description: glucuronosyl transferase-like protein; protein At3g46690.1 [Arabidopsis thaliana] >gi|7433909|pir||T12981
  misc_feature (1)..(423): Homolog of NCBI NO: 26449469 NR Description: putative glucuronosyl transferase [Arabidopsis
  misc_feature (1)..(426): Homolog of NCBI NO: 15232618 NR Description: glucosyltransferase-like protein; protein id: supported by cDNA: 120105. [Arabidopsis thaliana]
  misc_feature (1)..(426): Homolog of NCBI NO: 21537102 NR Description: glucosyltransferase-like protein [Arabidopsis
  misc_feature (1)..(421): Homolog of NCBI NO: 15232619 NR Description: glucosyltransferase-like protein; protein id: [Arabidopsis thaliana] >gi|11258173|pir||T45605
  misc_feature (1)..(423): Homolog of NCBI NO: 34900662 NR Description: glucuronosyl transferase-like protein [Oryza
MQLGKALYSKGFSITVVLTQYNRVSSSKDFSDFHFLTIPGSLTESDLKNLGPFKFLFKLNQICEASFKQCIGQLLQEQGNDIACVVYDEYMYFSQAAVKEFQLPSVLFSTTSATAFVCRSVLSRVNAESFLLDMKDPKVSDKEFPGLHPLRYKDLPTSAFGPLESILKVYSETVNIRTASAVIINSTSCLESSSLAWLQKQLQVPVYPIGPLHIAASAPSSLLEEDRSCLEWLNKQKIGSVIYISLGSLALMETKDMLEMAWGLRNSNQPFLWVIRPGSIPGSEWTESLPEEFSRLVSERGYIVKWAPQIEVLRHPAVGGFWSHCGWNSTLESIGEGVPMICRPFTGDQKVNARYLERVWRIGVQLEGELDKGTVERAVERLIMDEEGAEMRKRVINLKEKLQASVKSRGSSFSSLDNFVNSLKMMNFM

SEQ ID NO: 70165 - protein, 339 aa, Arabidopsis thaliana
  peptide (1)..(339): Ceres Seq. ID no. 2162089
  misc_feature (1)..(337): Pfam Name: UDP-glucoronosyl and UDP-glucosyl transferase Pfam Description: UDP-glucoronosyl and UDP-glucosyl transferase
  misc_feature (1)..(339): Homolog of NCBI NO: 30697251 NR Description: glycosyltransferase family [Arabidopsis thaliana]
  misc_feature (1)..(333): Homolog of NCBI NO: 15238467 NR Description: glucuronosyl transferase - like protein; protein
  misc_feature (1)..(336): Homolog of NCBI NO: 11258169 NR Description: glucosyltransferase-like protein - Arabidopsis
  misc_feature (1)..(336): Homolog of NCBI NO: 18408251 NR Description: glucosyltransferase-like protein; protein id: supported by cDNA: gi_15081808 [Arabidopsis thaliana]
  misc_feature (1)..(333): Homolog of NCBI NO: 15232620 NR Description: glucuronosyl transferase-like protein; protein At3g46690.1 [Arabidopsis thaliana] >gi|7433909|pir||T12981
  misc_feature (1)..(333): Homolog of NCBI NO: 26449469 NR Description: putative glucuronosyl transferase [Arabidopsis
  misc_feature (1)..(336): Homolog of NCBI NO: 15232618 NR Description: glucosyltransferase-like protein; protein id: supported by cDNA: 120105. [Arabidopsis thaliana]
  misc_feature (1)..(336): Homolog of NCBI NO: 21537102 NR Description: glucosyltransferase-like protein [Arabidopsis
  misc_feature (1)..(331): Homolog of NCBI NO: 15232619 NR Description: glucosyltransferase-like protein; protein id: [Arabidopsis thaliana] >gi|11258173|pir||T45605
  misc_feature (1)..(333): Homolog of NCBI NO: 34900662 NR Description: glucuronosyl transferase-like protein [Oryza
MYFSQAAVKEFQLPSVLFSTTSATAFVCRSVLSRVNAESFLLDMKDPKVSDKEFPGLHPLRYKDLPTSAFGPLESILKVYSETVNIRTASAVIINSTSCLESSSLAWLQKQLQVPVYPIGPLHIAASAPSSLLEEDRSCLEWLNKQKIGSVIYISLGSLALMETKDMLEMAWGLRNSNQPFLWVIRPGSIPGSEWTESLPEEFSRLVSERGYIVKWAPQIEVLRHPAVGGFWSHCGWNSTLESIGEGVPMICRPFTGDQKVNARYLERVWRIGVQLEGELDKGTVERAVERLIMDEEGAEMRKRVINLKEKLQASVKSRGSSFSSLDNFVNSLKMMNFM

SEQ ID NO: 70166 - DNA, 1218 bp, Arabidopsis thaliana
  misc_feature (1)..(1218): Ceres Seq. ID no. 2162652
  misc_feature: MA Experiment ID: 20000171 Result: Up-regulated in Transcription
  misc_feature: MA Experiment 20000171 PARAMETER Experiment Name: At_42deg_Heat_P Parameter: Age (day) Value: 14
  misc_feature: MA Experiment 20000171 PARAMETER Experiment Name: At_42deg_Heat_P Parameter: Organism Value: A. thaliana
  misc_feature: MA Experiment 20000171 PARAMETER Experiment Name: At_42deg_Heat_P Parameter: Plant Line Value: WS
  misc_feature: MA Experiment 20000171 PARAMETER Experiment Name: At_42deg_Heat_P Parameter: Temperature (deg C) Value: 42 vs. 22
  misc_feature: MA Experiment 20000171 PARAMETER Experiment Name: At_42deg_Heat_P Parameter: Timepoint (hr) Value: 1
  misc_feature: MA Experiment 20000171 PARAMETER Experiment Name: At_42deg_Heat_P Parameter: Tissue Value: Aerial
  misc_feature: MA Experiment ID: 20000173 Result: Up-regulated in Transcription
  misc_feature: MA Experiment 20000173 PARAMETER Experiment Name: At_42deg_Heat_P Parameter: Age (day) Value: 14
  misc_feature: MA Experiment 20000173 PARAMETER Experiment Name: At_42deg_Heat_P Parameter: Organism Value: A. thaliana
  misc_feature: MA Experiment 20000173 PARAMETER Experiment Name: At_42deg_Heat_P Parameter: Plant Line Value: WS
  misc_feature: MA Experiment 20000173 PARAMETER Experiment Name: At_42deg_Heat_P Parameter: Temperature (deg C) Value: 42 vs. 22
  misc_feature: MA Experiment 20000173 PARAMETER Experiment Name: At_42deg_Heat_P Parameter: Timepoint (hr) Value: 6
  misc_feature: MA Experiment 20000173 PARAMETER Experiment Name: At_42deg_Heat_P Parameter: Tissue Value: Aerial
atggaagaagataaccaagaaatacaacgtgacaatgtcggatcttcatctttctttaaaacatgtttcaacgcactcaatgctctttcaggaattggaatattatcggtaccatattcacttgctcgtggaggatggttgagtctttcacttttgttactcctagccgtaaccgccttctacacatccttactcattacaaaatgtatgaatgcggaccgcaacatcaaaacatatcccgacataggagaacgcgcatttggtagaccgggaagaatcattgtgtcagtcttcatgcacctagagctctatctagtcaccacgggtttcttgatcctcgagggcgacaatcttcacaatcttttcccgggttttaccatcgaaatgatcggattgagattgaatggcaaacaagctttcatggcgaccgtcgcctttgtcattatgccaactctatggtgggataatctcagcgtcttgtcgtatgtttctatgagtggcgttttagctacgactgtgacgcttggatcaatatcttggattggcgcatttgatgggattgggtttcatcaaaaaggaaagttgataaattggagtgggatccctactgctttgagcttatatgctttttgctatggtgcgcatccagttttgcccactttgtattcttctatgaaaagcaaacatcagttcaacaatgtcctactaatatgttttatattatgcaccataggatacacatcaatggcagttttgggctacttaatgtatggatcacaaacattatcacaaataacactgaatcttccaattcataagacgagttcgaaggtggcaatatacacaactctcgtaaacccggtagccaaatacgcactgatgatcacaccaaccgtgaacactataaaagattggtttccttcacggtactccaaaaaggcatacttacatctcttgataagcacatttttcatcataagtagtgtcgtgatcgccgagacacttcccttttttggttatatgatgtcgctggttggagcattattgagcgttacggtttctatacttctgccttgtttatgttacttgaagatctttggaaactacaagaaaattgggtgtgagactataatgttgtttggaatggtagtgatgagtgtttttgttggggtaataggtacttacattgcacttcgagatataattggtagtgtataa

SEQ ID NO: 70167 - protein, 405 aa, Arabidopsis thaliana
  peptide (1)..(405): Ceres Seq. ID no. 2162653
  misc_feature (1)..(402): Homolog of NCBI NO: 7939546 NR Description: gb|AAC79623.2~gene_id:K5K13.9~similar to unknown
  misc_feature (1)..(236): Homolog of NCBI NO: 15228542 NR Description: hypothetical protein; protein id: At3g28960.1
  misc_feature (247)..(405): Homolog of NCBI NO: 15228542 NR Description: hypothetical protein; protein id: At3g28960.1
  misc_feature (4)..(403): Homolog of NCBI NO: 15242252 NR Description: putative protein; protein id: At5g15240.1
  misc_feature (9)..(401): Homolog of NCBI NO: 38344962 NR Description: OSJNBa0072F16.7 [Oryza sativa (japonica
  misc_feature (20)..(402): Homolog of NCBI NO: 38344961 NR Description: OSJNBa0072F16.6 [Oryza sativa (japonica
  misc_feature (2)..(404): Homolog of NCBI NO: 15290054 NR Description: P0025A05.3 [Oryza sativa (japonica
  misc_feature (16)..(404): Homolog of NCBI NO: 34912160 NR Description: P0712E02.23 [Oryza sativa (japonica
  misc_feature (13)..(404): Homolog of NCBI NO: 20521331 NR Description: B1103C09.36 [Oryza sativa (japonica
  misc_feature (17)..(402): Homolog of NCBI NO: 18405629 NR Description: expressed protein; protein id: At2g41190.1, by cDNA: gi_14532707, supported by cDNA: gi_19310728 [Arabidopsis >gi|14532708|gb|AAK64155.1| unknown protein [Arabidopsis
MEEDNQEIQRDNVGSSSFFKTCFNALNALSGIGILSVPYSLARGGWLSLSLLLLLAVTAFYTSLLITKCMNADRNIKTYPDIGERAFGRPGRIIVSVFMHLELYLVTTGFLILEGDNLHNLFPGFTIEMIGLRLNGKQAFMATVAFVIMPTLWWDNLSVLSYVSMSGVLATTVTLGSISWIGAFDGIGFHQKGKLINWSGIPTALSLYAFCYGAHPVLPTLYSSMKSKHQFNNVLLICFILCTIGYTSMAVLGYLMYGSQTLSQITLNLPIHKTSSKVAIYTTLVNPVAKYALMITPTVNTIKDWFPSRYSKKAYLHLLISTFFIISSVVIAETLPFFGYMMSLVGALLSVTVSILLPCLCYLKIFGNYKKIGCETIMLFGMVVMSVFVGVIGTYIALRDIIGSV

SEQ ID NO: 70168 - protein, 336 aa, Arabidopsis thaliana
  peptide (1)..(336): Ceres Seq. ID no. 2162654
  misc_feature (1)..(333): Homolog of NCBI NO: 7939546 NR Description: gb|AAC79623.2~gene_id:K5K13.9~similar to unknown
  misc_feature (1)..(167): Homolog of NCBI NO: 15228542 NR Description: hypothetical protein; protein id: At3g28960.1
  misc_feature (178)..(336): Homolog of NCBI NO: 15228542 NR Description: hypothetical protein; protein id: At3g28960.1
  misc_feature (1)..(334): Homolog of NCBI NO: 15242252 NR Description: putative protein; protein id: At5g15240.1
  misc_feature (1)..(332): Homolog of NCBI NO: 38344962 NR Description: OSJNBa0072F16.7 [Oryza sativa (japonica
  misc_feature (1)..(333): Homolog of NCBI NO: 38344961 NR Description: OSJNBa0072F16.6 [Oryza sativa (japonica
  misc_feature (1)..(335): Homolog of NCBI NO: 15290054 NR Description: P0025A05.3 [Oryza sativa (japonica
  misc_feature (1)..(335): Homolog of NCBI NO: 34912160 NR Description: P0712E02.23 [Oryza sativa (japonica
  misc_feature (1)..(335): Homolog of NCBI NO: 20521331 NR Description: B1103C09.36 [Oryza sativa (japonica
  misc_feature (1)..(333): Homolog of NCBI NO: 18405629 NR Description: expressed protein; protein id: At2g41190.1, by cDNA: gi_14532707, supported by cDNA: gi_19310728 [Arabidopsis >gi|14532708|gb|AAK64155.1| unknown protein [Arabidopsis
MNADRNIKTYPDIGERAFGRPGRIIVSVFMHLELYLVTTGFLILEGDNLHNLFPGFTIEMIGLRLNGKQAFMATVAFVIMPTLWWDNLSVLSYVSMSGVLATTVTLGSISWIGAFDGIGFHQKGKLINWSGIPTALSLYAFCYGAHPVLPTLYSSMKSKHQFNNVLLICFILCTIGYTSMAVLGYLMYGSQTLSQITLNLPIHKTSSKVAIYTTLVNPVAKYALMITPTVNTIKDWFPSRYSKKAYLHLLISTFFIISSVVIAETLPFFGYMMSLVGALLSVTVSILLPCLCYLKIFGNYKKIGCETIMLFGMVVMSVFVGVIGTYIALRDIIGSV

SEQ ID NO: 70169 - protein, 307 aa, Arabidopsis thaliana
  peptide (1)..(307): Ceres Seq. ID no. 2162655
  misc_feature (1)..(304): Homolog of NCBI NO: 7939546 NR Description: gb|AAC79623.2~gene_id:K5K13.9~similar to unknown
  misc_feature (1)..(138): Homolog of NCBI NO: 15228542 NR Description: hypothetical protein; protein id: At3g28960.1
  misc_feature (149)..(307): Homolog of NCBI NO: 15228542 NR Description: hypothetical protein; protein id: At3g28960.1
  misc_feature (1)..(305): Homolog of NCBI NO: 15242252 NR Description: putative protein; protein id: At5g15240.1
  misc_feature (1)..(303): Homolog of NCBI NO: 38344962 NR Description: OSJNBa0072F16.7 [Oryza sativa (japonica
  misc_feature (1)..(304): Homolog of NCBI NO: 38344961 NR Description: OSJNBa0072F16.6 [Oryza sativa (japonica
  misc_feature (1)..(306): Homolog of NCBI NO: 15290054 NR Description: P0025A05.3 [Oryza sativa (japonica
  misc_feature (1)..(306): Homolog of NCBI NO: 34912160 NR Description: P0712E02.23 [Oryza sativa (japonica
  misc_feature (1)..(306): Homolog of NCBI NO: 20521331 NR Description: B1103C09.36 [Oryza sativa (japonica
  misc_feature (1)..(304): Homolog of NCBI NO: 18405629 NR Description: expressed protein; protein id: At2g41190.1, by cDNA: gi_14532707, supported by cDNA: gi_19310728 [Arabidopsis >gi|14532708|gb|AAK64155.1| unknown protein [Arabidopsis
MHLELYLVTTGFLILEGDNLHNLFPGFTIEMIGLRLNGKQAFMATVAFVIMPTLWWDNLSVLSYVSMSGVLATTVTLGSISWIGAFDGIGFHQKGKLINWSGIPTALSLYAFCYGAHPVLPTLYSSMKSKHQFNNVLLICFILCTIGYTSMAVLGYLMYGSQTLSQITLNLPIHKTSSKVAIYTTLVNPVAKYALMITPTVNTIKDWFPSRYSKKAYLHLLISTFFIISSVVIAETLPFFGYMMSLVGALLSVTVSILLPCLCYLKIFGNYKKIGCETIMLFGMVVMSVFVGVIGTYIALRDIIGSV

SEQ ID NO: 70170 - DNA, 1515 bp, Arabidopsis thaliana
  misc_feature (1)..(1515): Ceres Seq. ID no. 2163825
  misc_feature: MA Experiment ID: 20000306 Result: Up-regulated in Transcription
  misc_feature: MA Experiment 20000306 PARAMETER Experiment Name: At_Germinating_Seeds_Sub_P Parameter: Age (hr) Value: 6 vs. 0
  misc_feature: MA Experiment 20000306 PARAMETER Experiment Name: At_Germinating_Seeds_Sub_P Parameter: Organism Value: A. thaliana
  misc_feature: MA Experiment 20000306 PARAMETER Experiment Name: At_Germinating_Seeds_Sub_P Parameter: Plant Line Value: WS
  misc_feature: MA Experiment 20000306 PARAMETER Experiment Name: At_Germinating_Seeds_Sub_P Parameter: Tissue Value: Germinating Seeds
  misc_feature: MA Experiment ID: 20000355 Result: Up-regulated in Transcription
  misc_feature: MA Experiment 20000355 PARAMETER Experiment Name: At_Siliques_Sub_P Parameter: Age (day) Value: 21
  misc_feature: MA Experiment 20000355 PARAMETER Experiment Name: At_Siliques_Sub_P Parameter: Organism Value: A. thaliana
  misc_feature: MA Experiment 20000355 PARAMETER Experiment Name: At_Siliques_Sub_P Parameter: Plant Line Value: WS
  misc_feature: MA Experiment 20000355 PARAMETER Experiment Name: At_Siliques_Sub_P Parameter: Tissue Value: Less Than 5mm Siliques vs. Whole Plant
atgggtcggttagtagaagctatcattgcttcgatattattgtctttgtgttttacaataacaaagtcagctccaaaatctgctctcattaccaatcttcctggtttcaacggcacttttccatctaaacactatgccgggtatgtggcaatagataaacatcgtaataagaatctatggtattactttgtggaatctgagagaaatgcttcggtagatccagttgtgctttggcttaatggtggtccaggttgctctagcatggatggatttgtctacgagcacggtccattcaatttcgaaccaaaaaagaagaactcacatcttttgcatctcaatccttatagttggtccaaggtgtccaacatcatataccttgactctccagttggtgtgggattctcttactcaaatgacaacgccgattatacaactgatgatacaaaaaccgcgtctgatactcacacattccttctcgagtggtttaaaatgtttccggagtttcagtcaaatccgttctttatatcaggagaatcatatgctggtatctatgtgccaactcttgcggccgaggttgtcaaaggaaataaaaatgcaatgagaacaaacaaaacaagcaagaatgtgacaaagccggttatcaacttcaagggatatttggtgggtaatggtgttaccgatgaggtgtttgatggtaatgctcttgttcccttcactcatggcatgggactcatctctgatgaactctatgaggaaactaaattagtgtgcaacggaacatactataccggcggccagtcaggagtgagtaaagaatgtgctggcaaacttaaaacagtgtcagatactgtgaacttattgaacttatataacattctagaaccgtgctaccacggaacatctctatccgccttagatatcgagtttctgcctaagagtctccttactctaggcaaaacagaaaagccaatggcggtgagaaagagaatgtttggtcgtgcatggcctctaggtgccgttgtgcgtccaggcattgtacctagttggtctcaactcctcgctggctttggtgttccttgcattgacgatacagttgcgaccaaatggctaaacgatccagctgtaaggaaagcggttcatgctaaagaggaaaaagcgattggaaattgggagttatgttcaagcaacctcgaatataggcacgacaccggtagcatgatcgaataccatagaaacctcactcttagtggctttcgagctctcattttcagtggagatcatgatatgtgtgtaccatatactggctctgaagcatggactaaggcaatgggatacaaagtggttgatgaatggaggccatggatgtcaaataaccaagtcgccgggtttacacaagggtatgccaataatctcacatttctaaccatcaagggtgcaggacataccgttccagaatacaaaccgcgtgaatctttggacttctatagtcgtttcctagcaggagaaaagatatag

SEQ ID NO: 70171 - protein, 504 aa, Arabidopsis thaliana
  peptide (1)..(504): Ceres Seq. ID no. 2163826
  misc_feature (34)..(501): Pfam Name: Serine carboxypeptidase Pfam Description: Serine carboxypeptidase
  misc_feature (1)..(504): Homolog of NCBI NO: 9279723 NR Description: serine carboxypeptidase I [Arabidopsis thaliana]
  misc_feature (1)..(504): Homolog of NCBI NO: 15230836 NR Description: serine carboxypeptidase, putative; protein id:
  misc_feature (4)..(504): Homolog of NCBI NO: 22531054 NR Description: serine carboxypeptidase 1 precursor-like protein
  misc_feature (4)..(485): Homolog of NCBI NO: 30682276 NR Description: serine carboxypeptidase -related [Arabidopsis
  misc_feature (4)..(253): Homolog of NCBI NO: 25289790 NR Description: hypothetical protein AT4g12910 [imported] -
  misc_feature (282)..(485): Homolog of NCBI NO: 25289790 NR Description: hypothetical protein AT4g12910 [imported] -
  misc_feature (13)..(504): Homolog of NCBI NO: 7271957 NR Description: wound-inducible carboxypeptidase [Lycopersicon
  misc_feature (20)..(504): Homolog of NCBI NO: 584892 NR Description: Serine carboxypeptidase I precursor
  misc_feature (10)..(504): Homolog of NCBI NO: 2815493 NR Description: Serine carboxypeptidase I precursor
  misc_feature (10)..(504): Homolog of NCBI NO: 38346978 NR Description: OSJNBb0062H02.3 [Oryza sativa (japonica
MGRLVEAIIASILLSLCFTITKSAPKSALITNLPGFNGTFPSKHYAGYVAIDKHRNKNLWYYFVESERNASVDPVVLWLNGGPGCSSMDGFVYEHGPFNFEPKKKNSHLLHLNPYSWSKVSNIIYLDSPVGVGFSYSNDNADYTTDDTKTASDTHTFLLEWFKMFPEFQSNPFFISGESYAGIYVPTLAAEVVKGNKNAMRTNKTSKNVTKPVINFKGYLVGNGVTDEVFDGNALVPFTHGMGLISDELYEETKLVCNGTYYTGGQSGVSKECAGKLKTVSDTVNLLNLYNILEPCYHGTSLSALDIEFLPKSLLTLGKTEKPMAVRKRMFGRAWPLGAVVRPGIVPSWSQLLAGFGVPCIDDTVATKWLNDPAVRKAVHAKEEKAIGNWELCSSNLEYRHDTGSMIEYHRNLTLSGFRALIFSGDHDMCVPYTGSEAWTKAMGYKVVDEWRPWMSNNQVAGFTQGYANNLTFLTIKGAGHTVPEYKPRESLDFYSRFLAGEKI

SEQ ID NO: 70172 - protein, 417 aa, Arabidopsis thaliana
  peptide (1)..(417): Ceres Seq. ID no. 2163827
  misc_feature (1)..(414): Pfam Name: Serine carboxypeptidase Pfam Description: Serine carboxypeptidase
  misc_feature (1)..(417): Homolog of NCBI NO: 9279723 NR Description: serine carboxypeptidase I [Arabidopsis thaliana]
  misc_feature (1)..(417): Homolog of NCBI NO: 15230836 NR Description: serine carboxypeptidase, putative; protein id:
  misc_feature (1)..(417): Homolog of NCBI NO: 22531054 NR Description: serine carboxypeptidase 1 precursor-like protein
  misc_feature (1)..(398): Homolog of NCBI NO: 30682276 NR Description: serine carboxypeptidase -related [Arabidopsis
  misc_feature (1)..(166): Homolog of NCBI NO: 25289790 NR Description: hypothetical protein AT4g12910 [imported] -
  misc_feature (195)..(398): Homolog of NCBI NO: 25289790 NR Description: hypothetical protein AT4g12910 [imported] -
  misc_feature (1)..(417): Homolog of NCBI NO: 7271957 NR Description: wound-inducible carboxypeptidase [Lycopersicon
  misc_feature (1)..(417): Homolog of NCBI NO: 584892 NR Description: Serine carboxypeptidase I precursor
  misc_feature (1)..(417): Homolog of NCBI NO: 2815493 NR Description: Serine carboxypeptidase I precursor
  misc_feature (1)..(417): Homolog of NCBI NO: 38346978 NR Description: OSJNBb0062H02.3 [Oryza sativa (japonica
MDGFVYEHGPFNFEPKKKNSHLLHLNPYSWSKVSNIIYLDSPVGVGFSYSNDNADYTTDDTKTASDTHTFLLEWFKMFPEFQSNPFFISGESYAGIYVPTLAAEVVKGNKNAMRTNKTSKNVTKPVINFKGYLVGNGVTDEVFDGNALVPFTHGMGLISDELYEETKLVCNGTYYTGGQSGVSKECAGKLKTVSDTVNLLNLYNILEPCYHGTSLSALDIEFLPKSLLTLGKTEKPMAVRKRMFGRAWPLGAVVRPGIVPSWSQLLAGFGVPCIDDTVATKWLNDPAVRKAVHAKEEKAIGNWELCSSNLEYRHDTGSMIEYHRNLTLSGFRALIFSGDHDMCVPYTGSEAWTKAMGYKVVDEWRPWMSNNQVAGFTQGYANNLTFLTIKGAGHTVPEYKPRESLDFYSRFLAGEKI

SEQ ID NO: 70173 - protein, 341 aa, Arabidopsis thaliana
  peptide (1)..(341): Ceres Seq. ID no. 2163828
  misc_feature (1)..(338): Pfam Name: Serine carboxypeptidase Pfam Description: Serine carboxypeptidase
  misc_feature (1)..(341): Homolog of NCBI NO: 9279723 NR Description: serine carboxypeptidase I [Arabidopsis thaliana]
  misc_feature (1)..(341): Homolog of NCBI NO: 15230836 NR Description: serine carboxypeptidase, putative; protein id:
  misc_feature (1)..(341): Homolog of NCBI NO: 22531054 NR Description: serine carboxypeptidase 1 precursor-like protein
  misc_feature (1)..(322): Homolog of NCBI NO: 30682276 NR Description: serine carboxypeptidase -related [Arabidopsis
  misc_feature (1)..(90): Homolog of NCBI NO: 25289790 NR Description: hypothetical protein AT4g12910 [imported] -
  misc_feature (119)..(322): Homolog of NCBI NO: 25289790 NR Description: hypothetical protein AT4g12910 [imported] -
  misc_feature (1)..(341): Homolog of NCBI NO: 7271957 NR Description: wound-inducible carboxypeptidase [Lycopersicon
  misc_feature (1)..(341): Homolog of NCBI NO: 584892 NR Description: Serine carboxypeptidase I precursor
  misc_feature (1)..(341): Homolog of NCBI NO: 2815493 NR Description: Serine carboxypeptidase I precursor
  misc_feature (1)..(341): Homolog of NCBI NO: 38346978 NR Description: OSJNBb0062H02.3 [Oryza sativa (japonica
MFPEFQSNPFFISGESYAGIYVPTLAAEVVKGNKNAMRTNKTSKNVTKPVINFKGYLVGNGVTDEVFDGNALVPFTHGMGLISDELYEETKLVCNGTYYTGGQSGVSKECAGKLKTVSDTVNLLNLYNILEPCYHGTSLSALDIEFLPKSLLTLGKTEKPMAVRKRMFGRAWPLGAVVRPGIVPSWSQLLAGFGVPCIDDTVATKWLNDPAVRKAVHAKEEKAIGNWELCSSNLEYRHDTGSMIEYHRNLTLSGFRALIFSGDHDMCVPYTGSEAWTKAMGYKVVDEWRPWMSNNQVAGFTQGYANNLTFLTIKGAGHTVPEYKPRESLDFYSRFLAGEKI

SEQ ID NO: 70174 - DNA, 4101 bp, Arabidopsis thaliana
  misc_feature (1)..(4101): Ceres Seq. ID no. 2171501
  misc_feature: MA Experiment ID: 20001451 Result: Down-regulated in Transcription
  misc_feature: MA Experiment 20001451 PARAMETER Experiment Name: At_Far-red-induction_P Parameter: Age (day) Value: 7
  misc_feature: MA Experiment 20001451 PARAMETER Experiment Name: At_Far-red-induction_P Parameter: Light Value: Far-red vs. White
  misc_feature: MA Experiment 20001451 PARAMETER Experiment Name: At_Far-red-induction_P Parameter: Organism Value: A. thaliana
  misc_feature: MA Experiment 20001451 PARAMETER Experiment Name: At_Far-red-induction_P Parameter: Plant Line Value: Columbia
  misc_feature: MA Experiment 20001451 PARAMETER Experiment Name: At_Far-red-induction_P Parameter: Timepoint (hr) Value: 24
  misc_feature: MA Experiment 20001451 PARAMETER Experiment Name: At_Far-red-induction_P Parameter: Tissue Value: Whole Plant
  misc_feature: MA Experiment ID: 20001757 Result: Up-regulated in Transcription
  misc_feature: MA Experiment 20001757 PARAMETER Experiment Name: At_50mM_NH4NO3_L-to-H_P Parameter: Timepoint (hr) Value: 6
  misc_feature: MA Experiment 20001757 PARAMETER Experiment Name: At_50mM_NH4NO3_L-to-H_P Parameter: Tissue Value: Leaf
  misc_feature: MA Experiment 20001757 PARAMETER Experiment Name: At_50mM_NH4NO3_L-to-H_P Parameter: Treatment Value: 50mM NH4NO3 vs 100mM Mannitol
atgagttctgtgggtgtatttgataaggtggaaatggatgagaagtcatatttagtatacacattaacacaaacaaaacacccaacctcttccgccgtggagtctagtggtgatgaccttcctctccaacctcttttttcttgtccctatgcacgtatcagatctcataagttcaaagtagagaagaactatgatggtgttaactttttcaactttcatccattcaattcttaccctcactttccaagaacaagaaccagttatcaacaaggcgaatctttacttgattatgatcaccataacatctgtaagttccctgtagtccctctgttttggtgcaacaataaaacccctgatagtaatgaattcgagtgtggtggatgtgaagagtcaaagactagcagaagctattatgcttgtcttgaatgtggaaacaagtttcacaagcaatgtgtagagtctccacttgagatcaaacacccttcacacccttttcattctcttcgactttatagtcatccaacacatatggtgtgcatttgttgtggaagacttgtgtctaacatgttttatcattgtgtgacatgcgatttgagtatggacccgatttgtgctatggaaccaataccctttgttgtagaccatcctaaaagccatccccaccctattacctttttccctacacaagctactttggcttgcaatatttgtggccttgttaagatgcttgatcccacatacatttgtatccaatgtgtcttcgtcatccataaagattgtatgggttacccacatgtcattagaatatctcgtcaccaacaccggatctcttttgcctcttctctaccatatggaaatttgtcttgtggggtttgtcatcaacgtgttgacaacaattatggagcatattcttgtggtaaatgtgatgcttattttgttcattcaaaatgtgcatttcatagaaatgtgtgggatggaaaagaactcgaaggtgtatcagaagaagatgatataatagatgatggtgagccatttgagaggatatctgatggagtaatactccatccatatcacagtcaccatctacgacttgagatcagcaaagtttatgatgaaaataagtattgtcgagggtgttctttcccaatctacgaaggccagttctattcatgcatggaatgtgacttcatcctccatgaaagttgtgcaaatgctccacgcatgaaacgacatcccttacatccacatccacttactctaaatgttgccacaaaggagcttggtaataacgaaggcgtataccattgtaatgtttgtggtcgtgatggtactggcttcttctatgaacatcatataggcgaaagaagattccggctagacttgagatgtgcctcgattcgtgaaccatttgaatatcaatgccacaaacatcccttatgcatagcttcggagctagagaaaaaggtacgatgtcaaatatgcaaagggaaaagctattcgaaattaaattgcatggaatgcgattatattatatgttttcgttgcgctaccttcccatacaaggtaaggtacaagcacgacagtcattttcttagaattcgcgatgggaaaaaggcaagtgatgaaccagactggtgtgaggtttgcgaaggcaaaatagaagaagtaaaagaaagagagtctccgtgggacaaaagacgagaaatgcgattttataaatgcaatgactgttgcacgactcttcatgttgaatgtttacttgggagagacatgtacatgaaacctggtaatagtgtaaaagattacatttctaagcactcactaggaattgaaggtacgcaatggacagatgttcgagtctttctcaacagttcgctctcccgaccaatatgcaccggatgtatgcgccgttgtctattcccaatagttttcaaaggctacaacacaatcttttgttcttgggagtgtattggatatggcgacacagtgtttgagcatccaacaatgaccggagtttcttctgcttttggccgtcttttcaaacaagataaaacccacaagcgtgttatcggcaccggaaccaaacttacagtgacccgtcagattcttgagcatctcgaaggcggtaatgtctcgaaagccgtctctgttctctttgcttctccagagccagttagttattggctatacgagcgtcttttccgttcttgttcctcgaaagctcttgttgtgcaagcccgtaaagtccaatctcacttagtaactttctctccgttgcctccgattttcctcttgaacagagccattgaggcttatggtaaatgtgggtgtgttgatgatgcacgagagctgttcgaggaaatgcctgaacgagatggtgggtcttggaacgctgtgattactgcttgtgcgcaaaacggtgtctctgatgaggtgtttcgtatgtttcgtagaatgaatagagatggcgtacgagctacggagacttcttttgctggtgttttaaagtcatgtggtttaatcttggacttgagattattgaggcagctgcattgtgctgtggtgaagtatgggtattcggggaatgtagatttggagacttcgattgttgatgtttatgggaagtgtcgggtgatgagtgatgcgagaagagtgtttgatgagattgtaaaccctagtgatgtatcttggaatgtgattgtgcggcggtatcttgagatggggtttaatgatgaggcagtggtgatgtttttcaagatgctggagttgaatgttcgacctttgaatcacacggtttctagtgtaatgttagcttgttcgagatccttggcccttgaggtgggaaaggtaatccatgccattgctgtgaaacttagtgttgtggcagatacagttgtttctacttctgtatttgatatgtatgtaaaatgtgacagattggagagtgctcgcagagtatttgaccaaactagatctaaagatttgaaatcttggacttcggcgatgtcgggatatgcaatgagtggtttaactagagaggcaagggagctctttgatttgatgcctgaacggaatatagtctcatggaacgcaatgttgggcggatatgtacatgcccatgaatgggatgaggcactggattttctcactttgatgcgccaggagattgaaaatattgataatgtcactcttgtgtggatcctaaatgtctgctctggtatatcagatgttcaaatggggaagcaagctcatggttttatctaccgacatggatatgatacgaatgtaattgtagccaatgcacttcttgatatgtatggaaaatgcgggaccttgcagagtgccaatatttggttccgccaaatgagtgaactaagggatgaggtttcatggaatgctttattgactggtgtagctcgagttggcaggagtgaacaagccttatctttctttgaagggatgcaagtggaggccaaaccaagcaaatacacactggcaacgctcttagcaggttgtgcgaacattcctgctttaaatttaggcaaagcaatccacggattcctgatcagagatggctataaaattgatgttgttatacggggtgcaatggttgacatgtattccaaatgccgatgtttcgactatgctatcgaagtattcaaagaggcagctacacgggacttgattctatggaactctattatccgtggatgttgtcgtaatggaagaagcaaggaggtctttgagttgttcatgcttttggaaaatgaaggagttaagcctgaccatgtcacctttttgggaatcttacaagcttgcatacgtgaaggtcatgtcgaactcggttttcagtatttcagttctatgagcaccaaatatcatatatcaccacaggttgagcattatgattgtatgattgaactctactgcaagtatggatgcttgcatcagcttgaagaatttctcctcttgatgccttttgatccacctatgcaaatgttgacaaggataaatgatgcttgccaaagataccgctggtcaaagttaggagcatgggctgctaaacggcttatgaatgatcattaccttcagccaccatga

SEQ ID NO: 70175 - protein, 1366 aa, Arabidopsis thaliana
  peptide (1)..(1366): Ceres Seq. ID no. 2171502
  misc_feature (1229)..(1263): Pfam Name: PPR repeat Pfam Description: PPR repeat
  misc_feature (33)..(589): Homolog of NCBI NO: 15241045 NR Description: CHP-rich zinc finger protein, putative; protein At5g55800.1 [Arabidopsis thaliana] >gi|9758614|dbj|BAB09247.1|
  misc_feature (1)..(656): Homolog of NCBI NO: 15241757 NR Description: CHP-rich zinc finger protein, putative; protein At5g02340.1 [Arabidopsis thaliana] >gi|11358093|pir||T48255
  misc_feature (12)..(657): Homolog of NCBI NO: 15235033 NR Description: CHP-rich zinc finger protein, putative; protein At4g10370.1 [Arabidopsis thaliana] >gi|25407515|pir||F85107
  misc_feature (74)..(656): Homolog of NCBI NO: 8778663 NR Description: F9C16.28 [Arabidopsis thaliana]
  misc_feature (65)..(657): Homolog of NCBI NO: 15240575 NR Description: CHP-rich zinc finger protein, putative; protein At5g55770.1 [Arabidopsis thaliana] >gi|9758611|dbj|BAB09244.1|
  misc_feature (136)..(656): Homolog of NCBI NO: 15219316 NR Description: CHP-rich zinc finger protein, putative; protein
  misc_feature (1)..(65): Homolog of NCBI NO: 8778663 NR Description: F9C16.28 [Arabidopsis thaliana]
  misc_feature (1)..(673): Homolog of NCBI NO: 15241043 NR Description: CHP-rich zinc finger protein, putative; protein At5g55780.1 [Arabidopsis thaliana] >gi|9758612|dbj|BAB09245.1|
  misc_feature (1)..(657): Homolog of NCBI NO: 7486071 NR Description: hypothetical protein F24G24.170 - Arabidopsis (fragment) >gi|4538966|emb|CAB39790.1| putative protein
  misc_feature (130)..(656): Homolog of NCBI NO: 25411527 NR Description: hypothetical protein At2g13910 [imported] -
MSSVGVFDKVEMDEKSYLVYTLTQTKHPTSSAVESSGDDLPLQPLFSCPYARIRSHKFKVEKNYDGVNFFNFHPFNSYPHFPRTRTSYQQGESLLDYDHHNICKFPVVPLFWCNNKTPDSNEFECGGCEESKTSRSYYACLECGNKFHKQCVESPLEIKHPSHPFHSLRLYSHPTHMVCICCGRLVSNMFYHCVTCDLSMDPICAMEPIPFVVDHPKSHPHPITFFPTQATLACNICGLVKMLDPTYICIQCVFVIHKDCMGYPHVIRISRHQHRISFASSLPYGNLSCGVCHQRVDNNYGAYSCGKCDAYFVHSKCAFHRNVWDGKELEGVSEEDDIIDDGEPFERISDGVILHPYHSHHLRLEISKVYDENKYCRGCSFPIYEGQFYSCMECDFILHESCANAPRMKRHPLHPHPLTLNVATKELGNNEGVYHCNVCGRDGTGFFYEHHIGERRFRLDLRCASIREPFEYQCHKHPLCIASELEKKVRCQICKGKSYSKLNCMECDYIICFRCATFPYKVRYKHDSHFLRIRDGKKASDEPDWCEVCEGKIEEVKERESPWDKRREMRFYKCNDCCTTLHVECLLGRDMYMKPGNSVKDYISKHSLGIEGTQWTDVRVFLNSSLSRPICTGCMRRCLFPIVFKGYNTIFCSWECIGYGDTVFEHPTMTGVSSAFGRLFKQDKTHKRVIGTGTKLTVTRQILEHLEGGNVSKAVSVLFASPEPVSYWLYERLFRSCSSKALVVQARKVQSHLVTFSPLPPIFLLNRAIEAYGKCGCVDDARELFEEMPERDGGSWNAVITACAQNGVSDEVFRMFRRMNRDGVRATETSFAGVLKSCGLILDLRLLRQLHCAVVKYGYSGNVDLETSIVDVYGKCRVMSDARRVFDEIVNPSDVSWNVIVRRYLEMGFNDEAVVMFFKMLELNVRPLNHTVSSVMLACSRSLALEVGKVIHAIAVKLSVVADTVVSTSVFDMYVKCDRLESARRVFDQTRSKDLKSWTSAMSGYAMSGLTREARELFDLMPERNIVSWNAMLGGYVHAHEWDEALDFLTLMRQEIENIDNVTLVWILNVCSGISDVQMGKQAHGFIYRHGYDTNVIVANALLDMYGKCGTLQSANIWFRQMSELRDEVSWNALLTGVARVGRSEQALSFFEGMQVEAKPSKYTLATLLAGCANIPALNLGKAIHGFLIRDGYKIDVVIRGAMVDMYSKCRCFDYAIEVFKEAATRDLILWNSIIRGCCRNGRSKEVFELFMLLENEGVKPDHVTFLGILQACIREGHVELGFQYFSSMSTKYHISPQVEHYDCMIELYCKYGCLHQLEEFLLLMPFDPPMQMLTRINDACQRYRWSKLGAWAAKRLMNDHYLQPP

SEQ ID NO: 70176 - protein, 1355 aa, Arabidopsis thaliana
  peptide (1)..(1355): Ceres Seq. ID no. 2171503
  misc_feature (1218)..(1252): Pfam Name: PPR repeat Pfam Description: PPR repeat
  misc_feature (1)..(646): Homolog of NCBI NO: 7486071 NR Description: hypothetical protein F24G24.170 - Arabidopsis (fragment) >gi|4538966|emb|CAB39790.1| putative protein
  misc_feature (1)..(646): Homolog of NCBI NO: 15235033 NR Description: CHP-rich zinc finger protein, putative; protein At4g10370.1 [Arabidopsis thaliana] >gi|25407515|pir||F85107
  misc_feature (1)..(662): Homolog of NCBI NO: 15241043 NR Description: CHP-rich zinc finger protein, putative; protein At5g55780.1 [Arabidopsis thaliana] >gi|9758612|dbj|BAB09245.1|
  misc_feature (63)..(645): Homolog of NCBI NO: 8778663 NR Description: F9C16.28 [Arabidopsis thaliana]
  misc_feature (1)..(54): Homolog of NCBI NO: 8778663 NR Description: F9C16.28 [Arabidopsis thaliana]
  misc_feature (54)..(646): Homolog of NCBI NO: 15240575 NR Description: CHP-rich zinc finger protein, putative; protein At5g55770.1 [Arabidopsis thaliana] >gi|9758611|dbj|BAB09244.1|
  misc_feature (125)..(645): Homolog of NCBI NO: 15219316 NR Description: CHP-rich zinc finger protein, putative; protein
  misc_feature (22)..(578): Homolog of NCBI NO: 15241045 NR Description: CHP-rich zinc finger protein, putative; protein At5g55800.1 [Arabidopsis thaliana] >gi|9758614|dbj|BAB09247.1|
  misc_feature (1)..(645): Homolog of NCBI NO: 15241757 NR Description: CHP-rich zinc finger protein, putative; protein At5g02340.1 [Arabidopsis thaliana] >gi|11358093|pir||T48255
  misc_feature (119)..(645): Homolog of NCBI NO: 25411527 NR Description: hypothetical protein At2g13910 [imported] -
MDEKSYLVYTLTQTKHPTSSAVESSGDDLPLQPLFSCPYARIRSHKFKVEKNYDGVNFFNFHPFNSYPHFPRTRTSYQQGESLLDYDHHNICKFPVVPLFWCNNKTPDSNEFECGGCEESKTSRSYYACLECGNKFHKQCVESPLEIKHPSHPFHSLRLYSHPTHMVCICCGRLVSNMFYHCVTCDLSMDPICAMEPIPFVVDHPKSHPHPITFFPTQATLACNICGLVKMLDPTYICIQCVFVIHKDCMGYPHVIRISRHQHRISFASSLPYGNLSCGVCHQRVDNNYGAYSCGKCDAYFVHSKCAFHRNVWDGKELEGVSEEDDIIDDGEPFERISDGVILHPYHSHHLRLEISKVYDENKYCRGCSFPIYEGQFYSCMECDFILHESCANAPRMKRHPLHPHPLTLNVATKELGNNEGVYHCNVCGRDGTGFFYEHHIGERRFRLDLRCASIREPFEYQCHKHPLCIASELEKKVRCQICKGKSYSKLNCMECDYIICFRCATFPYKVRYKHDSHFLRIRDGKKASDEPDWCEVCEGKIEEVKERESPWDKRREMRFYKCNDCCTTLHVECLLGRDMYMKPGNSVKDYISKHSLGIEGTQWTDVRVFLNSSLSRPICTGCMRRCLFPIVFKGYNTIFCSWECIGYGDTVFEHPTMTGVSSAFGRLFKQDKTHKRVIGTGTKLTVTRQILEHLEGGNVSKAVSVLFASPEPVSYWLYERLFRSCSSKALVVQARKVQSHLVTFSPLPPIFLLNRAIEAYGKCGCVDDARELFEEMPERDGGSWNAVITACAQNGVSDEVFRMFRRMNRDGVRATETSFAGVLKSCGLILDLRLLRQLHCAVVKYGYSGNVDLETSIVDVYGKCRVMSDARRVFDEIVNPSDVSWNVIVRRYLEMGFNDEAVVMFFKMLELNVRPLNHTVSSVMLACSRSLALEVGKVIHAIAVKLSVVADTVVSTSVFDMYVKCDRLESARRVFDQTRSKDLKSWTSAMSGYAMSGLTREARELFDLMPERNIVSWNAMLGGYVHAHEWDEALDFLTLMRQEIENIDNVTLVWILNVCSGISDVQMGKQAHGFIYRHGYDTNVIVANALLDMYGKCGTLQSANIWFRQMSELRDEVSWNALLTGVARVGRSEQALSFFEGMQVEAKPSKYTLATLLAGCANIPALNLGKAIHGFLIRDGYKIDVVIRGAMVDMYSKCRCFDYAIEVFKEAATRDLILWNSIIRGCCRNGRSKEVFELFMLLENEGVKPDHVTFLGILQACIREGHVELGFQYFSSMSTKYHISPQVEHYDCMIELYCKYGCLHQLEEFLLLMPFDPPMQMLTRINDACQRYRWSKLGAWAAKRLMNDHYLQPP

SEQ ID NO: 70177 - protein, 1190 aa, Arabidopsis thaliana
  peptide (1)..(1190): Ceres Seq. ID no. 2171504
  misc_feature (1053)..(1087): Pfam Name: PPR repeat Pfam Description: PPR repeat
  misc_feature (1)..(481): Homolog of NCBI NO: 7486071 NR Description: hypothetical protein F24G24.170 - Arabidopsis (fragment) >gi|4538966|emb|CAB39790.1| putative protein
  misc_feature (1)..(481): Homolog of NCBI NO: 15235033 NR Description: CHP-rich zinc finger protein, putative; protein At4g10370.1 [Arabidopsis thaliana] >gi|25407515|pir||F85107
  misc_feature (1)..(497): Homolog of NCBI NO: 15241043 NR Description: CHP-rich zinc finger protein, putative; protein At5g55780.1 [Arabidopsis thaliana] >gi|9758612|dbj|BAB09245.1|
  misc_feature (1)..(480): Homolog of NCBI NO: 8778663 NR Description: F9C16.28 [Arabidopsis thaliana]
  misc_feature (1)..(481): Homolog of NCBI NO: 15240575 NR Description: CHP-rich zinc finger protein, putative; protein At5g55770.1 [Arabidopsis thaliana] >gi|9758611|dbj|BAB09244.1|
  misc_feature (1)..(480): Homolog of NCBI NO: 15219316 NR Description: CHP-rich zinc finger protein, putative; protein
  misc_feature (1)..(413): Homolog of NCBI NO: 15241045 NR Description: CHP-rich zinc finger protein, putative; protein At5g55800.1 [Arabidopsis thaliana] >gi|9758614|dbj|BAB09247.1|
  misc_feature (1)..(480): Homolog of NCBI NO: 15241757 NR Description: CHP-rich zinc finger protein, putative; protein At5g02340.1 [Arabidopsis thaliana] >gi|11358093|pir||T48255
  misc_feature (1)..(480): Homolog of NCBI NO: 25411527 NR Description: hypothetical protein At2g13910 [imported] -
  misc_feature (1)..(423): Homolog of NCBI NO: 7487822 NR Description: hypothetical protein At2g02620 [imported] - thaliana >gi|3184278|gb|AAC18925.1| hypothetical protein
MVCICCGRLVSNMFYHCVTCDLSMDPICAMEPIPFVVDHPKSHPHPITFFPTQATLACNICGLVKMLDPTYICIQCVFVIHKDCMGYPHVIRISRHQHRISFASSLPYGNLSCGVCHQRVDNNYGAYSCGKCDAYFVHSKCAFHRNVWDGKELEGVSEEDDIIDDGEPFERISDGVILHPYHSHHLRLEISKVYDENKYCRGCSFPIYEGQFYSCMECDFILHESCANAPRMKRHPLHPHPLTLNVATKELGNNEGVYHCNVCGRDGTGFFYEHHIGERRFRLDLRCASIREPFEYQCHKHPLCIASELEKKVRCQICKGKSYSKLNCMECDYIICFRCATFPYKVRYKHDSHFLRIRDGKKASDEPDWCEVCEGKIEEVKERESPWDKRREMRFYKCNDCCTTLHVECLLGRDMYMKPGNSVKDYISKHSLGIEGTQWTDVRVFLNSSLSRPICTGCMRRCLFPIVFKGYNTIFCSWECIGYGDTVFEHPTMTGVSSAFGRLFKQDKTHKRVIGTGTKLTVTRQILEHLEGGNVSKAVSVLFASPEPVSYWLYERLFRSCSSKALVVQARKVQSHLVTFSPLPPIFLLNRAIEAYGKCGCVDDARELFEEMPERDGGSWNAVITACAQNGVSDEVFRMFRRMNRDGVRATETSFAGVLKSCGLILDLRLLRQLHCAVVKYGYSGNVDLETSIVDVYGKCRVMSDARRVFDEIVNPSDVSWNVIVRRYLEMGFNDEAVVMFFKMLELNVRPLNHTVSSVMLACSRSLALEVGKVIHAIAVKLSVVADTVVSTSVFDMYVKCDRLESARRVFDQTRSKDLKSWTSAMSGYAMSGLTREARELFDLMPERNIVSWNAMLGGYVHAHEWDEALDFLTLMRQEIENIDNVTLVWILNVCSGISDVQMGKQAHGFIYRHGYDTNVIVANALLDMYGKCGTLQSANIWFRQMSELRDEVSWNALLTGVARVGRSEQALSFFEGMQVEAKPSKYTLATLLAGCANIPALNLGKAIHGFLIRDGYKIDVVIRGAMVDMYSKCRCFDYAIEVFKEAATRDLILWNSIIRGCCRNGRSKEVFELFMLLENEGVKPDHVTFLGILQACIREGHVELGFQYFSSMSTKYHISPQVEHYDCMIELYCKYGCLHQLEEFLLLMPFDPPMQMLTRINDACQRYRWSKLGAWAAKRLMNDHYLQPP

SEQ ID NO: 70178 - DNA, 837 bp, Arabidopsis thaliana
  misc_feature (1)..(837): Ceres Seq. ID no. 2172075
  misc_feature: MA Experiment ID: 20000306 Result: Down-regulated in Transcription
  misc_feature: MA Experiment 20000306 PARAMETER Experiment Name: At_Germinating_Seeds_Sub_P Parameter: Age (hr) Value: 6 vs. 0
  misc_feature: MA Experiment 20000306 PARAMETER Experiment Name: At_Germinating_Seeds_Sub_P Parameter: Organism Value: A. thaliana
  misc_feature: MA Experiment 20000306 PARAMETER Experiment Name: At_Germinating_Seeds_Sub_P Parameter: Plant Line Value: WS
  misc_feature: MA Experiment 20000306 PARAMETER Experiment Name: At_Germinating_Seeds_Sub_P Parameter: Tissue Value: Germinating Seeds
  misc_feature: MA Experiment ID: 20000307 Result: Down-regulated in Transcription
  misc_feature: MA Experiment 20000307 PARAMETER Experiment Name: At_Germinating_Seeds_Sub_P Parameter: Age (hr) Value: 24 vs. 0
  misc_feature: MA Experiment 20000307 PARAMETER Experiment Name: At_Germinating_Seeds_Sub_P Parameter: Organism Value: A. thaliana
  misc_feature: MA Experiment 20000307 PARAMETER Experiment Name: At_Germinating_Seeds_Sub_P Parameter: Plant Line Value: WS
  misc_feature: MA Experiment 20000307 PARAMETER Experiment Name: At_Germinating_Seeds_Sub_P Parameter: Tissue Value: Germinating Seeds
  misc_feature: MA Experiment ID: 20000314 Result: Down-regulated in Transcription
  misc_feature: MA Experiment 20000314 PARAMETER Experiment Name: At_14day_Shoots-Roots_Sub_P Parameter: Age (day) Value: 14
  misc_feature: MA Experiment 20000314 PARAMETER Experiment Name: At_14day_Shoots-Roots_Sub_P Parameter: Organism Value: A. thaliana
  misc_feature: MA Experiment 20000314 PARAMETER Experiment Name: At_14day_Shoots-Roots_Sub_P Parameter: Plant Line Value: WS
  misc_feature: MA Experiment 20000314 PARAMETER Experiment Name: At_14day_Shoots-Roots_Sub_P Parameter: Tissue Value: Roots vs. Whole Plant
  misc_feature: MA Experiment ID: 20000355 Result: Down-regulated in Transcription
  misc_feature: MA Experiment 20000355 PARAMETER Experiment Name: At_Siliques_Sub_P Parameter: Age (day) Value: 21
  misc_feature: MA Experiment 20000355 PARAMETER Experiment Name: At_Siliques_Sub_P Parameter: Organism Value: A. thaliana
  misc_feature: MA Experiment 20000355 PARAMETER Experiment Name: At_Siliques_Sub_P Parameter: Plant Line Value: WS
  misc_feature: MA Experiment 20000355 PARAMETER Experiment Name: At_Siliques_Sub_P Parameter: Tissue Value: Less Than 5mm Siliques vs. Whole Plant
atgtattcttcatcatctgtatcaaaacgcttcgttctagtccctattgtggtcgtggtgaccacacaactcctcctggtacgtaacgtttcttcactaaaccttaccaattcgtatcttcaccacaaatgcgtagtcaatcaagggaaatacaagccaggaagcaagtacgagaaatccctcgatgatatcatccaaagcttttcgaataaagataaagattcgtatggttttcgtaccggttacagcatgaaggcctacggtaaagaacctgatatggtctccatcacctaccagtgccgtatcgactctcgtgggcccaagtgccagtcctgcgttgtcacggccggttatgagcttcttcgtaagagatgtccgagatataaagaggcaataatatggtacgaccaatgtcttgtggagttttcttcgttagatacttctgggcagatcaattacgacgacaacttctgtatgcctagcgcgaagaacctgatcggcaattcaatctctcttgaagaaaggttgcatctcctcaacaatcttacaaagatagccgtcacgaaaatagataaaaacatagaaggtataaaaaaaccagtactgtatgcggcgggggagaagagactcgggacgaaaagtctatacggaatggtgcaatgttcggctgacttatctgttcagggttgtaatgagtgtatgttatattatatagtgcattttcaagagtgctgggaaagtaaacaaggagtaagagttttgagtagaagctgtaactttaggtatgagctttacccttttattagccccaagggttcttactataccaagttctaa

SEQ ID NO: 70179 - protein, 278 aa, Arabidopsis thaliana
  peptide (1)..(278): Ceres Seq. ID no. 2172076
  misc_feature (215)..(269): Pfam Name: Domain of unknown function DUF26 Pfam Description: Domain of unknown function DUF26
  misc_feature (1)..(278): Homolog of NCBI NO: 9279744 NR Description: contains similarity to receptor protein
  misc_feature (1)..(278): Homolog of NCBI NO: 15233207 NR Description: receptor kinase, putative; protein id:
  misc_feature (1)..(278): Homolog of NCBI NO: 15233204 NR Description: pollen coat receptor kinase, putative; protein At3g21920.1 [Arabidopsis thaliana] >gi|9279743|dbj|BAB01369.1| similarity to receptor protein kinase~gene_id:MZN24.4
  misc_feature (1)..(275): Homolog of NCBI NO: 15233201 NR Description: hypothetical protein; protein id: At3g21910.1 thaliana] >gi|9279742|dbj|BAB01368.1| contains similarity to
  misc_feature (90)..(278): Homolog of NCBI NO: 11994709 NR Description: contains similarity to receptor protein
  misc_feature (3)..(82): Homolog of NCBI NO: 11994709 NR Description: contains similarity to receptor protein
  misc_feature (1)..(273): Homolog of NCBI NO: 15233236 NR Description: hypothetical protein; protein id: At3g22000.1 thaliana] >gi|9279757|dbj|BAB01383.1| contains similarity to
  misc_feature (1)..(273): Homolog of NCBI NO: 15233368 NR Description: putative protein; protein id: At4g20680.1
  misc_feature (1)..(268): Homolog of NCBI NO: 15233238 NR Description: hypothetical protein; protein id: At3g22010.1 thaliana] >gi|9279758|dbj|BAB01384.1| contains similarity to
  misc_feature (7)..(268): Homolog of NCBI NO: 15233235 NR Description: receptor kinase common family, putative; protein At3g21990.1 [Arabidopsis thaliana] >gi|9279756|dbj|BAB01382.1| similarity to receptor kinase~gene_id:MZN24.17 [Arabidopsis
MYSSSSVSKRFVLVPIVVVVTTQLLLVRNVSSLNLTNSYLHHKCVVNQGKYKPGSKYEKSLDDIIQSFSNKDKDSYGFRTGYSMKAYGKEPDMVSITYQCRIDSRGPKCQSCVVTAGYELLRKRCPRYKEAIIWYDQCLVEFSSLDTSGQINYDDNFCMPSAKNLIGNSISLEERLHLLNNLTKIAVTKIDKNIEGIKKPVLYAAGEKRLGTKSLYGMVQCSADLSVQGCNECMLYYIVHFQECWESKQGVRVLSRSCNFRYELYPFISPKGSYYTKF

SEQ ID NO: 70180 - protein, 195 aa, Arabidopsis thaliana
  peptide (1)..(195): Ceres Seq. ID no. 2172077
  misc_feature (132)..(186): Pfam Name: Domain of unknown function DUF26 Pfam Description: Domain of unknown function DUF26
  misc_feature (1)..(195): Homolog of NCBI NO: 9279744 NR Description: contains similarity to receptor protein
  misc_feature (1)..(195): Homolog of NCBI NO: 15233207 NR Description: receptor kinase, putative; protein id:
  misc_feature (1)..(195): Homolog of NCBI NO: 15233204 NR Description: pollen coat receptor kinase, putative; protein At3g21920.1 [Arabidopsis thaliana] >gi|9279743|dbj|BAB01369.1| similarity to receptor protein kinase~gene_id:MZN24.4
  misc_feature (1)..(192): Homolog of NCBI NO: 15233201 NR Description: hypothetical protein; protein id: At3g21910.1 thaliana] >gi|9279742|dbj|BAB01368.1| contains similarity to
  misc_feature (7)..(195): Homolog of NCBI NO: 11994709 NR Description: contains similarity to receptor protein
  misc_feature (1)..(190): Homolog of NCBI NO: 15233236 NR Description: hypothetical protein; protein id: At3g22000.1 thaliana] >gi|9279757|dbj|BAB01383.1| contains similarity to
  misc_feature (1)..(190): Homolog of NCBI NO: 15233368 NR Description: putative protein; protein id: At4g20680.1
  misc_feature (1)..(185): Homolog of NCBI NO: 15233238 NR Description: hypothetical protein; protein id: At3g22010.1 thaliana] >gi|9279758|dbj|BAB01384.1| contains similarity to
  misc_feature (1)..(185): Homolog of NCBI NO: 15233235 NR Description: receptor kinase common family, putative; protein At3g21990.1 [Arabidopsis thaliana] >gi|9279756|dbj|BAB01382.1| similarity to receptor kinase~gene_id:MZN24.17 [Arabidopsis
  misc_feature (56)..(185): Homolog of NCBI NO: 9279741 NR Description: gene_id:MZN24.2~pir||T10609~similar to unknown
MKAYGKEPDMVSITYQCRIDSRGPKCQSCVVTAGYELLRKRCPRYKEAIIWYDQCLVEFSSLDTSGQINYDDNFCMPSAKNLIGNSISLEERLHLLNNLTKIAVTKIDKNIEGIKKPVLYAAGEKRLGTKSLYGMVQCSADLSVQGCNECMLYYIVHFQECWESKQGVRVLSRSCNFRYELYPFISPKGSYYTKF

SEQ ID NO: 70181 - protein, 186 aa, Arabidopsis thaliana
  peptide (1)..(186): Ceres Seq. ID no. 2172078
  misc_feature (123)..(177): Pfam Name: Domain of unknown function DUF26 Pfam Description: Domain of unknown function DUF26
  misc_feature (1)..(186): Homolog of NCBI NO: 9279744 NR Description: contains similarity to receptor protein
  misc_feature (1)..(186): Homolog of NCBI NO: 15233207 NR Description: receptor kinase, putative; protein id:
  misc_feature (1)..(186): Homolog of NCBI NO: 15233204 NR Description: pollen coat receptor kinase, putative; protein At3g21920.1 [Arabidopsis thaliana] >gi|9279743|dbj|BAB01369.1| similarity to receptor protein kinase~gene_id:MZN24.4
  misc_feature (1)..(183): Homolog of NCBI NO: 15233201 NR Description: hypothetical protein; protein id: At3g21910.1 thaliana] >gi|9279742|dbj|BAB01368.1| contains similarity to
  misc_feature (1)..(186): Homolog of NCBI NO: 11994709 NR Description: contains similarity to receptor protein
  misc_feature (1)..(181): Homolog of NCBI NO: 15233236 NR Description: hypothetical protein; protein id: At3g22000.1 thaliana] >gi|9279757|dbj|BAB01383.1| contains similarity to
  misc_feature (1)..(181): Homolog of NCBI NO: 15233368 NR Description: putative protein; protein id: At4g20680.1
  misc_feature (1)..(176): Homolog of NCBI NO: 15233238 NR Description: hypothetical protein; protein id: At3g22010.1 thaliana] >gi|9279758|dbj|BAB01384.1| contains similarity to
  misc_feature (1)..(176): Homolog of NCBI NO: 15233235 NR Description: receptor kinase common family, putative; protein At3g21990.1 [Arabidopsis thaliana] >gi|9279756|dbj|BAB01382.1| similarity to receptor kinase~gene_id:MZN24.17 [Arabidopsis
  misc_feature (47)..(176): Homolog of NCBI NO: 9279741 NR Description: gene_id:MZN24.2~pir||T10609~similar to unknown
MVSITYQCRIDSRGPKCQSCVVTAGYELLRKRCPRYKEAIIWYDQCLVEFSSLDTSGQINYDDNFCMPSAKNLIGNSISLEERLHLLNNLTKIAVTKIDKNIEGIKKPVLYAAGEKRLGTKSLYGMVQCSADLSVQGCNECMLYYIVHFQECWESKQGVRVLSRSCNFRYELYPFISPKGSYYTKF

SEQ ID NO: 70182 - DNA, 777 bp, Arabidopsis thaliana
  misc_feature (1)..(777): Ceres Seq. ID no. 2172123
  misc_feature: MA Experiment ID: 20000171 Result: Up-regulated in Transcription
  misc_feature: MA Experiment 20000171 PARAMETER Experiment Name: At_42deg_Heat_P Parameter: Age (day) Value: 14
  misc_feature: MA Experiment 20000171 PARAMETER Experiment Name: At_42deg_Heat_P Parameter: Organism Value: A. thaliana
  misc_feature: MA Experiment 20000171 PARAMETER Experiment Name: At_42deg_Heat_P Parameter: Plant Line Value: WS
  misc_feature: MA Experiment 20000171 PARAMETER Experiment Name: At_42deg_Heat_P Parameter: Temperature (deg C) Value: 42 vs. 22
  misc_feature: MA Experiment 20000171 PARAMETER Experiment Name: At_42deg_Heat_P Parameter: Timepoint (hr) Value: 1
  misc_feature: MA Experiment 20000171 PARAMETER Experiment Name: At_42deg_Heat_P Parameter: Tissue Value: Aerial
  misc_feature: MA Experiment ID: 20000173 Result: Up-regulated in Transcription
  misc_feature: MA Experiment 20000173 PARAMETER Experiment Name: At_42deg_Heat_P Parameter: Age (day) Value: 14
  misc_feature: MA Experiment 20000173 PARAMETER Experiment Name: At_42deg_Heat_P Parameter: Organism Value: A. thaliana
  misc_feature: MA Experiment 20000173 PARAMETER Experiment Name: At_42deg_Heat_P Parameter: Plant Line Value: WS
  misc_feature: MA Experiment 20000173 PARAMETER Experiment Name: At_42deg_Heat_P Parameter: Temperature (deg C) Value: 42 vs. 22
  misc_feature: MA Experiment 20000173 PARAMETER Experiment Name: At_42deg_Heat_P Parameter: Timepoint (hr) Value: 6
  misc_feature: MA Experiment 20000173 PARAMETER Experiment Name: At_42deg_Heat_P Parameter: Tissue Value: Aerial
atgtactcttcatattctctatcaaaacgcctcatttatgtccctatcctggccatccaattcctcctcgtacgcagcgtttcatcactaaaccttaccaatgagtatcttaaccacaaatgcttcgtcagtgaagggaaatataagcatggtgataagtacgagaataacctcaacgttctcaacaagaatgtcctttcttatgatcttactagcggttttctacacgtttctcatggcgagggtcctgattccgtcaccatcatattacaatgtcgtggcgactccttcgggtcgaattgccgctcttgctataccaccgccatcgacgggtttcataggagatgtcagagaaacaaagggggaattatatggtacgaccaatgttttcttgttatttctacgatcaaaccccaactcccaaggaagattgatttcaaaaacactttctcaatgcacaacccaaacaacgtgagcagtgaaccaggatcgtttgacaagatgacaagggatttcctctacaagctggtgcagaaagcctcttatccaaccgtggtcgaacaccagtctacatattatgctgcgggggagaaaaaactcgggaaaaggaagctgtatgcaatgatgcagtgtgcatcggacatattgcaatgtaaggtttgtttggaatggtgtatcagagagcttcccaagtgttgtgatggtaaacaaggagggagaattttgggtatgagttgtaatcttaggtatgagctatacccttttcttcggcgttaa

SEQ ID NO: 70183 - protein, 258 aa, Arabidopsis thaliana
  peptide (1)..(258): Ceres Seq. ID no. 2172124
  misc_feature (205)..(257): Pfam Name: Domain of unknown function DUF26 Pfam Description: Domain of unknown function DUF26
  misc_feature (1)..(258): Homolog of NCBI NO: 9279762 NR Description: emb|CAB45834.1~gene_id:MZN24.23~similar to
  misc_feature (1)..(257): Homolog of NCBI NO: 15233241 NR Description: hypothetical protein; protein id: At3g22040.1 thaliana] >gi|9279761|dbj|BAB01387.1|
  misc_feature (1)..(257): Homolog of NCBI NO: 15233368 NR Description: putative protein; protein id: At4g20680.1
  misc_feature (1)..(257): Homolog of NCBI NO: 15233236 NR Description: hypothetical protein; protein id: At3g22000.1 thaliana] >gi|9279757|dbj|BAB01383.1| contains similarity to
  misc_feature (45)..(257): Homolog of NCBI NO: 9279760 NR Description: emb|CAB45834.1~gene_id:MZN24.21~similar to
  misc_feature (1)..(257): Homolog of NCBI NO: 15233238 NR Description: hypothetical protein; protein id: At3g22010.1 thaliana] >gi|9279758|dbj|BAB01384.1| contains similarity to
  misc_feature (16)..(257): Homolog of NCBI NO: 15233366 NR Description: pollen coat receptor kinase, putative; protein At4g20670.1 [Arabidopsis thaliana] >gi|7485931|pir||T10609
  misc_feature (16)..(257): Homolog of NCBI NO: 15233235 NR Description: receptor kinase common family, putative; protein At3g21990.1 [Arabidopsis thaliana] >gi|9279756|dbj|BAB01382.1| similarity to receptor kinase~gene_id:MZN24.17 [Arabidopsis
  misc_feature (136)..(258): Homolog of NCBI NO: 15233242 NR Description: hypothetical protein; protein id: At3g22050.1
  misc_feature (23)..(256): Homolog of NCBI NO: 9279746 NR Description: contains similarity to receptor protein
MYSSYSLSKRLIYVPILAIQFLLVRSVSSLNLTNEYLNHKCFVSEGKYKHGDKYENNLNVLNKNVLSYDLTSGFLHVSHGEGPDSVTIILQCRGDSFGSNCRSCYTTAIDGFHRRCQRNKGGIIWYDQCFLVISTIKPQLPRKIDFKNTFSMHNPNNVSSEPGSFDKMTRDFLYKLVQKASYPTVVEHQSTYYAAGEKKLGKRKLYAMMQCASDILQCKVCLEWCIRELPKCCDGKQGGRILGMSCNLRYELYPFLRR

SEQ ID NO: 70184 - DNA, 1974 bp, Arabidopsis thaliana
  misc_feature (1)..(1974): Ceres Seq. ID no. 2172709
  misc_feature: MA Experiment ID: 20000171 Result: Down-regulated in Transcription
  misc_feature: MA Experiment 20000171 PARAMETER Experiment Name: At_42deg_Heat_P Parameter: Age (day) Value: 14
  misc_feature: MA Experiment 20000171 PARAMETER Experiment Name: At_42deg_Heat_P Parameter: Organism Value: A. thaliana
  misc_feature: MA Experiment 20000171 PARAMETER Experiment Name: At_42deg_Heat_P Parameter: Plant Line Value: WS
  misc_feature: MA Experiment 20000171 PARAMETER Experiment Name: At_42deg_Heat_P Parameter: Temperature (deg C) Value: 42 vs. 22
  misc_feature: MA Experiment 20000171 PARAMETER Experiment Name: At_42deg_Heat_P Parameter: Timepoint (hr) Value: 1
  misc_feature: MA Experiment 20000171 PARAMETER Experiment Name: At_42deg_Heat_P Parameter: Tissue Value: Aerial
  misc_feature: MA Experiment ID: 20000173 Result: Down-regulated in Transcription
  misc_feature: MA Experiment 20000173 PARAMETER Experiment Name: At_42deg_Heat_P Parameter: Age (day) Value: 14
  misc_feature: MA Experiment 20000173 PARAMETER Experiment Name: At_42deg_Heat_P Parameter: Organism Value: A. thaliana
  misc_feature: MA Experiment 20000173 PARAMETER Experiment Name: At_42deg_Heat_P Parameter: Plant Line Value: WS
  misc_feature: MA Experiment 20000173 PARAMETER Experiment Name: At_42deg_Heat_P Parameter: Temperature (deg C) Value: 42 vs. 22
  misc_feature: MA Experiment 20000173 PARAMETER Experiment Name: At_42deg_Heat_P Parameter: Timepoint (hr) Value: 6
  misc_feature: MA Experiment 20000173 PARAMETER Experiment Name: At_42deg_Heat_P Parameter: Tissue Value: Aerial
  misc_feature: MA Experiment ID: 20000184 Result: Down-regulated in Transcription
  misc_feature: MA Experiment 20000184 PARAMETER Experiment Name: At_Shoots__P Parameter: Age (day) Value: 7
  misc_feature: MA Experiment 20000184 PARAMETER Experiment Name: At_Shoots__P Parameter: Tissue Value: Shoots vs. Whole Plant
  misc_feature: MA Experiment ID: 20001451 Result: Down-regulated in Transcription
  misc_feature: MA Experiment 20001451 PARAMETER Experiment Name: At_Far-red-induction_P Parameter: Age (day) Value: 7
  misc_feature: MA Experiment 20001451 PARAMETER Experiment Name: At_Far-red-induction_P Parameter: Light Value: Far-red vs. White
  misc_feature: MA Experiment 20001451 PARAMETER Experiment Name: At_Far-red-induction_P Parameter: Organism Value: A. thaliana
  misc_feature: MA Experiment 20001451 PARAMETER Experiment Name: At_Far-red-induction_P Parameter: Plant Line Value: Columbia
  misc_feature: MA Experiment 20001451 PARAMETER Experiment Name: At_Far-red-induction_P Parameter: Timepoint (hr) Value: 24
  misc_feature: MA Experiment 20001451 PARAMETER Experiment Name: At_Far-red-induction_P Parameter: Tissue Value: Whole Plant
  misc_feature: MA Experiment ID: 20001905 Result: Down-regulated in Transcription
  misc_feature: MA Experiment 20001905 PARAMETER Experiment Name: At_Drought_Reproduction_P Parameter: Age (day) Value: 40
  misc_feature: MA Experiment 20001905 PARAMETER Experiment Name: At_Drought_Reproduction_P Parameter: Organism Value: A. thaliana
  misc_feature: MA Experiment 20001905 PARAMETER Experiment Name: At_Drought_Reproduction_P Parameter: Plant Line Value: WS
  misc_feature: MA Experiment 20001905 PARAMETER Experiment Name: At_Drought_Reproduction_P Parameter: Timepoint (day) Value: 10
  misc_feature: MA Experiment 20001905 PARAMETER Experiment Name: At_Drought_Reproduction_P Parameter: Tissue Value: Rosettes
  misc_feature: MA Experiment 20001905 PARAMETER Experiment Name: At_Drought_Reproduction_P Parameter: Treatment Value: Drought vs. No Drought
atgggtgggctttgttcaaggagttcatctgtaaataatgctcctggtggaacctttgcacatgttaatggtcatcatctcaataacaatgcctctgacttgaattctcattctggtgaaagtggacttaaagatgatccttctcctgttaccgagaatgttgatgataataagcatacatcggaatcgttttcgtttcctatagtctctagtggatctcatcctcaaaatatcgaggatgggattcctcggttatcgagggttttatctcagaaatctagatccactaagtctagacaagctgctgttgctaaggtttcggaagtaagctctcttttgggtagggctggtactatgggacttggtaaagctgtggatgtgttggatacactcgggagtagtatgacgaatctgaatcttagtggggggttttcttctgcgacgacggtgaaagggaataagatatcaatcttgtcttttgaagttgctaatactattgttaaaggcgccaatcttatgcattctctttcgaaagatagcattactcatttgaaagaggttgtgttaccttcagaaggtgttcagaacctgatatcgaaagacatggatgaactgttgagaattgctgctgctgataaaagggaagagttgaggattttttctggagaggtggtgcgttttgggaatcgttgcaaggatcctcaataccacaacctggatcgtttctttgacaggttgggctctgaatttacaccccagaaacacttgaaacaggaagcagagaccattatgcaccagatgatgtcatttgttcattttacagctgacttgtatcatgaactccatgcgctggataggtttgaacaagattaccaacgtaagatccaggaagaagagaacccaagcacagcacaacgaggtgtgggagataccctcgctatcttgagaactgaattaaagagtcagaagaagcatgttagaaacttaaagaaaaagtctctttggtctaggatcttggaagaggtgatggagaaactagtagatgttgtccatttcttgcatttagagattcacgaagcctttggtggtgcggatcctgataagcctgcaaatgacccgccaatcaatcataaaaaactgggctctgctggtcttgccttgcattacgcaaacatcattactcaaattgatactcttgtgtcccggtctagcactatgcctgcaagcacaagagatgctttgtaccaaggtttacccccaagcataaaatctgctttacgctccagaatacagtccttccaggttaaagaagagctcactgttcctcaaataaaagctgaaatggaaaaaacattgcagtggcttgttcctgttgctacaaacaccaccaaagcgcatcatggttttggatgggttggagaatgggcaagttccgggtcggaggcgaaccagagacctgcaggtcaaaccatactaaggatagatactcttcaccatgcagataaagaaaaaaccgaggcttacatattagacctggtggtgtggctccatcatctcgttacccaagtcagggccactacaggttatggcctaagatctcctgttaagtctccaatcagatcacctaaccagaaaacgatccaactctccagcggttcacacaacccgagtatgggtttgccattgctgactacggaggatcaagagatgcttagagatgtaagcaagcggagaaagacgccaggaataagcaagagccaagagtttgaaacggtggctaaagcacgtctttgtaagcaccataggctaagcaaaagcagtagccactcaccaatgatgggcgagatgatgaagaataagaaggatactttctcaaccagaagaccttcttctgttcccatcattgattttgacattgatcgcatgaaagctctcgatgtgattgatcgcgtggacaccattcgaagcttgtag

SEQ ID NO: 70185 - protein, 657 aa, Arabidopsis thaliana
  peptide (1)..(657): Ceres Seq. ID no. 2172710
  misc_feature (379)..(464): Pfam Name: Protein of unknown function (DUF668) Pfam Description: Protein of unknown function (DUF668)
  misc_feature (265)..(657): Homolog of NCBI NO: 25403424 NR Description: protein F23M19.3 [imported] - Arabidopsis >gi|5091616|gb|AAD39604.1|AC007454_3 F23M19.3 [Arabidopsis
  misc_feature (1)..(259): Homolog of NCBI NO: 25403424 NR Description: protein F23M19.3 [imported] - Arabidopsis >gi|5091616|gb|AAD39604.1|AC007454_3 F23M19.3 [Arabidopsis
  misc_feature (1)..(655): Homolog of NCBI NO: 30682523 NR Description: expressed protein [Arabidopsis thaliana]
  misc_feature (296)..(656): Homolog of NCBI NO: 34908726 NR Description: P0491F11.23 [Oryza sativa (japonica
  misc_feature (1)..(319): Homolog of NCBI NO: 34908726 NR Description: P0491F11.23 [Oryza sativa (japonica
  misc_feature (112)..(522): Homolog of NCBI NO: 38345368 NR Description: OSJNBa0088K19.7 [Oryza sativa (japonica
  misc_feature (105)..(619): Homolog of NCBI NO: 18397646 NR Description: unknown protein; protein id: At1g30755.1, by cDNA: gi_20466801 [Arabidopsis thaliana]
  misc_feature (147)..(644): Homolog of NCBI NO: 34908726 NR Description: P0491F11.23 [Oryza sativa (japonica
  misc_feature (105)..(464): Homolog of NCBI NO: 25513510 NR Description: T5I8.21 protein - Arabidopsis thaliana
  misc_feature (155)..(363): Homolog of NCBI NO: 15228977 NR Description: hypothetical protein; protein id: At3g23160.1
MGGLCSRSSSVNNAPGGTFAHVNGHHLNNNASDLNSHSGESGLKDDPSPVTENVDDNKHTSESFSFPIVSSGSHPQNIEDGIPRLSRVLSQKSRSTKSRQAAVAKVSEVSSLLGRAGTMGLGKAVDVLDTLGSSMTNLNLSGGFSSATTVKGNKISILSFEVANTIVKGANLMHSLSKDSITHLKEVVLPSEGVQNLISKDMDELLRIAAADKREELRIFSGEVVRFGNRCKDPQYHNLDRFFDRLGSEFTPQKHLKQEAETIMHQMMSFVHFTADLYHELHALDRFEQDYQRKIQEEENPSTAQRGVGDTLAILRTELKSQKKHVRNLKKKSLWSRILEEVMEKLVDVVHFLHLEIHEAFGGADPDKPANDPPINHKKLGSAGLALHYANIITQIDTLVSRSSTMPASTRDALYQGLPPSIKSALRSRIQSFQVKEELTVPQIKAEMEKTLQWLVPVATNTTKAHHGFGWVGEWASSGSEANQRPAGQTILRIDTLHHADKEKTEAYILDLVVWLHHLVTQVRATTGYGLRSPVKSPIRSPNQKTIQLSSGSHNPSMGLPLLTTEDQEMLRDVSKRRKTPGISKSQEFETVAKARLCKHHRLSKSSSHSPMMGEMMKNKKDTFSTRRPSSVPIIDFDIDRMKALDVIDRVDTIRSL

SEQ ID NO: 70186 - protein, 539 aa, Arabidopsis thaliana
  peptide (1)..(539): Ceres Seq. ID no. 2172711
  misc_feature (261)..(346): Pfam Name: Protein of unknown function (DUF668) Pfam Description: Protein of unknown function (DUF668)
  misc_feature (147)..(539): Homolog of NCBI NO: 25403424 NR Description: protein F23M19.3 [imported] - Arabidopsis >gi|5091616|gb|AAD39604.1|AC007454_3 F23M19.3 [Arabidopsis
  misc_feature (1)..(141): Homolog of NCBI NO: 25403424 NR Description: protein F23M19.3 [imported] - Arabidopsis >gi|5091616|gb|AAD39604.1|AC007454_3 F23M19.3 [Arabidopsis
  misc_feature (1)..(537): Homolog of NCBI NO: 30682523 NR Description: expressed protein [Arabidopsis thaliana]
  misc_feature (178)..(538): Homolog of NCBI NO: 34908726 NR Description: P0491F11.23 [Oryza sativa (japonica
  misc_feature (1)..(201): Homolog of NCBI NO: 34908726 NR Description: P0491F11.23 [Oryza sativa (japonica
  misc_feature (1)..(404): Homolog of NCBI NO: 38345368 NR Description: OSJNBa0088K19.7 [Oryza sativa (japonica
  misc_feature (1)..(501): Homolog of NCBI NO: 18397646 NR Description: unknown protein; protein id: At1g30755.1, by cDNA: gi_20466801 [Arabidopsis thaliana]
  misc_feature (29)..(526): Homolog of NCBI NO: 34908726 NR Description: P0491F11.23 [Oryza sativa (japonica
  misc_feature (1)..(346): Homolog of NCBI NO: 25513510 NR Description: T5I8.21 protein - Arabidopsis thaliana
  misc_feature (37)..(245): Homolog of NCBI NO: 15228977 NR Description: hypothetical protein; protein id: At3g23160.1
MGLGKAVDVLDTLGSSMTNLNLSGGFSSATTVKGNKISILSFEVANTIVKGANLMHSLSKDSITHLKEVVLPSEGVQNLISKDMDELLRIAAADKREELRIFSGEVVRFGNRCKDPQYHNLDRFFDRLGSEFTPQKHLKQEAETIMHQMMSFVHFTADLYHELHALDRFEQDYQRKIQEEENPSTAQRGVGDTLAILRTELKSQKKHVRNLKKKSLWSRILEEVMEKLVDVVHFLHLEIHEAFGGADPDKPANDPPINHKKLGSAGLALHYANIITQIDTLVSRSSTMPASTRDALYQGLPPSIKSALRSRIQSFQVKEELTVPQIKAEMEKTLQWLVPVATNTTKAHHGFGWVGEWASSGSEANQRPAGQTILRIDTLHHADKEKTEAYILDLVVWLHHLVTQVRATTGYGLRSPVKSPIRSPNQKTIQLSSGSHNPSMGLPLLTTEDQEMLRDVSKRRKTPGISKSQEFETVAKARLCKHHRLSKSSSHSPMMGEMMKNKKDTFSTRRPSSVPIIDFDIDRMKALDVIDRVDTIRSL

SEQ ID NO: 70187 - protein, 523 aa, Arabidopsis thaliana
  peptide (1)..(523): Ceres Seq. ID no. 2172712
  misc_feature (245)..(330): Pfam Name: Protein of unknown function (DUF668) Pfam Description: Protein of unknown function (DUF668)
  misc_feature (21)..(229): Homolog of NCBI NO: 15228977 NR Description: hypothetical protein; protein id: At3g23160.1
  misc_feature (131)..(523): Homolog of NCBI NO: 25403424 NR Description: protein F23M19.3 [imported] - Arabidopsis >gi|5091616|gb|AAD39604.1|AC007454_3 F23M19.3 [Arabidopsis
  misc_feature (1)..(125): Homolog of NCBI NO: 25403424 NR Description: protein F23M19.3 [imported] - Arabidopsis >gi|5091616|gb|AAD39604.1|AC007454_3 F23M19.3 [Arabidopsis
  misc_feature (1)..(521): Homolog of NCBI NO: 30682523 NR Description: expressed protein [Arabidopsis thaliana]
  misc_feature (162)..(522): Homolog of NCBI NO: 34908726 NR Description: P0491F11.23 [Oryza sativa (japonica
  misc_feature (1)..(185): Homolog of NCBI NO: 34908726 NR Description: P0491F11.23 [Oryza sativa (japonica
  misc_feature (1)..(388): Homolog of NCBI NO: 38345368 NR Description: OSJNBa0088K19.7 [Oryza sativa (japonica
  misc_feature (1)..(485): Homolog of NCBI NO: 18397646 NR Description: unknown protein; protein id: At1g30755.1, by cDNA: gi_20466801 [Arabidopsis thaliana]
  misc_feature (13)..(510): Homolog of NCBI NO: 34908726 NR Description: P0491F11.23 [Oryza sativa (japonica
  misc_feature (1)..(330): Homolog of NCBI NO: 25513510 NR Description: T5I8.21 protein - Arabidopsis thaliana
MTNLNLSGGFSSATTVKGNKISILSFEVANTIVKGANLMHSLSKDSITHLKEVVLPSEGVQNLISKDMDELLRIAAADKREELRIFSGEVVRFGNRCKDPQYHNLDRFFDRLGSEFTPQKHLKQEAETIMHQMMSFVHFTADLYHELHALDRFEQDYQRKIQEEENPSTAQRGVGDTLAILRTELKSQKKHVRNLKKKSLWSRILEEVMEKLVDVVHFLHLEIHEAFGGADPDKPANDPPINHKKLGSAGLALHYANIITQIDTLVSRSSTMPASTRDALYQGLPPSIKSALRSRIQSFQVKEELTVPQIKAEMEKTLQWLVPVATNTTKAHHGFGWVGEWASSGSEANQRPAGQTILRIDTLHHADKEKTEAYILDLVVWLHHLVTQVRATTGYGLRSPVKSPIRSPNQKTIQLSSGSHNPSMGLPLLTTEDQEMLRDVSKRRKTPGISKSQEFETVAKARLCKHHRLSKSSSHSPMMGEMMKNKKDTFSTRRPSSVPIIDFDIDRMKALDVIDRVDTIRSL

SEQ ID NO: 70188 - DNA, 1134 bp, Arabidopsis thaliana
  misc_feature (1)..(1134): Ceres Seq. ID no. 2173491
  misc_feature: MA Experiment ID: 20000328 Result: Down-regulated in Transcription
  misc_feature: MA Experiment 20000328 PARAMETER Experiment Name: At_42deg_Heat_Sub_P Parameter: Age (day) Value: 14
  misc_feature: MA Experiment 20000328 PARAMETER Experiment Name: At_42deg_Heat_Sub_P Parameter: Organism Value: A. thaliana
  misc_feature: MA Experiment 20000328 PARAMETER Experiment Name: At_42deg_Heat_Sub_P Parameter: Plant Line Value: WS
  misc_feature: MA Experiment 20000328 PARAMETER Experiment Name: At_42deg_Heat_Sub_P Parameter: Temperature (deg C) Value: 42 vs. 22
  misc_feature: MA Experiment 20000328 PARAMETER Experiment Name: At_42deg_Heat_Sub_P Parameter: Timepoint (hr) Value: 6
  misc_feature: MA Experiment 20000328 PARAMETER Experiment Name: At_42deg_Heat_Sub_P Parameter: Tissue Value: Aerial
  misc_feature: MA Experiment ID: 20000355 Result: Up-regulated in Transcription
  misc_feature: MA Experiment 20000355 PARAMETER Experiment Name: At_Siliques_Sub_P Parameter: Age (day) Value: 21
  misc_feature: MA Experiment 20000355 PARAMETER Experiment Name: At_Siliques_Sub_P Parameter: Organism Value: A. thaliana
  misc_feature: MA Experiment 20000355 PARAMETER Experiment Name: At_Siliques_Sub_P Parameter: Plant Line Value: WS
  misc_feature: MA Experiment 20000355 PARAMETER Experiment Name: At_Siliques_Sub_P Parameter: Tissue Value: Less Than 5mm Siliques vs. Whole Plant
  misc_feature: MA Experiment ID: 20000440 Result: Up-regulated in Transcription
  misc_feature: MA Experiment 20000440 PARAMETER Experiment Name: At_Closed-Flower__Sub_P Parameter: Tissue Value: Closed Flower vs. Whole Plant
atgagttttttcagatcaaagacttcaaaaactgaaacacaacaaccatcatcgtatggacaacaacaagacgctatgtactcatcttacggaaccgtgagtgacgaagtgttattacagattcatggatgcagagctcatctcatcaacggatccgaagctgtggagctagccgccggagacttcgagcttgtacaagtcttagacagcaacgtagccttagctatggtcgtgaggatcggaaatgacttacaatggccggtgattaaagacgagccagtggtgaaacttgactctcgtgactacctcttcacgttgccggttaaagatggagagccacttagttacggcatcacgtttttccctattgatgaaaatgacatcgtttttgtgaatagtatcgagttgctagacgatttcttgagagagaattcttgtttctcttcgtctccgtcttcttcttcgtcttcttcttcgtcttcttcttcgagtgttaacaatggaattgattggaaagagtttgcgcctaagattgaagattataacaatgttgtagctaaagctattgcaggaggtacagggcatatcattagagggatgtttaaatgcagtaatgcttacactaatcaggttcataaaggaggtgaaattatgattacgaaggctgagaaaaagaatggtgcctcgtcaaaaagaaatgcaaccacaaacaagaatcaaatcaacaagaaccttcaacgagtaaggaaattgtctagggcgacggagaaattgagcaagacaatgttgaatggtgtgggagtggtgagtggctcggtgatgggtccagttgtaaagtcgaagccagggaaagcttttttctcaatggttccaggggaggttctattggcttcacttgatgctcttaataaattactagacgctgctgaagccgcagagagacaaactctttctgctacgtccaaagctctacaagaatggttaggtgagagcgcgggagaagctacgaaagatgtactaggcacggttgggcacgcagccggcactgcgtggaacgtcttcaatatccgcaaagctttctctccttcctcttcagtcacatcggggatcctcaaaaacgcttcacgaaagtga

SEQ ID NO: 70189 - protein, 377 aa, Arabidopsis thaliana
  peptide (1)..(377): Ceres Seq. ID no. 2173492
  misc_feature (1)..(377): Homolog of NCBI NO: 26450712 NR Description: unknown protein [Arabidopsis thaliana]
  misc_feature (1)..(377): Homolog of NCBI NO: 25407536 NR Description: hypothetical protein AT4g15450 [imported] - thaliana >gi|5281017|emb|CAB45990.1| hypothetical protein thaliana] >gi|7268292|emb|CAB78587.1| hypothetical protein
  misc_feature (3)..(377): Homolog of NCBI NO: 7488048 NR Description: probable allene oxide synthase - Arabidopsis
  misc_feature (1)..(328): Homolog of NCBI NO: 30683270 NR Description: expressed protein [Arabidopsis thaliana]
  misc_feature (3)..(377): Homolog of NCBI NO: 15233098 NR Description: unknown protein; protein id: At3g21600.1
  misc_feature (33)..(211): Homolog of NCBI NO: 34910728 NR Description: P0690B02.29 [Oryza sativa (japonica
  misc_feature (210)..(376): Homolog of NCBI NO: 34910728 NR Description: P0690B02.29 [Oryza sativa (japonica
  misc_feature (110)..(375): Homolog of NCBI NO: 15230434 NR Description: putative protein; protein id: At3g51250.1, by cDNA: gi_15215687 [Arabidopsis thaliana]
  misc_feature (16)..(110): Homolog of NCBI NO: 15230434 NR Description: putative protein; protein id: At3g51250.1, by cDNA: gi_15215687 [Arabidopsis thaliana]
  misc_feature (171)..(376): Homolog of NCBI NO: 15227905 NR Description: putative senescence-associated protein 12; id: At2g17840.1, supported by cDNA: 40806., supported by cDNA:
MSFFRSKTSKTETQQPSSYGQQQDAMYSSYGTVSDEVLLQIHGCRAHLINGSEAVELAAGDFELVQVLDSNVALAMVVRIGNDLQWPVIKDEPVVKLDSRDYLFTLPVKDGEPLSYGITFFPIDENDIVFVNSIELLDDFLRENSCFSSSPSSSSSSSSSSSSSVNNGIDWKEFAPKIEDYNNVVAKAIAGGTGHIIRGMFKCSNAYTNQVHKGGEIMITKAEKKNGASSKRNATTNKNQINKNLQRVRKLSRATEKLSKTMLNGVGVVSGSVMGPVVKSKPGKAFFSMVPGEVLLASLDALNKLLDAAEAAERQTLSATSKALQEWLGESAGEATKDVLGTVGHAAGTAWNVFNIRKAFSPSSSVTSGILKNASRK

SEQ ID NO: 70190 - protein, 352 aa, Arabidopsis thaliana
  peptide (1)..(352): Ceres Seq. ID no. 2173493
  misc_feature (1)..(352): Homolog of NCBI NO: 26450712 NR Description: unknown protein [Arabidopsis thaliana]
  misc_feature (1)..(352): Homolog of NCBI NO: 25407536 NR Description: hypothetical protein AT4g15450 [imported] - thaliana >gi|5281017|emb|CAB45990.1| hypothetical protein thaliana] >gi|7268292|emb|CAB78587.1| hypothetical protein
  misc_feature (1)..(352): Homolog of NCBI NO: 7488048 NR Description: probable allene oxide synthase - Arabidopsis
  misc_feature (1)..(303): Homolog of NCBI NO: 30683270 NR Description: expressed protein [Arabidopsis thaliana]
  misc_feature (1)..(352): Homolog of NCBI NO: 15233098 NR Description: unknown protein; protein id: At3g21600.1
  misc_feature (8)..(186): Homolog of NCBI NO: 34910728 NR Description: P0690B02.29 [Oryza sativa (japonica
  misc_feature (185)..(351): Homolog of NCBI NO: 34910728 NR Description: P0690B02.29 [Oryza sativa (japonica
  misc_feature (85)..(350): Homolog of NCBI NO: 15230434 NR Description: putative protein; protein id: At3g51250.1, by cDNA: gi_15215687 [Arabidopsis thaliana]
  misc_feature (1)..(85): Homolog of NCBI NO: 15230434 NR Description: putative protein; protein id: At3g51250.1, by cDNA: gi_15215687 [Arabidopsis thaliana]
  misc_feature (146)..(351): Homolog of NCBI NO: 15227905 NR Description: putative senescence-associated protein 12; id: At2g17840.1, supported by cDNA: 40806., supported by cDNA:
MYSSYGTVSDEVLLQIHGCRAHLINGSEAVELAAGDFELVQVLDSNVALAMVVRIGNDLQWPVIKDEPVVKLDSRDYLFTLPVKDGEPLSYGITFFPIDENDIVFVNSIELLDDFLRENSCFSSSPSSSSSSSSSSSSSVNNGIDWKEFAPKIEDYNNVVAKAIAGGTGHIIRGMFKCSNAYTNQVHKGGEIMITKAEKKNGASSKRNATTNKNQINKNLQRVRKLSRATEKLSKTMLNGVGVVSGSVMGPVVKSKPGKAFFSMVPGEVLLASLDALNKLLDAAEAAERQTLSATSKALQEWLGESAGEATKDVLGTVGHAAGTAWNVFNIRKAFSPSSSVTSGILKNASRK

SEQ ID NO: 70191 - protein, 302 aa, Arabidopsis thaliana
  peptide (1)..(302): Ceres Seq. ID no. 2173494
  misc_feature (1)..(302): Homolog of NCBI NO: 26450712 NR Description: unknown protein [Arabidopsis thaliana]
  misc_feature (1)..(302): Homolog of NCBI NO: 25407536 NR Description: hypothetical protein AT4g15450 [imported] - thaliana >gi|5281017|emb|CAB45990.1| hypothetical protein thaliana] >gi|7268292|emb|CAB78587.1| hypothetical protein
  misc_feature (1)..(302): Homolog of NCBI NO: 7488048 NR Description: probable allene oxide synthase - Arabidopsis
  misc_feature (1)..(253): Homolog of NCBI NO: 30683270 NR Description: expressed protein [Arabidopsis thaliana]
  misc_feature (1)..(302): Homolog of NCBI NO: 15233098 NR Description: unknown protein; protein id: At3g21600.1
  misc_feature (1)..(136): Homolog of NCBI NO: 34910728 NR Description: P0690B02.29 [Oryza sativa (japonica
  misc_feature (135)..(301): Homolog of NCBI NO: 34910728 NR Description: P0690B02.29 [Oryza sativa (japonica
  misc_feature (35)..(300): Homolog of NCBI NO: 15230434 NR Description: putative protein; protein id: At3g51250.1, by cDNA: gi_15215687 [Arabidopsis thaliana]
  misc_feature (1)..(35): Homolog of NCBI NO: 15230434 NR Description: putative protein; protein id: At3g51250.1, by cDNA: gi_15215687 [Arabidopsis thaliana]
  misc_feature (96)..(301): Homolog of NCBI NO: 15227905 NR Description: putative senescence-associated protein 12; id: At2g17840.1, supported by cDNA: 40806., supported by cDNA:
MVVRIGNDLQWPVIKDEPVVKLDSRDYLFTLPVKDGEPLSYGITFFPIDENDIVFVNSIELLDDFLRENSCFSSSPSSSSSSSSSSSSSVNNGIDWKEFAPKIEDYNNVVAKAIAGGTGHIIRGMFKCSNAYTNQVHKGGEIMITKAEKKNGASSKRNATTNKNQINKNLQRVRKLSRATEKLSKTMLNGVGVVSGSVMGPVVKSKPGKAFFSMVPGEVLLASLDALNKLLDAAEAAERQTLSATSKALQEWLGESAGEATKDVLGTVGHAAGTAWNVFNIRKAFSPSSSVTSGILKNASRK

SEQ ID NO: 70192 - DNA, 630 bp, Arabidopsis thaliana
  misc_feature (1)..(630): Ceres Seq. ID no. 2174168
  misc_feature: MA Experiment ID: 20000173 Result: Down-regulated in Transcription
  misc_feature: MA Experiment 20000173 PARAMETER Experiment Name: At_42deg_Heat_P Parameter: Age (day) Value: 14
  misc_feature: MA Experiment 20000173 PARAMETER Experiment Name: At_42deg_Heat_P Parameter: Organism Value: A. thaliana
  misc_feature: MA Experiment 20000173 PARAMETER Experiment Name: At_42deg_Heat_P Parameter: Plant Line Value: WS
  misc_feature: MA Experiment 20000173 PARAMETER Experiment Name: At_42deg_Heat_P Parameter: Temperature (deg C) Value: 42 vs. 22
  misc_feature: MA Experiment 20000173 PARAMETER Experiment Name: At_42deg_Heat_P Parameter: Timepoint (hr) Value: 6
  misc_feature: MA Experiment 20000173 PARAMETER Experiment Name: At_42deg_Heat_P Parameter: Tissue Value: Aerial
  misc_feature: MA Experiment ID: 20000184 Result: Up-regulated in Transcription
  misc_feature: MA Experiment 20000184 PARAMETER Experiment Name: At_Shoots__P Parameter: Age (day) Value: 7
  misc_feature: MA Experiment 20000184 PARAMETER Experiment Name: At_Shoots__P Parameter: Tissue Value: Shoots vs. Whole Plant
  misc_feature: MA Experiment ID: 20000227 Result: Down-regulated in Transcription
  misc_feature: MA Experiment 20000227 PARAMETER Experiment Name: At_Root-Tips-vs-Tops_P Parameter: Tissue Value: Root Tips vs. Root Tops
  misc_feature: MA Experiment ID: 20000265 Result: Down-regulated in Transcription
  misc_feature: MA Experiment 20000265 PARAMETER Experiment Name: At_Open_Flower_P Parameter: Age (day) Value: 21
  misc_feature: MA Experiment 20000265 PARAMETER Experiment Name: At_Open_Flower_P Parameter: Plant Line Value: WS
  misc_feature: MA Experiment 20000265 PARAMETER Experiment Name: At_Open_Flower_P Parameter: Tissue Value: Closed Flower vs. Whole Plant
  misc_feature: MA Experiment ID: 20000268 Result: Up-regulated in Transcription
  misc_feature: MA Experiment 20000268 PARAMETER Experiment Name: At_100mM_NaCl__P Parameter: Age (day) Value: 14
  misc_feature: MA Experiment 20000268 PARAMETER Experiment Name: At_100mM_NaCl__P Parameter: Organism Value: A. thaliana
  misc_feature: MA Experiment 20000268 PARAMETER Experiment Name: At_100mM_NaCl__P Parameter: Plant Line Value: WS
  misc_feature: MA Experiment 20000268 PARAMETER Experiment Name: At_100mM_NaCl__P Parameter: Timepoint (hr) Value: 6
  misc_feature: MA Experiment 20000268 PARAMETER Experiment Name: At_100mM_NaCl__P Parameter: Tissue Value: Whole Plant
  misc_feature: MA Experiment 20000268 PARAMETER Experiment Name: At_100mM_NaCl__P Parameter: Treatment Value: 100mM NaCl vs. No Treatment
  misc_feature: MA Experiment ID: 20000436 Result: Up-regulated in Transcription
  misc_feature: MA Experiment 20000436 PARAMETER Experiment Name: At_Drought_P Parameter: Age (day) Value: 7
  misc_feature: MA Experiment 20000436 PARAMETER Experiment Name: At_Drought_P Parameter: Organism Value: A. thaliana
  misc_feature: MA Experiment 20000436 PARAMETER Experiment Name: At_Drought_P Parameter: Plant Line Value: WS
  misc_feature: MA Experiment 20000436 PARAMETER Experiment Name: At_Drought_P Parameter: Timepoint (hr) Value: 12
  misc_feature: MA Experiment 20000436 PARAMETER Experiment Name: At_Drought_P Parameter: Tissue Value: Whole Plant
  misc_feature: MA Experiment 20000436 PARAMETER Experiment Name: At_Drought_P Parameter: Treatment Value: Drought vs. No Drought
  misc_feature: MA Experiment ID: 20000438 Result: Up-regulated in Transcription
  misc_feature: MA Experiment 20000438 PARAMETER Experiment Name: At_Shoots__P Parameter: Age (day) Value: 14
  misc_feature: MA Experiment 20000438 PARAMETER Experiment Name: At_Shoots__P Parameter: Tissue Value: Shoots vs. Whole Plant
  misc_feature: MA Experiment ID: 20000439 Result: Up-regulated in Transcription
  misc_feature: MA Experiment 20000439 PARAMETER Experiment Name: At_Roots__P Parameter: Age (day) Value: 14 vs. 21
  misc_feature: MA Experiment 20000439 PARAMETER Experiment Name: At_Roots__P Parameter: Organism Value: A. thaliana
  misc_feature: MA Experiment 20000439 PARAMETER Experiment Name: At_Roots__P Parameter: Tissue Value: Roots vs. Whole Plant
  misc_feature: MA Experiment ID: 20000451 Result: Down-regulated in Transcription
  misc_feature: MA Experiment 20000451 PARAMETER Experiment Name: At_CS6879_Shoots-Roots_P Parameter: Age (day) Value: 14
  misc_feature: MA Experiment 20000451 PARAMETER Experiment Name: At_CS6879_Shoots-Roots_P Parameter: Organism Value: A. thaliana
  misc_feature: MA Experiment 20000451 PARAMETER Experiment Name: At_CS6879_Shoots-Roots_P Parameter: Plant Line Value: CS6879 vs. WS
  misc_feature: MA Experiment 20000451 PARAMETER Experiment Name: At_CS6879_Shoots-Roots_P Parameter: Tissue Value: Roots
  misc_feature: MA Experiment ID: 20000573 Result: Down-regulated in Transcription
  misc_feature: MA Experiment 20000573 PARAMETER Experiment Name: At_100uM_ABA_Mutants__P Parameter: Organism Value: A. thaliana
  misc_feature: MA Experiment 20000573 PARAMETER Experiment Name: At_100uM_ABA_Mutants__P Parameter: Plant Line Value: CS22 vs. Ler wt
  misc_feature: MA Experiment 20000573 PARAMETER Experiment Name: At_100uM_ABA_Mutants__P Parameter: Timepoint (hr) Value: N/A
  misc_feature: MA Experiment 20000573 PARAMETER Experiment Name: At_100uM_ABA_Mutants__P Parameter: Tissue Value: Whole Plant
  misc_feature: MA Experiment 20000573 PARAMETER Experiment Name: At_100uM_ABA_Mutants__P Parameter: Treatment Value: None
  misc_feature: MA Experiment ID: 20000794 Result: Down-regulated in Transcription
  misc_feature: MA Experiment 20000794 PARAMETER Experiment Name: At_Petals_P Parameter: Age (day) Value: 23-25 days
  misc_feature: MA Experiment 20000794 PARAMETER Experiment Name: At_Petals_P Parameter: Plant Line Value: WS
  misc_feature: MA Experiment 20000794 PARAMETER Experiment Name: At_Petals_P Parameter: Tissue Value: Petals vs. Whole plant
  misc_feature: MA Experiment ID: 20001457 Result: Down-regulated in Transcription
  misc_feature: MA Experiment 20001457 PARAMETER Experiment Name: At_50mM_NH4NO3_L-to-H_P Parameter: Age (day) Value: Undefined
  misc_feature: MA Experiment 20001457 PARAMETER Experiment Name: At_50mM_NH4NO3_L-to-H_P Parameter: Organism Value: Undefined
  misc_feature: MA Experiment 20001457 PARAMETER Experiment Name: At_50mM_NH4NO3_L-to-H_P Parameter: Plant Line Value: Undefined
  misc_feature: MA Experiment 20001457 PARAMETER Experiment Name: At_50mM_NH4NO3_L-to-H_P Parameter: Timepoint (hr) Value: 0.5
  misc_feature: MA Experiment 20001457 PARAMETER Experiment Name: At_50mM_NH4NO3_L-to-H_P Parameter: Tissue Value: Siliques
  misc_feature: MA Experiment 20001457 PARAMETER Experiment Name: At_50mM_NH4NO3_L-to-H_P Parameter: Treatment Value: 50mM NH4NO3 vs. 100mM Manitol
  misc_feature: MA Experiment ID: 20001557 Result: Down-regulated in Transcription
  misc_feature: MA Experiment 20001557 PARAMETER Experiment Name: At_Drought_Soil_Dry_P Parameter: Age (day) Value: 27
  misc_feature: MA Experiment 20001557 PARAMETER Experiment Name: At_Drought_Soil_Dry_P Parameter: Organism Value: A. thaliana
  misc_feature: MA Experiment 20001557 PARAMETER Experiment Name: At_Drought_Soil_Dry_P Parameter: Plant Line Value: WS
  misc_feature: MA Experiment 20001557 PARAMETER Experiment Name: At_Drought_Soil_Dry_P Parameter: Post Timepoint (hr) Value: 3
  misc_feature: MA Experiment 20001557 PARAMETER Experiment Name: At_Drought_Soil_Dry_P Parameter: Post-Treatment Value: Re-Water vs. No Drought
  misc_feature: MA Experiment 20001557 PARAMETER Experiment Name: At_Drought_Soil_Dry_P Parameter: Timepoint (day) Value: 13
  misc_feature: MA Experiment 20001557 PARAMETER Experiment Name: At_Drought_Soil_Dry_P Parameter: Treatment Value: Drought vs. No Drought
  misc_feature: MA Experiment ID: 20001558 Result: Down-regulated in Transcription
  misc_feature: MA Experiment 20001558 PARAMETER Experiment Name: At_Drought_Soil_Dry_P Parameter: Age (day) Value: 27
  misc_feature: MA Experiment 20001558 PARAMETER Experiment Name: At_Drought_Soil_Dry_P Parameter: Organism Value: A. thaliana
  misc_feature: MA Experiment 20001558 PARAMETER Experiment Name: At_Drought_Soil_Dry_P Parameter: Plant Line Value: WS
  misc_feature: MA Experiment 20001558 PARAMETER Experiment Name: At_Drought_Soil_Dry_P Parameter: Post Timepoint (hr) Value: 6
  misc_feature: MA Experiment 20001558 PARAMETER Experiment Name: At_Drought_Soil_Dry_P Parameter: Post-Treatment Value: Re-Water vs. No Drought
  misc_feature: MA Experiment 20001558 PARAMETER Experiment Name: At_Drought_Soil_Dry_P Parameter: Timepoint (day) Value: 13
  misc_feature: MA Experiment 20001558 PARAMETER Experiment Name: At_Drought_Soil_Dry_P Parameter: Treatment Value: Drought vs. No Drought
atggccaaagcatataacttggacgatttaggagaaacgagtgataacagtacactagaatgtttacaaacgaacaagtgtccaattcagatgcaagactcttcctctcacgaatcgcaacgtaacctccggtcaccggtgccggagaaaaccggaaagagttctaagactaaaaatgagcaaaaaggtgtttctaaacaaccaaattttcgtggggtcagaatgagacaatggggaaaatgggtgtctgaaattagagaaccaagaaagaaatcaagaatatggctcggtactttctctacgccggagatggcggcgcgtgcacacgacgtggcggctttagccatcaaaggtggctctgcccaccttaatttcccggagctagcttaccatttgccgagaccggctagcgcggaccctaaagacattcaagaagccgccgccgcagcagctgccgttgactggaaagcaccggagtctccgtctagcaccgtgacgtcatctccagtcgccgacgacgctttctccgatcttcctgatcttttgcttgacgtgaatgatcacaacaaaaacgatggattctgggactcgtttccgtacgaagatcctttcttcttggaaaattactag

SEQ ID NO: 70193 - protein, 209 aa, Arabidopsis thaliana
  peptide (1)..(209): Ceres Seq. ID no. 2174169
  misc_feature (67)..(131): Pfam Name: AP2 domain Pfam Description: AP2 domain
  misc_feature (31)..(209): Homolog of NCBI NO: 15235858 NR Description: AP2 domain TINY-related protein; protein id: [Arabidopsis thaliana] >gi|25350649|pir||F85186 apetala2 domain
  misc_feature (22)..(209): Homolog of NCBI NO: 15227471 NR Description: putative AP2 domain transcription factor; protein At2g35700.1 [Arabidopsis thaliana] >gi|25350648|pir||H84771
  misc_feature (45)..(169): Homolog of NCBI NO: 15223860 NR Description: transcription factor TINY, putative; protein id:
  misc_feature (52)..(174): Homolog of NCBI NO: 14140163 NR Description: putative AP2 domain containing protein [Oryza
  misc_feature (52)..(171): Homolog of NCBI NO: 37536842 NR Description: putative DNA binding protein [Oryza sativa
  misc_feature (51)..(187): Homolog of NCBI NO: 38605848 NR Description: OSJNBb0034G17.6 [Oryza sativa (japonica
  misc_feature (27)..(173): Homolog of NCBI NO: 38605845 NR Description: OSJNBb0034G17.3 [Oryza sativa (japonica
  misc_feature (66)..(209): Homolog of NCBI NO: 38605844 NR Description: OSJNBb0034G17.2 [Oryza sativa (japonica
  misc_feature (10)..(172): Homolog of NCBI NO: 15225381 NR Description: putative AP2 domain transcription factor; protein
  misc_feature (10)..(172): Homolog of NCBI NO: 21592664 NR Description: putative AP2 domain transcription factor
MAKAYNLDDLGETSDNSTLECLQTNKCPIQMQDSSSHESQRNLRSPVPEKTGKSSKTKNEQKGVSKQPNFRGVRMRQWGKWVSEIREPRKKSRIWLGTFSTPEMAARAHDVAALAIKGGSAHLNFPELAYHLPRPASADPKDIQEAAAAAAAVDWKAPESPSSTVTSSPVADDAFSDLPDLLLDVNDHNKNDGFWDSFPYEDPFFLENY

SEQ ID NO: 70194 - protein, 179 aa, Arabidopsis thaliana
  peptide (1)..(179): Ceres Seq. ID no. 2174170
  misc_feature (37)..(101): Pfam Name: AP2 domain Pfam Description: AP2 domain
  misc_feature (1)..(179): Homolog of NCBI NO: 15235858 NR Description: AP2 domain TINY-related protein; protein id: [Arabidopsis thaliana] >gi|25350649|pir||F85186 apetala2 domain
  misc_feature (1)..(179): Homolog of NCBI NO: 15227471 NR Description: putative AP2 domain transcription factor; protein At2g35700.1 [Arabidopsis thaliana] >gi|25350648|pir||H84771
  misc_feature (15)..(139): Homolog of NCBI NO: 15223860 NR Description: transcription factor TINY, putative; protein id:
  misc_feature (22)..(144): Homolog of NCBI NO: 14140163 NR Description: putative AP2 domain containing protein [Oryza
  misc_feature (22)..(141): Homolog of NCBI NO: 37536842 NR Description: putative DNA binding protein [Oryza sativa
  misc_feature (21)..(157): Homolog of NCBI NO: 38605848 NR Description: OSJNBb0034G17.6 [Oryza sativa (japonica
  misc_feature (1)..(143): Homolog of NCBI NO: 38605845 NR Description: OSJNBb0034G17.3 [Oryza sativa (japonica
  misc_feature (36)..(179): Homolog of NCBI NO: 38605844 NR Description: OSJNBb0034G17.2 [Oryza sativa (japonica
  misc_feature (1)..(142): Homolog of NCBI NO: 15225381 NR Description: putative AP2 domain transcription factor; protein
  misc_feature (1)..(142): Homolog of NCBI NO: 21592664 NR Description: putative AP2 domain transcription factor
MQDSSSHESQRNLRSPVPEKTGKSSKTKNEQKGVSKQPNFRGVRMRQWGKWVSEIREPRKKSRIWLGTFSTPEMAARAHDVAALAIKGGSAHLNFPELAYHLPRPASADPKDIQEAAAAAAAVDWKAPESPSSTVTSSPVADDAFSDLPDLLLDVNDHNKNDGFWDSFPYEDPFFLENY

SEQ ID NO: 70195 - protein, 135 aa, Arabidopsis thaliana
  peptide (1)..(135): Ceres Seq. ID no. 2174171
  misc_feature (1)..(57): Pfam Name: AP2 domain Pfam Description: AP2 domain
  misc_feature (1)..(135): Homolog of NCBI NO: 15235858 NR Description: AP2 domain TINY-related protein; protein id: [Arabidopsis thaliana] >gi|25350649|pir||F85186 apetala2 domain
  misc_feature (1)..(135): Homolog of NCBI NO: 15227471 NR Description: putative AP2 domain transcription factor; protein At2g35700.1 [Arabidopsis thaliana] >gi|25350648|pir||H84771
  misc_feature (1)..(95): Homolog of NCBI NO: 15223860 NR Description: transcription factor TINY, putative; protein id:
  misc_feature (1)..(100): Homolog of NCBI NO: 14140163 NR Description: putative AP2 domain containing protein [Oryza
  misc_feature (1)..(97): Homolog of NCBI NO: 37536842 NR Description: putative DNA binding protein [Oryza sativa
  misc_feature (1)..(113): Homolog of NCBI NO: 38605848 NR Description: OSJNBb0034G17.6 [Oryza sativa (japonica
  misc_feature (1)..(99): Homolog of NCBI NO: 38605845 NR Description: OSJNBb0034G17.3 [Oryza sativa (japonica
  misc_feature (1)..(135): Homolog of NCBI NO: 38605844 NR Description: OSJNBb0034G17.2 [Oryza sativa (japonica
  misc_feature (1)..(98): Homolog of NCBI NO: 15225381 NR Description: putative AP2 domain transcription factor; protein
  misc_feature (1)..(98): Homolog of NCBI NO: 21592664 NR Description: putative AP2 domain transcription factor
MRQWGKWVSEIREPRKKSRIWLGTFSTPEMAARAHDVAALAIKGGSAHLNFPELAYHLPRPASADPKDIQEAAAAAAAVDWKAPESPSSTVTSSPVADDAFSDLPDLLLDVNDHNKNDGFWDSFPYEDPFFLENY

SEQ ID NO: 70196 - DNA, 3984 bp, Arabidopsis thaliana
  misc_feature (1)..(3984): Ceres Seq. ID no. 2174607
  misc_feature: MA Experiment ID: 20000173 Result: Down-regulated in Transcription
  misc_feature: MA Experiment 20000173 PARAMETER Experiment Name: At_42deg_Heat_P Parameter: Age (day) Value: 14
  misc_feature: MA Experiment 20000173 PARAMETER Experiment Name: At_42deg_Heat_P Parameter: Organism Value: A. thaliana
  misc_feature: MA Experiment 20000173 PARAMETER Experiment Name: At_42deg_Heat_P Parameter: Plant Line Value: WS
  misc_feature: MA Experiment 20000173 PARAMETER Experiment Name: At_42deg_Heat_P Parameter: Temperature (deg C) Value: 42 vs. 22
  misc_feature: MA Experiment 20000173 PARAMETER Experiment Name: At_42deg_Heat_P Parameter: Timepoint (hr) Value: 6
  misc_feature: MA Experiment 20000173 PARAMETER Experiment Name: At_42deg_Heat_P Parameter: Tissue Value: Aerial
  misc_feature: MA Experiment ID: 20000180 Result: Up-regulated in Transcription
  misc_feature: MA Experiment 20000180 PARAMETER Experiment Name: At_Germinating_Seeds_P Parameter: Age (hr) Value: 24 vs. 0
  misc_feature: MA Experiment 20000180 PARAMETER Experiment Name: At_Germinating_Seeds_P Parameter: Tissue Value: Germinating Seeds
  misc_feature: MA Experiment ID: 20000185 Result: Up-regulated in Transcription
  misc_feature: MA Experiment 20000185 PARAMETER Experiment Name: At_Roots__P Parameter: Age (day) Value: 7 vs. 21
  misc_feature: MA Experiment 20000185 PARAMETER Experiment Name: At_Roots__P Parameter: Organism Value: A. thaliana
  misc_feature: MA Experiment 20000185 PARAMETER Experiment Name: At_Roots__P Parameter: Tissue Value: Roots vs. Whole Plant
  misc_feature: MA Experiment ID: 20000234 Result: Up-regulated in Transcription
  misc_feature: MA Experiment 20000234 PARAMETER Experiment Name: At_Siliques_P Parameter: Age (day) Value: 21
  misc_feature: MA Experiment 20000234 PARAMETER Experiment Name: At_Siliques_P Parameter: Organism Value: A. thaliana
  misc_feature: MA Experiment 20000234 PARAMETER Experiment Name: At_Siliques_P Parameter: Plant Line Value: WS
  misc_feature: MA Experiment 20000234 PARAMETER Experiment Name: At_Siliques_P Parameter: Tissue Value: Less Than 5mm Siliques vs. Whole Plant
  misc_feature: MA Experiment ID: 20000235 Result: Up-regulated in Transcription
  misc_feature: MA Experiment 20000235 PARAMETER Experiment Name: At_Siliques_P Parameter: Age (day) Value: 21
  misc_feature: MA Experiment 20000235 PARAMETER Experiment Name: At_Siliques_P Parameter: Organism Value: A. thaliana
  misc_feature: MA Experiment 20000235 PARAMETER Experiment Name: At_Siliques_P Parameter: Plant Line Value: WS
  misc_feature: MA Experiment 20000235 PARAMETER Experiment Name: At_Siliques_P Parameter: Tissue Value: 5-10mm Siliques vs. Whole Plant
  misc_feature: MA Experiment ID: 20000264 Result: Up-regulated in Transcription
  misc_feature: MA Experiment 20000264 PARAMETER Experiment Name: At_Open_Flower_P Parameter: Age (day) Value: 21
  misc_feature: MA Experiment 20000264 PARAMETER Experiment Name: At_Open_Flower_P Parameter: Plant Line Value: WS
  misc_feature: MA Experiment 20000264 PARAMETER Experiment Name: At_Open_Flower_P Parameter: Tissue Value: Open Flower vs. Whole Plant
  misc_feature: MA Experiment ID: 20000265 Result: Up-regulated in Transcription
  misc_feature: MA Experiment 20000265 PARAMETER Experiment Name: At_Open_Flower_P Parameter: Age (day) Value: 21
  misc_feature: MA Experiment 20000265 PARAMETER Experiment Name: At_Open_Flower_P Parameter: Plant Line Value: WS
  misc_feature: MA Experiment 20000265 PARAMETER Experiment Name: At_Open_Flower_P Parameter: Tissue Value: Closed Flower vs. Whole Plant
  misc_feature: MA Experiment ID: 20000286 Result: Up-regulated in Transcription
  misc_feature: MA Experiment 20000286 PARAMETER Experiment Name: At_Open_Flower_P Parameter: Age (day) Value: 21
  misc_feature: MA Experiment 20000286 PARAMETER Experiment Name: At_Open_Flower_P Parameter: Plant Line Value: WS
  misc_feature: MA Experiment 20000286 PARAMETER Experiment Name: At_Open_Flower_P Parameter: Tissue Value: Half Open vs. Whole Plant
  misc_feature: MA Experiment ID: 20000439 Result: Up-regulated in Transcription
  misc_feature: MA Experiment 20000439 PARAMETER Experiment Name: At_Roots__P Parameter: Age (day) Value: 14 vs. 21
  misc_feature: MA Experiment 20000439 PARAMETER Experiment Name: At_Roots__P Parameter: Organism Value: A. thaliana
  misc_feature: MA Experiment 20000439 PARAMETER Experiment Name: At_Roots__P Parameter: Tissue Value: Roots vs. Whole Plant
  misc_feature: MA Experiment ID: 20000495 Result: Up-regulated in Transcription
  misc_feature: MA Experiment 20000495 PARAMETER Experiment Name: At_Guard_Cells_P Parameter: Harvest Date Value: 8/2/2002
  misc_feature: MA Experiment 20000495 PARAMETER Experiment Name: At_Guard_Cells_P Parameter: Organism Value: A. thaliana
  misc_feature: MA Experiment 20000495 PARAMETER Experiment Name: At_Guard_Cells_P Parameter: Tissue Value: Guard Cells vs. Leaves
atgggtgtcgaggattatcatgtgatagagcttgtcggtgaaggatcttttgggagggtttacaaaggaagacgcaagtataccggccagacggtggcgatgaagttcatcatgaaacaaggaaagactgacaaggatatacatagtctaaggcaagaaatcgagatattgcggaagctcaagcatgagaatatcattgaaatgctcgactcctttgaaaacgcacgagagttctgtgtcgtcactgagtttgcccaaggtgaattgtttgagattcttgaagatgacaagtgccttcccgaagagcaagttcaagcaatcgcaaagcaattggtaaaagcattagattacttgcattccaaccgtataattcaccgtgacatgaagccacaaaacattcttattggtgctggctctgtcgttaagctatgtgattttggttttgctcgagctatgtccaccaacactgtggttttgcgatccattaaaggcactccgctgtacatggcaccagagcttgtgaaagaacagccatacgatcgcactgtcgacctgtggtctcttggtgttatattgtacgagttatatgtaggtcagcctcccttctacaccaattctgtgtatgctctcattcgtcacattgttaaggatcctgtcaaatatcctgatgaaatgagtacttatttcgaaagctttttgaaaggattgctcaacaaggaaccccacagtcgattaacctggcctgctcttcgtgagcaccctttcgttaaagaaacacaagaagaagttgaagccagggaaatccatactgcagtagttgacaataaggcagcttggatgctcaaaggaaatggagggcaacagagaaatgtgttaaatgtcacagaaaagtgcgactcagtgaccctggttgaggacatgtctgctacaaaaggtctagctgacgttcagtcagatatgaagagtgctgtcaaagtaaattctccacccactgaggattttgtgggattcccaacccaagaggagataaaaagttcaggtaacccaacactggacaaattggaaaatacatcccgcactgttaaaggtgcacaagttataggtgaaaatgataaagcattggaccttgttttgctgtcactggaaagattttcaaaatcgccagattctaaaagggacaaagatgttgcttgctctgttcagtccctcaggatcatctccaatttggttgcaactcgtgccatagtttcagttggactgattgagaaaataacatgtgcactgctagactttactgacgctcttgttgggatgaaatcacccgagttcaacaacataataccaaagagtctttcagtcactaaaaacttggtagggcatgttgaaggcaataacatacatagttcttacatcaggcactggaccaaagtagtggaaatcttcatacaggtcgttagatgggaagaagagggaactggtagaattatatatgaggcctgttcttgcatcacaacaatgttatctcgagttgcccaagatcttaaatcttcaactcctgattctgtttctaaacagattttggagcatgctaacatgtctcgcatagttgatcatttgtgtctttgtctggcttcttctgggtcgagtttaacttccggctcttcgcaaatgttagcagctgcctgtgaagcttgtcgagcaatatggattctcatagatacttccgaaacattcttcaagaacgatgatgtaaacatattacctctagatgccttgcagaaccgtctctctcagcatgacataggaaacagtgagtggggtccgttatctgagaaacttgtcgatacagtgacaagagcatatctccgatcaaagcatgtgcaagttgctgttggtcattgccttcaccaacgagtggaggctccattggtttctgcaattcagctcttgtcaagatgctgccttcataatggaattctgcctagcatgctttgtggtcttcccagttcactgcctattacgaccgtagtcagtggtggagaggatggtacagttatttcagaaatattttctatactatcatacgcaacattatcaagcaaagaccagcaaacaggagaaaaagataacttcgagggcagactaaacaatctggtgttccattcatgccttatgttggcaacagttgctcaatgtttgaagttaactgggagaaattctgttctgttaatgcttacaacttctccaaagaagcatcaacatcgtctttctgctatagccaatcacattgcctcagatgataaaatcgaagcttctcttcagaatcactctgcttcagctatgcttgctctcgcatctattctcgctcttgaaaaaggatcttctgctggatcttctgtctctgagctagtggtgtctctgattcctcgagctactaagctttgttatcatcttaggcctatgccaagtaatgaaggtgaagtcatctctcattctgccaattatgccaaatggcacggacttctggatggatgtatcggtttattagaatccagattgaagtggggtggacctctagctgtgcagcagcttattgctagtggtacgccattgcttctcataaatctgttagctggcaaactttcaaatgcttccccagaggacatcaagaagacatccaaccggattggcttgtcccctattggcgttgtatggactatttcgtccatatgccactgtctttcgggtggcacaactttccgtcaggttcttgtgaaaatcgaaaccatgaagctaattacttgtttactatctgatgctcatatcaagctagtaaagagctggggaggtccggggggaggaaaagatggggtcagagagacaataaatgtgataattgatctcctagcatttccttttgttgctctgcaaagtcaaccaggttcgttatctgccacagcttctgtaaatagtggattcattctcaacattggctctcctggtgtgagagtatgcatggaagatagagatttgctaaaagctatagaagaggatatggacaaatacataatagtcctcctggaggtgggagtgccgagtttaatcctacgttgcttggatcatttggaattaaaagatttagtaaggcccgttgcttttcttgccaaaatggtgggtcgtccacgtcttgctgtagatctcgtgagcaaaggtctgttagatcctaatagaatgaaaaaattactcaaccaatcaagtccaagagaagtcatacttgatattttgatgatcatatctgatctatcgaggatggataaggctttttataaatacatcggcgaggcttctgttttacagcctttgaaagaatatcttacccatgtggatccaaatatacgtgcaaaagcttgtagtgctcttggcaatatgtgcagacacaatggatatttctacagcgctcttgcggaacatcaaatcatcggtctcctcattgatcgatgcgctgatccggacaaacgaacacagaaattcgcttgttttgctattggaaatgcggcttaccataacgacacgctgtatgaagagctaagaagatctataacgcagctagcaaacgttttgaccacggctgaagaagacaagacaaaagcaaacgcggctggtgcattgagcaaccttgtccgaaactccaacaaactctgtgaagatatagtctccaagggagctttacaaacgttactgaggctagttgcggattgctcgactcttgccttgaacccaagcaagaaagagacagcgagtgagtcaccgctcaagattgcactcttctcattggctaaaatgtgttcgaaccaccagatttgcagacagtttgtgaagtcatcagagttgttcccggtcattgcaaggcttaaacaatcccctgaggctaacattgctcactatgcttcagttattgtcgccaaagtcagtggtgagtcttaa

SEQ ID NO: 70197 - protein, 1327 aa, Arabidopsis thaliana
  peptide (1)..(1327): Ceres Seq. ID no. 2174608
  misc_feature (6)..(256): Pfam Name: Protein kinase domain Pfam Description: Protein kinase domain
  misc_feature (1)..(266): Homolog of NCBI NO: 15222909 NR Description: hypothetical protein; protein id: At1g50230.1
  misc_feature (3)..(528): Homolog of NCBI NO: 8745041 NR Description: probable MAP kinase kinase [Leishmania major]
  misc_feature (1025)..(1310): Homolog of NCBI NO: 8745041 NR Description: probable MAP kinase kinase [Leishmania major]
  misc_feature (3)..(347): Homolog of NCBI NO: 10046851 NR Description: putative mitogen-activated protein kinase kinase
  misc_feature (1025)..(1310): Homolog of NCBI NO: 10046851 NR Description: putative mitogen-activated protein kinase kinase
  misc_feature (3)..(256): Homolog of NCBI NO: 28269679 NR Description: serine/threonine kinase 36 [Mus musculus] Similar to serine/threonine kinase 36 (fused homolog, Drosophila)
  misc_feature (3)..(256): Homolog of NCBI NO: 35192968 NR Description: Unknown (protein for MGC:65628) [Mus musculus]
  misc_feature (3)..(256): Homolog of NCBI NO: 34876833 NR Description: similar to FUSED serine/threonine kinase [Rattus
  misc_feature (3)..(256): Homolog of NCBI NO: 6331315 NR Description: KIAA1278 protein [Homo sapiens]
  misc_feature (3)..(256): Homolog of NCBI NO: 9664225 NR Description: FUSED serine/threonine kinase [Homo sapiens]
MGVEDYHVIELVGEGSFGRVYKGRRKYTGQTVAMKFIMKQGKTDKDIHSLRQEIEILRKLKHENIIEMLDSFENAREFCVVTEFAQGELFEILEDDKCLPEEQVQAIAKQLVKALDYLHSNRIIHRDMKPQNILIGAGSVVKLCDFGFARAMSTNTVVLRSIKGTPLYMAPELVKEQPYDRTVDLWSLGVILYELYVGQPPFYTNSVYALIRHIVKDPVKYPDEMSTYFESFLKGLLNKEPHSRLTWPALREHPFVKETQEEVEAREIHTAVVDNKAAWMLKGNGGQQRNVLNVTEKCDSVTLVEDMSATKGLADVQSDMKSAVKVNSPPTEDFVGFPTQEEIKSSGNPTLDKLENTSRTVKGAQVIGENDKALDLVLLSLERFSKSPDSKRDKDVACSVQSLRIISNLVATRAIVSVGLIEKITCALLDFTDALVGMKSPEFNNIIPKSLSVTKNLVGHVEGNNIHSSYIRHWTKVVEIFIQVVRWEEEGTGRIIYEACSCITTMLSRVAQDLKSSTPDSVSKQILEHANMSRIVDHLCLCLASSGSSLTSGSSQMLAAACEACRAIWILIDTSETFFKNDDVNILPLDALQNRLSQHDIGNSEWGPLSEKLVDTVTRAYLRSKHVQVAVGHCLHQRVEAPLVSAIQLLSRCCLHNGILPSMLCGLPSSLPITTVVSGGEDGTVISEIFSILSYATLSSKDQQTGEKDNFEGRLNNLVFHSCLMLATVAQCLKLTGRNSVLLMLTTSPKKHQHRLSAIANHIASDDKIEASLQNHSASAMLALASILALEKGSSAGSSVSELVVSLIPRATKLCYHLRPMPSNEGEVISHSANYAKWHGLLDGCIGLLESRLKWGGPLAVQQLIASGTPLLLINLLAGKLSNASPEDIKKTSNRIGLSPIGVVWTISSICHCLSGGTTFRQVLVKIETMKLITCLLSDAHIKLVKSWGGPGGGKDGVRETINVIIDLLAFPFVALQSQPGSLSATASVNSGFILNIGSPGVRVCMEDRDLLKAIEEDMDKYIIVLLEVGVPSLILRCLDHLELKDLVRPVAFLAKMVGRPRLAVDLVSKGLLDPNRMKKLLNQSSPREVILDILMIISDLSRMDKAFYKYIGEASVLQPLKEYLTHVDPNIRAKACSALGNMCRHNGYFYSALAEHQIIGLLIDRCADPDKRTQKFACFAIGNAAYHNDTLYEELRRSITQLANVLTTAEEDKTKANAAGALSNLVRNSNKLCEDIVSKGALQTLLRLVADCSTLALNPSKKETASESPLKIALFSLAKMCSNHQICRQFVKSSELFPVIARLKQSPEANIAHYASVIVAKVSGES

SEQ ID NO: 70198 - protein, 1294 aa, Arabidopsis thaliana
  peptide (1)..(1294): Ceres Seq. ID no. 2174609
  misc_feature (1)..(223): Pfam Name: Protein kinase domain Pfam Description: Protein kinase domain
  misc_feature (1)..(233): Homolog of NCBI NO: 15222909 NR Description: hypothetical protein; protein id: At1g50230.1
  misc_feature (1)..(495): Homolog of NCBI NO: 8745041 NR Description: probable MAP kinase kinase [Leishmania major]
  misc_feature (992)..(1277): Homolog of NCBI NO: 8745041 NR Description: probable MAP kinase kinase [Leishmania major]
  misc_feature (1)..(314): Homolog of NCBI NO: 10046851 NR Description: putative mitogen-activated protein kinase kinase
  misc_feature (992)..(1277): Homolog of NCBI NO: 10046851 NR Description: putative mitogen-activated protein kinase kinase
  misc_feature (1)..(223): Homolog of NCBI NO: 28269679 NR Description: serine/threonine kinase 36 [Mus musculus] Similar to serine/threonine kinase 36 (fused homolog, Drosophila)
  misc_feature (1)..(223): Homolog of NCBI NO: 35192968 NR Description: Unknown (protein for MGC:65628) [Mus musculus]
  misc_feature (1)..(223): Homolog of NCBI NO: 34876833 NR Description: similar to FUSED serine/threonine kinase [Rattus
  misc_feature (1)..(223): Homolog of NCBI NO: 6331315 NR Description: KIAA1278 protein [Homo sapiens]
  misc_feature (1)..(223): Homolog of NCBI NO: 9664225 NR Description: FUSED serine/threonine kinase [Homo sapiens]
MKFIMKQGKTDKDIHSLRQEIEILRKLKHENIIEMLDSFENAREFCVVTEFAQGELFEILEDDKCLPEEQVQAIAKQLVKALDYLHSNRIIHRDMKPQNILIGAGSVVKLCDFGFARAMSTNTVVLRSIKGTPLYMAPELVKEQPYDRTVDLWSLGVILYELYVGQPPFYTNSVYALIRHIVKDPVKYPDEMSTYFESFLKGLLNKEPHSRLTWPALREHPFVKETQEEVEAREIHTAVVDNKAAWMLKGNGGQQRNVLNVTEKCDSVTLVEDMSATKGLADVQSDMKSAVKVNSPPTEDFVGFPTQEEIKSSGNPTLDKLENTSRTVKGAQVIGENDKALDLVLLSLERFSKSPDSKRDKDVACSVQSLRIISNLVATRAIVSVGLIEKITCALLDFTDALVGMKSPEFNNIIPKSLSVTKNLVGHVEGNNIHSSYIRHWTKVVEIFIQVVRWEEEGTGRIIYEACSCITTMLSRVAQDLKSSTPDSVSKQILEHANMSRIVDHLCLCLASSGSSLTSGSSQMLAAACEACRAIWILIDTSETFFKNDDVNILPLDALQNRLSQHDIGNSEWGPLSEKLVDTVTRAYLRSKHVQVAVGHCLHQRVEAPLVSAIQLLSRCCLHNGILPSMLCGLPSSLPITTVVSGGEDGTVISEIFSILSYATLSSKDQQTGEKDNFEGRLNNLVFHSCLMLATVAQCLKLTGRNSVLLMLTTSPKKHQHRLSAIANHIASDDKIEASLQNHSASAMLALASILALEKGSSAGSSVSELVVSLIPRATKLCYHLRPMPSNEGEVISHSANYAKWHGLLDGCIGLLESRLKWGGPLAVQQLIASGTPLLLINLLAGKLSNASPEDIKKTSNRIGLSPIGVVWTISSICHCLSGGTTFRQVLVKIETMKLITCLLSDAHIKLVKSWGGPGGGKDGVRETINVIIDLLAFPFVALQSQPGSLSATASVNSGFILNIGSPGVRVCMEDRDLLKAIEEDMDKYIIVLLEVGVPSLILRCLDHLELKDLVRPVAFLAKMVGRPRLAVDLVSKGLLDPNRMKKLLNQSSPREVILDILMIISDLSRMDKAFYKYIGEASVLQPLKEYLTHVDPNIRAKACSALGNMCRHNGYFYSALAEHQIIGLLIDRCADPDKRTQKFACFAIGNAAYHNDTLYEELRRSITQLANVLTTAEEDKTKANAAGALSNLVRNSNKLCEDIVSKGALQTLLRLVADCSTLALNPSKKETASESPLKIALFSLAKMCSNHQICRQFVKSSELFPVIARLKQSPEANIAHYASVIVAKVSGES

SEQ ID NO: 70199 - protein, 1290 aa, Arabidopsis thaliana
  peptide (1)..(1290): Ceres Seq. ID no. 2174610
  misc_feature (1)..(219): Pfam Name: Protein kinase domain Pfam Description: Protein kinase domain
  misc_feature (1)..(229): Homolog of NCBI NO: 15222909 NR Description: hypothetical protein; protein id: At1g50230.1
  misc_feature (1)..(491): Homolog of NCBI NO: 8745041 NR Description: probable MAP kinase kinase [Leishmania major]
  misc_feature (988)..(1273): Homolog of NCBI NO: 8745041 NR Description: probable MAP kinase kinase [Leishmania major]
  misc_feature (1)..(310): Homolog of NCBI NO: 10046851 NR Description: putative mitogen-activated protein kinase kinase
  misc_feature (988)..(1273): Homolog of NCBI NO: 10046851 NR Description: putative mitogen-activated protein kinase kinase
  misc_feature (1)..(219): Homolog of NCBI NO: 28269679 NR Description: serine/threonine kinase 36 [Mus musculus] Similar to serine/threonine kinase 36 (fused homolog, Drosophila)
  misc_feature (1)..(219): Homolog of NCBI NO: 35192968 NR Description: Unknown (protein for MGC:65628) [Mus musculus]
  misc_feature (1)..(219): Homolog of NCBI NO: 34876833 NR Description: similar to FUSED serine/threonine kinase [Rattus
  misc_feature (1)..(219): Homolog of NCBI NO: 6331315 NR Description: KIAA1278 protein [Homo sapiens]
  misc_feature (1)..(219): Homolog of NCBI NO: 9664225 NR Description: FUSED serine/threonine kinase [Homo sapiens]
MKQGKTDKDIHSLRQEIEILRKLKHENIIEMLDSFENAREFCVVTEFAQGELFEILEDDKCLPEEQVQAIAKQLVKALDYLHSNRIIHRDMKPQNILIGAGSVVKLCDFGFARAMSTNTVVLRSIKGTPLYMAPELVKEQPYDRTVDLWSLGVILYELYVGQPPFYTNSVYALIRHIVKDPVKYPDEMSTYFESFLKGLLNKEPHSRLTWPALREHPFVKETQEEVEAREIHTAVVDNKAAWMLKGNGGQQRNVLNVTEKCDSVTLVEDMSATKGLADVQSDMKSAVKVNSPPTEDFVGFPTQEEIKSSGNPTLDKLENTSRTVKGAQVIGENDKALDLVLLSLERFSKSPDSKRDKDVACSVQSLRIISNLVATRAIVSVGLIEKITCALLDFTDALVGMKSPEFNNIIPKSLSVTKNLVGHVEGNNIHSSYIRHWTKVVEIFIQVVRWEEEGTGRIIYEACSCITTMLSRVAQDLKSSTPDSVSKQILEHANMSRIVDHLCLCLASSGSSLTSGSSQMLAAACEACRAIWILIDTSETFFKNDDVNILPLDALQNRLSQHDIGNSEWGPLSEKLVDTVTRAYLRSKHVQVAVGHCLHQRVEAPLVSAIQLLSRCCLHNGILPSMLCGLPSSLPITTVVSGGEDGTVISEIFSILSYATLSSKDQQTGEKDNFEGRLNNLVFHSCLMLATVAQCLKLTGRNSVLLMLTTSPKKHQHRLSAIANHIASDDKIEASLQNHSASAMLALASILALEKGSSAGSSVSELVVSLIPRATKLCYHLRPMPSNEGEVISHSANYAKWHGLLDGCIGLLESRLKWGGPLAVQQLIASGTPLLLINLLAGKLSNASPEDIKKTSNRIGLSPIGVVWTISSICHCLSGGTTFRQVLVKIETMKLITCLLSDAHIKLVKSWGGPGGGKDGVRETINVIIDLLAFPFVALQSQPGSLSATASVNSGFILNIGSPGVRVCMEDRDLLKAIEEDMDKYIIVLLEVGVPSLILRCLDHLELKDLVRPVAFLAKMVGRPRLAVDLVSKGLLDPNRMKKLLNQSSPREVILDILMIISDLSRMDKAFYKYIGEASVLQPLKEYLTHVDPNIRAKACSALGNMCRHNGYFYSALAEHQIIGLLIDRCADPDKRTQKFACFAIGNAAYHNDTLYEELRRSITQLANVLTTAEEDKTKANAAGALSNLVRNSNKLCEDIVSKGALQTLLRLVADCSTLALNPSKKETASESPLKIALFSLAKMCSNHQICRQFVKSSELFPVIARLKQSPEANIAHYASVIVAKVSGES

SEQ ID NO: 70200 - DNA, 402 bp, Arabidopsis thaliana
  misc_feature (1)..(402): Ceres Seq. ID no. 2176633
  misc_feature: MA Experiment ID: 20000347 Result: Up-regulated in Transcription
  misc_feature: MA Experiment 20000347 PARAMETER Experiment Name: At_2mM_SA_Sub_P Parameter: Age (day) Value: 14
  misc_feature: MA Experiment 20000347 PARAMETER Experiment Name: At_2mM_SA_Sub_P Parameter: Organism Value: A. thaliana
  misc_feature: MA Experiment 20000347 PARAMETER Experiment Name: At_2mM_SA_Sub_P Parameter: Plant Line Value: WS
  misc_feature: MA Experiment 20000347 PARAMETER Experiment Name: At_2mM_SA_Sub_P Parameter: Timepoint (hr) Value: 6
  misc_feature: MA Experiment 20000347 PARAMETER Experiment Name: At_2mM_SA_Sub_P Parameter: Tissue Value: Aerial
  misc_feature: MA Experiment 20000347 PARAMETER Experiment Name: At_2mM_SA_Sub_P Parameter: Treatment Value: 2mM SA vs. No Treatment
  misc_feature: MA Experiment ID: 20000348 Result: Up-regulated in Transcription
  misc_feature: MA Experiment 20000348 PARAMETER Experiment Name: At_100uM_ABA_Sub_P Parameter: Age (day) Value: 14
  misc_feature: MA Experiment 20000348 PARAMETER Experiment Name: At_100uM_ABA_Sub_P Parameter: Organism Value: A. thaliana
  misc_feature: MA Experiment 20000348 PARAMETER Experiment Name: At_100uM_ABA_Sub_P Parameter: Plant Line Value: WS
  misc_feature: MA Experiment 20000348 PARAMETER Experiment Name: At_100uM_ABA_Sub_P Parameter: Timepoint (hr) Value: 1
  misc_feature: MA Experiment 20000348 PARAMETER Experiment Name: At_100uM_ABA_Sub_P Parameter: Tissue Value: Aerial
  misc_feature: MA Experiment 20000348 PARAMETER Experiment Name: At_100uM_ABA_Sub_P Parameter: Treatment Value: 100uM ABA vs. No Treatment
  misc_feature: MA Experiment ID: 20000349 Result: Up-regulated in Transcription
  misc_feature: MA Experiment 20000349 PARAMETER Experiment Name: At_100uM_ABA_Sub_P Parameter: Age (day) Value: 14
  misc_feature: MA Experiment 20000349 PARAMETER Experiment Name: At_100uM_ABA_Sub_P Parameter: Organism Value: A. thaliana
  misc_feature: MA Experiment 20000349 PARAMETER Experiment Name: At_100uM_ABA_Sub_P Parameter: Plant Line Value: WS
  misc_feature: MA Experiment 20000349 PARAMETER Experiment Name: At_100uM_ABA_Sub_P Parameter: Timepoint (hr) Value: 6
  misc_feature: MA Experiment 20000349 PARAMETER Experiment Name: At_100uM_ABA_Sub_P Parameter: Tissue Value: Aerial
  misc_feature: MA Experiment 20000349 PARAMETER Experiment Name: At_100uM_ABA_Sub_P Parameter: Treatment Value: 100uM ABA vs. No Treatment
  misc_feature: MA Experiment ID: 20000352 Result: Up-regulated in Transcription
  misc_feature: MA Experiment 20000352 PARAMETER Experiment Name: At_Drought_Sub_P Parameter: Age (day) Value: 7
  misc_feature: MA Experiment 20000352 PARAMETER Experiment Name: At_Drought_Sub_P Parameter: Organism Value: A. thaliana
  misc_feature: MA Experiment 20000352 PARAMETER Experiment Name: At_Drought_Sub_P Parameter: Plant Line Value: WS
  misc_feature: MA Experiment 20000352 PARAMETER Experiment Name: At_Drought_Sub_P Parameter: Timepoint (hr) Value: 6
  misc_feature: MA Experiment 20000352 PARAMETER Experiment Name: At_Drought_Sub_P Parameter: Tissue Value: Whole Plant
  misc_feature: MA Experiment 20000352 PARAMETER Experiment Name: At_Drought_Sub_P Parameter: Treatment Value: Drought vs. No Drought
  misc_feature: MA Experiment ID: 20000634 Result: Up-regulated in Transcription
  misc_feature: MA Experiment 20000634 PARAMETER Experiment Name: At_10percent_PEG_Sub_P Parameter: Age (day) Value: 12
  misc_feature: MA Experiment 20000634 PARAMETER Experiment Name: At_10percent_PEG_Sub_P Parameter: Organism Value: A. thaliana
  misc_feature: MA Experiment 20000634 PARAMETER Experiment Name: At_10percent_PEG_Sub_P Parameter: Plant Line Value: WS
  misc_feature: MA Experiment 20000634 PARAMETER Experiment Name: At_10percent_PEG_Sub_P Parameter: Timepoint (day) Value: 12
  misc_feature: MA Experiment 20000634 PARAMETER Experiment Name: At_10percent_PEG_Sub_P Parameter: Tissue Value: Whole Plant
  misc_feature: MA Experiment 20000634 PARAMETER Experiment Name: At_10percent_PEG_Sub_P Parameter: Treatment Value: 10% PEG vs. No Treatment
atgggtatttctcattacccgacagcgtctgaaggagtgatgccaatgctagtaatgaacacagttgtttcagtgtctctagtaaagaacatggtaagatctgttgtcaacatggtgagctctgagaccaatgaggcaaggaacaaagaggacgaccaagatcatgaggattcaaaaagaagaagaagaatctcaatcacacactttgaatctctgtgtgagaacagaggaagcaggaacgagagagaagctatggactgttgtgtgtgtctttgtgggtttaaagaggaggaagaggtgagtgagttagtgtcctgcaagcattactttcactcagcttgtttggataaatggtttggtaataaccacacaacttgtcctctctgcagatccatcctttag

SEQ ID NO: 70201 - protein, 133 aa, Arabidopsis thaliana
  peptide (1)..(133): Ceres Seq. ID no. 2176634
  misc_feature (87)..(129): Pfam Name: Zinc finger, C3HC4 type (RING finger) Pfam Description: Zinc finger, C3HC4 type (RING finger)
  misc_feature (1)..(133): Homolog of NCBI NO: 25403249 NR Description: protein F21J9.24 [imported] - Arabidopsis >gi|9743343|gb|AAF97967.1|AC000103_17 F21J9.24 [Arabidopsis
  misc_feature (1)..(133): Homolog of NCBI NO: 20340241 NR Description: putative RING zinc finger protein-like protein
  misc_feature (1)..(133): Homolog of NCBI NO: 15228108 NR Description: putative RING zinc finger protein; protein id: supported by cDNA: gi_11908039, supported by cDNA: gi_13265496 thaliana] >gi|25411066|pir||E84455 probable RING zinc finger
  misc_feature (86)..(131): Homolog of NCBI NO: 21554155 NR Description: RING zinc finger protein-like [Arabidopsis
  misc_feature (80)..(131): Homolog of NCBI NO: 15222553 NR Description: putative RING zinc finger protein; protein id: supported by cDNA: gi_16648709 [Arabidopsis thaliana]
  misc_feature (86)..(131): Homolog of NCBI NO: 15238072 NR Description: RING zinc finger protein-like; protein id: supported by cDNA: 207148. [Arabidopsis thaliana]
  misc_feature (82)..(133): Homolog of NCBI NO: 21537244 NR Description: unknown [Arabidopsis thaliana]
  misc_feature (84)..(131): Homolog of NCBI NO: 18414561 NR Description: Expressed protein; protein id: At4g15975.1,
  misc_feature (61)..(131): Homolog of NCBI NO: 15233117 NR Description: RING finger protein; protein id: At3g61460.1, by cDNA: 25801., supported by cDNA: gi_17644156, supported by
  misc_feature (83)..(131): Homolog of NCBI NO: 18418241 NR Description: similar to RING-H2 zinc finger protein ATL3, protein id: At4g33565.1, supported by cDNA: gi_19698826
MGISHYPTASEGVMPMLVMNTVVSVSLVKNMVRSVVNMVSSETNEARNKEDDQDHEDSKRRRRISITHFESLCENRGSRNEREAMDCCVCLCGFKEEEEVSELVSCKHYFHSACLDKWFGNNHTTCPLCRSIL

SEQ ID NO: 70202 - protein, 120 aa, Arabidopsis thaliana
  peptide (1)..(120): Ceres Seq. ID no. 2176635
  misc_feature (74)..(116): Pfam Name: Zinc finger, C3HC4 type (RING finger) Pfam Description: Zinc finger, C3HC4 type (RING finger)
  misc_feature (1)..(120): Homolog of NCBI NO: 25403249 NR Description: protein F21J9.24 [imported] - Arabidopsis >gi|9743343|gb|AAF97967.1|AC000103_17 F21J9.24 [Arabidopsis
  misc_feature (1)..(120): Homolog of NCBI NO: 20340241 NR Description: putative RING zinc finger protein-like protein
  misc_feature (1)..(120): Homolog of NCBI NO: 15228108 NR Description: putative RING zinc finger protein; protein id: supported by cDNA: gi_11908039, supported by cDNA: gi_13265496 thaliana] >gi|25411066|pir||E84455 probable RING zinc finger
  misc_feature (73)..(118): Homolog of NCBI NO: 21554155 NR Description: RING zinc finger protein-like [Arabidopsis
  misc_feature (67)..(118): Homolog of NCBI NO: 15222553 NR Description: putative RING zinc finger protein; protein id: supported by cDNA: gi_16648709 [Arabidopsis thaliana]
  misc_feature (73)..(118): Homolog of NCBI NO: 15238072 NR Description: RING zinc finger protein-like; protein id: supported by cDNA: 207148. [Arabidopsis thaliana]
  misc_feature (69)..(120): Homolog of NCBI NO: 21537244 NR Description: unknown [Arabidopsis thaliana]
  misc_feature (71)..(118): Homolog of NCBI NO: 18414561 NR Description: Expressed protein; protein id: At4g15975.1,
  misc_feature (48)..(118): Homolog of NCBI NO: 15233117 NR Description: RING finger protein; protein id: At3g61460.1, by cDNA: 25801., supported by cDNA: gi_17644156, supported by
  misc_feature (70)..(118): Homolog of NCBI NO: 18418241 NR Description: similar to RING-H2 zinc finger protein ATL3, protein id: At4g33565.1, supported by cDNA: gi_19698826
MPMLVMNTVVSVSLVKNMVRSVVNMVSSETNEARNKEDDQDHEDSKRRRRISITHFESLCENRGSRNEREAMDCCVCLCGFKEEEEVSELVSCKHYFHSACLDKWFGNNHTTCPLCRSIL

SEQ ID NO: 70203 - protein, 118 aa, Arabidopsis thaliana
  peptide (1)..(118): Ceres Seq. ID no. 2176636
  misc_feature (72)..(114): Pfam Name: Zinc finger, C3HC4 type (RING finger) Pfam Description: Zinc finger, C3HC4 type (RING finger)
  misc_feature (1)..(118): Homolog of NCBI NO: 15228108 NR Description: putative RING zinc finger protein; protein id: supported by cDNA: gi_11908039, supported by cDNA: gi_13265496 thaliana] >gi|25411066|pir||E84455 probable RING zinc finger
  misc_feature (71)..(116): Homolog of NCBI NO: 21554155 NR Description: RING zinc finger protein-like [Arabidopsis
  misc_feature (65)..(116): Homolog of NCBI NO: 15222553 NR Description: putative RING zinc finger protein; protein id: supported by cDNA: gi_16648709 [Arabidopsis thaliana]
  misc_feature (71)..(116): Homolog of NCBI NO: 15238072 NR Description: RING zinc finger protein-like; protein id: supported by cDNA: 207148. [Arabidopsis thaliana]
  misc_feature (1)..(118): Homolog of NCBI NO: 25403249 NR Description: protein F21J9.24 [imported] - Arabidopsis >gi|9743343|gb|AAF97967.1|AC000103_17 F21J9.24 [Arabidopsis
  misc_feature (1)..(118): Homolog of NCBI NO: 20340241 NR Description: putative RING zinc finger protein-like protein
  misc_feature (67)..(118): Homolog of NCBI NO: 21537244 NR Description: unknown [Arabidopsis thaliana]
  misc_feature (69)..(116): Homolog of NCBI NO: 18414561 NR Description: Expressed protein; protein id: At4g15975.1,
  misc_feature (46)..(116): Homolog of NCBI NO: 15233117 NR Description: RING finger protein; protein id: At3g61460.1, by cDNA: 25801., supported by cDNA: gi_17644156, supported by
  misc_feature (68)..(116): Homolog of NCBI NO: 18418241 NR Description: similar to RING-H2 zinc finger protein ATL3, protein id: At4g33565.1, supported by cDNA: gi_19698826
MLVMNTVVSVSLVKNMVRSVVNMVSSETNEARNKEDDQDHEDSKRRRRISITHFESLCENRGSRNEREAMDCCVCLCGFKEEEEVSELVSCKHYFHSACLDKWFGNNHTTCPLCRSIL

SEQ ID NO: 70204 - DNA, 2514 bp, Arabidopsis thaliana
  misc_feature (1)..(2514): Ceres Seq. ID no. 2178541
  misc_feature: MA Experiment ID: 20000307 Result: Up-regulated in Transcription
  misc_feature: MA Experiment 20000307 PARAMETER Experiment Name: At_Germinating_Seeds_Sub_P Parameter: Age (hr) Value: 24 vs. 0
  misc_feature: MA Experiment 20000307 PARAMETER Experiment Name: At_Germinating_Seeds_Sub_P Parameter: Organism Value: A. thaliana
  misc_feature: MA Experiment 20000307 PARAMETER Experiment Name: At_Germinating_Seeds_Sub_P Parameter: Plant Line Value: WS
  misc_feature: MA Experiment 20000307 PARAMETER Experiment Name: At_Germinating_Seeds_Sub_P Parameter: Tissue Value: Germinating Seeds
  misc_feature: MA Experiment ID: 20000314 Result: Up-regulated in Transcription
  misc_feature: MA Experiment 20000314 PARAMETER Experiment Name: At_14day_Shoots-Roots_Sub_P Parameter: Age (day) Value: 14
  misc_feature: MA Experiment 20000314 PARAMETER Experiment Name: At_14day_Shoots-Roots_Sub_P Parameter: Organism Value: A. thaliana
  misc_feature: MA Experiment 20000314 PARAMETER Experiment Name: At_14day_Shoots-Roots_Sub_P Parameter: Plant Line Value: WS
  misc_feature: MA Experiment 20000314 PARAMETER Experiment Name: At_14day_Shoots-Roots_Sub_P Parameter: Tissue Value: Roots vs. Whole Plant
  misc_feature: MA Experiment ID: 20000328 Result: Up-regulated in Transcription
  misc_feature: MA Experiment 20000328 PARAMETER Experiment Name: At_42deg_Heat_Sub_P Parameter: Age (day) Value: 14
  misc_feature: MA Experiment 20000328 PARAMETER Experiment Name: At_42deg_Heat_Sub_P Parameter: Organism Value: A. thaliana
  misc_feature: MA Experiment 20000328 PARAMETER Experiment Name: At_42deg_Heat_Sub_P Parameter: Plant Line Value: WS
  misc_feature: MA Experiment 20000328 PARAMETER Experiment Name: At_42deg_Heat_Sub_P Parameter: Temperature (deg C) Value: 42 vs. 22
  misc_feature: MA Experiment 20000328 PARAMETER Experiment Name: At_42deg_Heat_Sub_P Parameter: Timepoint (hr) Value: 6
  misc_feature: MA Experiment 20000328 PARAMETER Experiment Name: At_42deg_Heat_Sub_P Parameter: Tissue Value: Aerial
  misc_feature: MA Experiment ID: 20000329 Result: Up-regulated in Transcription
  misc_feature: MA Experiment 20000329 PARAMETER Experiment Name: At_4deg_Cold_Sub_P Parameter: Age (day) Value: 14
  misc_feature: MA Experiment 20000329 PARAMETER Experiment Name: At_4deg_Cold_Sub_P Parameter: Organism Value: A. thaliana
  misc_feature: MA Experiment 20000329 PARAMETER Experiment Name: At_4deg_Cold_Sub_P Parameter: Plant Line Value: WS
  misc_feature: MA Experiment 20000329 PARAMETER Experiment Name: At_4deg_Cold_Sub_P Parameter: Temperature (deg C) Value: 4 vs. 22
  misc_feature: MA Experiment 20000329 PARAMETER Experiment Name: At_4deg_Cold_Sub_P Parameter: Timepoint (hr) Value: 6
  misc_feature: MA Experiment 20000329 PARAMETER Experiment Name: At_4deg_Cold_Sub_P Parameter: Tissue Value: Aerial
  misc_feature: MA Experiment ID: 20000355 Result: Up-regulated in Transcription
  misc_feature: MA Experiment 20000355 PARAMETER Experiment Name: At_Siliques_Sub_P Parameter: Age (day) Value: 21
  misc_feature: MA Experiment 20000355 PARAMETER Experiment Name: At_Siliques_Sub_P Parameter: Organism Value: A. thaliana
  misc_feature: MA Experiment 20000355 PARAMETER Experiment Name: At_Siliques_Sub_P Parameter: Plant Line Value: WS
  misc_feature: MA Experiment 20000355 PARAMETER Experiment Name: At_Siliques_Sub_P Parameter: Tissue Value: Less Than 5mm Siliques vs. Whole Plant
  misc_feature: MA Experiment ID: 20000440 Result: Up-regulated in Transcription
  misc_feature: MA Experiment 20000440 PARAMETER Experiment Name: At_Closed-Flower__Sub_P Parameter: Tissue Value: Closed Flower vs. Whole Plant
atggaaggttcttcaaattctaactctaggggattcaatacctctggtgtttcagataggaacactgagttcttacctgttgagagactcactactcgttccaagccttcctctcatgttgatgagtatgtcagaagcttgtttggtagtactagcacacacaagtctggtgaagatgattctttagggattgatccttttgttagatccttggaatggggtgatgttagtttgagacagtggctggataaacctgaacgatctgttgatgttttcgagtgcttgcacgttttcagacaaattgttgagattgtgaatgcggctcactctcaaggcattgttgttcataatgtcaggccatcatgttttgtcatgtcttcgtttaaccatgtttcgttcattgaatctgcttcttgttcggactctggctctgattccttggaggatggtccaattagccagaaggaaatcggtagctcgagaagagaggaagctgtatcgaaagctattgcaatagaagagaaaggagtctacaataagttgttggagagaaaaatcgagaaactagaggaagaaaaaacccaaccttttccgatgaaacatatattagcaatggagacaagttggtacacaagccctgaagaggattttggttcttcaagtacttgtgcttcagatgtttaccgccttggcgttcttcttttcgagctattttgccctgtaccttcaagagaagagaagtctagaactatgtctagtcttagacatcgcgttcttccgcctcagatattgctcaaatgtccaaaagaagcttctttctgcttgtggttactgcatcctgagccaacttgtcgaccatcaatgagtgacttgctgcaaagcgagtttataactgaacctagagataatttggaagaacgtgaagcagcaatcgagcttcgggacagaatcgaggaacaggagtcgttactcgagttcttgttactgattcaacagaggaagcaagaatctgcgtatagattgcaggatactgtttcacttctttcttctgacattgagcaagttgtaaagagacagttaattttgaagaaaaggggaagctcactctctgatttcagtaaagatgatcatcaatatacctctggtcagccattgatgagtttccaggcaaacgaggagccatcagcattcttggcctcaagaaaacgggttagacaagggattctggcattggaaaacggtgttgaagttgatgaagagagtcaaggaagcacacttcttgaaagctcccggttgatgagaaacttcaagaaactagaatcggtctactttctgacaaggcgcaggcaaatgaaggctgctgcttcagggaaatcattaactagacattcgccgttaagtagtgaaaatggaagaggttctatgattgtctcagagaaaagttcagtaagcaacccggtggcacccaaagctttcttcaataatgactcgagacaaggggggtggatagatcctttccttgagggtttgtgcagatatttatcattcagtcagctaagagtgaaagctgatttgaaacaaggagatttgttgaactcttctaacctcgtttgcgctcttgcgtttgaccgagaaggagaattattcgccactgcgggagtcaacaagaaaatcaagatattcgaatgtaactccatagtaaacgataaccgggatattcactatccggtggtggaattggctggtcggtcaaagctaagtagtttatgttggaacagctacataaagagccaaattgcatcaagtaactttgatggtgttgttcagatatgggatgttgcaagaagccagttggttacagagatgaaggagcacaagaagcgagtatggtccatcgatatttcatcagcagacccgactttgctggctagcggaagcgatgatggaaccggagttagcattgggaccatcaagacaaaggccaatgtatgctgtgtccagtttccatcagactccggacggtctctagcatttggttctgcagatcataaagtgtattactacgatcttcgaaaccccaagattcctctgtgcacaatgattggtcatagcaagacagtgagttatgtcaagtttgtagattcatccactcttgtgtcctcttctactgataacacactgaagctttgggacttgtcgatgtctgcttctgggattaatgaatcccctcttcactcattcactggacacactaatttaaagaactttgttggcttatcggtctctgatgggtatatagcaacaggctcagagactaacgaggttttcgtgtaccacaaggcattcccaatgccagtgatgtcgtacatgttcaacaacactgactctatgtctggtctcgaagtggacgatgcatcacagttcatatcttcaatctgctggcgaggacagtcgtctacgttagtcgctgctaactccaatggcaacataaaaattctggagatgatgacttga

SEQ ID NO: 70205 - protein, 837 aa, Arabidopsis thaliana
  peptide (1)..(837): Ceres Seq. ID no. 2178542
  misc_feature (207)..(297): Pfam Name: Protein kinase domain Pfam Description: Protein kinase domain
  misc_feature (159)..(836): Homolog of NCBI NO: 15219179 NR Description: phytochrome A supressor spa1, putative; protein At1g53090.1 [Arabidopsis thaliana] >gi|14532798|gb|AAK64180.1| phytochrome A supressor spa1 protein [Arabidopsis thaliana]
  misc_feature (1)..(177): Homolog of NCBI NO: 15219179 NR Description: phytochrome A supressor spa1, putative; protein At1g53090.1 [Arabidopsis thaliana] >gi|14532798|gb|AAK64180.1| phytochrome A supressor spa1 protein [Arabidopsis thaliana]
  misc_feature (74)..(835): Homolog of NCBI NO: 34910754 NR Description: P0042A10.6 [Oryza sativa (japonica
  misc_feature (291)..(732): Homolog of NCBI NO: 25405620 NR Description: hypothetical protein F8L10.5 [imported] - thaliana >gi|9454536|gb|AAF87859.1|AC022520_3 Unknown protein
  misc_feature (1)..(177): Homolog of NCBI NO: 25405620 NR Description: hypothetical protein F8L10.5 [imported] - thaliana >gi|9454536|gb|AAF87859.1|AC022520_3 Unknown protein
  misc_feature (410)..(836): Homolog of NCBI NO: 30690337 NR Description: photomorphogenesis repressor protein -related thaliana] >gi|4809171|gb|AAD30124.1|AF135455_1 phytochrome A
  misc_feature (205)..(358): Homolog of NCBI NO: 30690337 NR Description: photomorphogenesis repressor protein -related thaliana] >gi|4809171|gb|AAD30124.1|AF135455_1 phytochrome A
  misc_feature (76)..(149): Homolog of NCBI NO: 30690337 NR Description: photomorphogenesis repressor protein -related thaliana] >gi|4809171|gb|AAD30124.1|AF135455_1 phytochrome A
  misc_feature (258)..(487): Homolog of NCBI NO: 25405620 NR Description: hypothetical protein F8L10.5 [imported] - thaliana >gi|9454536|gb|AAF87859.1|AC022520_3 Unknown protein
  misc_feature (701)..(775): Homolog of NCBI NO: 25405620 NR Description: hypothetical protein F8L10.5 [imported] - thaliana >gi|9454536|gb|AAF87859.1|AC022520_3 Unknown protein
MEGSSNSNSRGFNTSGVSDRNTEFLPVERLTTRSKPSSHVDEYVRSLFGSTSTHKSGEDDSLGIDPFVRSLEWGDVSLRQWLDKPERSVDVFECLHVFRQIVEIVNAAHSQGIVVHNVRPSCFVMSSFNHVSFIESASCSDSGSDSLEDGPISQKEIGSSRREEAVSKAIAIEEKGVYNKLLERKIEKLEEEKTQPFPMKHILAMETSWYTSPEEDFGSSSTCASDVYRLGVLLFELFCPVPSREEKSRTMSSLRHRVLPPQILLKCPKEASFCLWLLHPEPTCRPSMSDLLQSEFITEPRDNLEEREAAIELRDRIEEQESLLEFLLLIQQRKQESAYRLQDTVSLLSSDIEQVVKRQLILKKRGSSLSDFSKDDHQYTSGQPLMSFQANEEPSAFLASRKRVRQGILALENGVEVDEESQGSTLLESSRLMRNFKKLESVYFLTRRRQMKAAASGKSLTRHSPLSSENGRGSMIVSEKSSVSNPVAPKAFFNNDSRQGGWIDPFLEGLCRYLSFSQLRVKADLKQGDLLNSSNLVCALAFDREGELFATAGVNKKIKIFECNSIVNDNRDIHYPVVELAGRSKLSSLCWNSYIKSQIASSNFDGVVQIWDVARSQLVTEMKEHKKRVWSIDISSADPTLLASGSDDGTGVSIGTIKTKANVCCVQFPSDSGRSLAFGSADHKVYYYDLRNPKIPLCTMIGHSKTVSYVKFVDSSTLVSSSTDNTLKLWDLSMSASGINESPLHSFTGHTNLKNFVGLSVSDGYIATGSETNEVFVYHKAFPMPVMSYMFNNTDSMSGLEVDDASQFISSICWRGQSSTLVAANSNGNIKILEMMT

SEQ ID NO: 70206 - protein, 713 aa, Arabidopsis thaliana
  peptide (1)..(713): Ceres Seq. ID no. 2178543
  misc_feature (83)..(173): Pfam Name: Protein kinase domain Pfam Description: Protein kinase domain
  misc_feature (35)..(712): Homolog of NCBI NO: 15219179 NR Description: phytochrome A supressor spa1, putative; protein At1g53090.1 [Arabidopsis thaliana] >gi|14532798|gb|AAK64180.1| phytochrome A supressor spa1 protein [Arabidopsis thaliana]
  misc_feature (1)..(53): Homolog of NCBI NO: 15219179 NR Description: phytochrome A supressor spa1, putative; protein At1g53090.1 [Arabidopsis thaliana] >gi|14532798|gb|AAK64180.1| phytochrome A supressor spa1 protein [Arabidopsis thaliana]
  misc_feature (1)..(711): Homolog of NCBI NO: 34910754 NR Description: P0042A10.6 [Oryza sativa (japonica
  misc_feature (167)..(608): Homolog of NCBI NO: 25405620 NR Description: hypothetical protein F8L10.5 [imported] - thaliana >gi|9454536|gb|AAF87859.1|AC022520_3 Unknown protein
  misc_feature (1)..(53): Homolog of NCBI NO: 25405620 NR Description: hypothetical protein F8L10.5 [imported] - thaliana >gi|9454536|gb|AAF87859.1|AC022520_3 Unknown protein
  misc_feature (286)..(712): Homolog of NCBI NO: 30690337 NR Description: photomorphogenesis repressor protein -related thaliana] >gi|4809171|gb|AAD30124.1|AF135455_1 phytochrome A
  misc_feature (81)..(234): Homolog of NCBI NO: 30690337 NR Description: photomorphogenesis repressor protein -related thaliana] >gi|4809171|gb|AAD30124.1|AF135455_1 phytochrome A
  misc_feature (1)..(25): Homolog of NCBI NO: 30690337 NR Description: photomorphogenesis repressor protein -related thaliana] >gi|4809171|gb|AAD30124.1|AF135455_1 phytochrome A
  misc_feature (134)..(363): Homolog of NCBI NO: 25405620 NR Description: hypothetical protein F8L10.5 [imported] - thaliana >gi|9454536|gb|AAF87859.1|AC022520_3 Unknown protein
  misc_feature (577)..(651): Homolog of NCBI NO: 25405620 NR Description: hypothetical protein F8L10.5 [imported] - thaliana >gi|9454536|gb|AAF87859.1|AC022520_3 Unknown protein
MSSFNHVSFIESASCSDSGSDSLEDGPISQKEIGSSRREEAVSKAIAIEEKGVYNKLLERKIEKLEEEKTQPFPMKHILAMETSWYTSPEEDFGSSSTCASDVYRLGVLLFELFCPVPSREEKSRTMSSLRHRVLPPQILLKCPKEASFCLWLLHPEPTCRPSMSDLLQSEFITEPRDNLEEREAAIELRDRIEEQESLLEFLLLIQQRKQESAYRLQDTVSLLSSDIEQVVKRQLILKKRGSSLSDFSKDDHQYTSGQPLMSFQANEEPSAFLASRKRVRQGILALENGVEVDEESQGSTLLESSRLMRNFKKLESVYFLTRRRQMKAAASGKSLTRHSPLSSENGRGSMIVSEKSSVSNPVAPKAFFNNDSRQGGWIDPFLEGLCRYLSFSQLRVKADLKQGDLLNSSNLVCALAFDREGELFATAGVNKKIKIFECNSIVNDNRDIHYPVVELAGRSKLSSLCWNSYIKSQIASSNFDGVVQIWDVARSQLVTEMKEHKKRVWSIDISSADPTLLASGSDDGTGVSIGTIKTKANVCCVQFPSDSGRSLAFGSADHKVYYYDLRNPKIPLCTMIGHSKTVSYVKFVDSSTLVSSSTDNTLKLWDLSMSASGINESPLHSFTGHTNLKNFVGLSVSDGYIATGSETNEVFVYHKAFPMPVMSYMFNNTDSMSGLEVDDASQFISSICWRGQSSTLVAANSNGNIKILEMMT

SEQ ID NO: 70207 - protein, 639 aa, Arabidopsis thaliana
  peptide (1)..(639): Ceres Seq. ID no. 2178544
  misc_feature (9)..(99): Pfam Name: Protein kinase domain Pfam Description: Protein kinase domain
  misc_feature (1)..(638): Homolog of NCBI NO: 15219179 NR Description: phytochrome A supressor spa1, putative; protein At1g53090.1 [Arabidopsis thaliana] >gi|14532798|gb|AAK64180.1| phytochrome A supressor spa1 protein [Arabidopsis thaliana]
  misc_feature (1)..(637): Homolog of NCBI NO: 34910754 NR Description: P0042A10.6 [Oryza sativa (japonica
  misc_feature (93)..(534): Homolog of NCBI NO: 25405620 NR Description: hypothetical protein F8L10.5 [imported] - thaliana >gi|9454536|gb|AAF87859.1|AC022520_3 Unknown protein
  misc_feature (212)..(638): Homolog of NCBI NO: 30690337 NR Description: photomorphogenesis repressor protein -related thaliana] >gi|4809171|gb|AAD30124.1|AF135455_1 phytochrome A
  misc_feature (7)..(160): Homolog of NCBI NO: 30690337 NR Description: photomorphogenesis repressor protein -related thaliana] >gi|4809171|gb|AAD30124.1|AF135455_1 phytochrome A
  misc_feature (60)..(289): Homolog of NCBI NO: 25405620 NR Description: hypothetical protein F8L10.5 [imported] - thaliana >gi|9454536|gb|AAF87859.1|AC022520_3 Unknown protein
  misc_feature (503)..(577): Homolog of NCBI NO: 25405620 NR Description: hypothetical protein F8L10.5 [imported] - thaliana >gi|9454536|gb|AAF87859.1|AC022520_3 Unknown protein
  misc_feature (7)..(638): Homolog of NCBI NO: 30681665 NR Description: WD-40 repeat protein family [Arabidopsis thaliana]
  misc_feature (212)..(638): Homolog of NCBI NO: 25408984 NR Description: probable photomorphogenesis repressor protein - Arabidopsis thaliana >gi|4559377|gb|AAD23037.1| putative
  misc_feature (218)..(450): Homolog of NCBI NO: 7486345 NR Description: hypothetical protein F2P3.13 - Arabidopsis
MKHILAMETSWYTSPEEDFGSSSTCASDVYRLGVLLFELFCPVPSREEKSRTMSSLRHRVLPPQILLKCPKEASFCLWLLHPEPTCRPSMSDLLQSEFITEPRDNLEEREAAIELRDRIEEQESLLEFLLLIQQRKQESAYRLQDTVSLLSSDIEQVVKRQLILKKRGSSLSDFSKDDHQYTSGQPLMSFQANEEPSAFLASRKRVRQGILALENGVEVDEESQGSTLLESSRLMRNFKKLESVYFLTRRRQMKAAASGKSLTRHSPLSSENGRGSMIVSEKSSVSNPVAPKAFFNNDSRQGGWIDPFLEGLCRYLSFSQLRVKADLKQGDLLNSSNLVCALAFDREGELFATAGVNKKIKIFECNSIVNDNRDIHYPVVELAGRSKLSSLCWNSYIKSQIASSNFDGVVQIWDVARSQLVTEMKEHKKRVWSIDISSADPTLLASGSDDGTGVSIGTIKTKANVCCVQFPSDSGRSLAFGSADHKVYYYDLRNPKIPLCTMIGHSKTVSYVKFVDSSTLVSSSTDNTLKLWDLSMSASGINESPLHSFTGHTNLKNFVGLSVSDGYIATGSETNEVFVYHKAFPMPVMSYMFNNTDSMSGLEVDDASQFISSICWRGQSSTLVAANSNGNIKILEMMT

SEQ ID NO: 70208 - DNA, 3057 bp, Arabidopsis thaliana
  misc_feature (1)..(3057): Ceres Seq. ID no. 2178739
  misc_feature: MA Experiment ID: 20000307 Result: Up-regulated in Transcription
  misc_feature: MA Experiment 20000307 PARAMETER Experiment Name: At_Germinating_Seeds_Sub_P Parameter: Age (hr) Value: 24 vs. 0
  misc_feature: MA Experiment 20000307 PARAMETER Experiment Name: At_Germinating_Seeds_Sub_P Parameter: Organism Value: A. thaliana
  misc_feature: MA Experiment 20000307 PARAMETER Experiment Name: At_Germinating_Seeds_Sub_P Parameter: Plant Line Value: WS
  misc_feature: MA Experiment 20000307 PARAMETER Experiment Name: At_Germinating_Seeds_Sub_P Parameter: Tissue Value: Germinating Seeds
  misc_feature: MA Experiment ID: 20000314 Result: Up-regulated in Transcription
  misc_feature: MA Experiment 20000314 PARAMETER Experiment Name: At_14day_Shoots-Roots_Sub_P Parameter: Age (day) Value: 14
  misc_feature: MA Experiment 20000314 PARAMETER Experiment Name: At_14day_Shoots-Roots_Sub_P Parameter: Organism Value: A. thaliana
  misc_feature: MA Experiment 20000314 PARAMETER Experiment Name: At_14day_Shoots-Roots_Sub_P Parameter: Plant Line Value: WS
  misc_feature: MA Experiment 20000314 PARAMETER Experiment Name: At_14day_Shoots-Roots_Sub_P Parameter: Tissue Value: Roots vs. Whole Plant
atggggccttctgcccatctcgtctacgctataggagttatcatcatggcaacaatggttgcggcatatgagccatacacagatagctcacctccaccatactctgtgccacttcccaaagtggaatacaaatctcctccattaccagatgtttacagttctccaccaccaccactagaatactctccagcgcctaaagttgattataaatctccaccaccaccatactattcaccatctcctaaagttgagtacaagtctcctccaccaccatatgtctacaactctccaccaccaccatattactctccatccccaaaggtagactacaagtctcctccaccaccatatgtttacagttcgccaccaccaccaatctattcaccatctcctaaggtagactacaaatctcctccaccaccatatgtttacagttccccaccaccaccatactattcgccatcccctaaggtggagtacaaatctccaccatcaccgtatgtttacaactctccaccaccatcatattattcaccatcccctaaggtagattacaaatctcctccaccaccatatgtttatagttctccaccaccaccatattactctccatcccctaaggttgtatacaagtctcctcctccaccatatgtttacagttctccaccaccaccatactactcaccatcacctaaggtagactacaagtctccaccaccaccatacgtctacagctcaccaccaccaccatactactcaccttctcctaagatagtctacaaatctcccccaccaccgtacgtctacagctccccaccacccccatactactcaccttcccctaaggtagactacaaatctcccccaccaccgtatgtctacagttctccaccaccaccatactactctccatcccctaaggttgtatacaagtctcctcctccaccatatgtttacagttccccaccaccaccatactactcaccaaccccgaaggtagactacaaatctcctcctccaccatatgtttacagttctccaccaccaccatactactcaccatcacctaaggtagactacaagtctccaccaccaccatacgtctacagctcaccaccaccaccatactactcaccttctcctaagatagtctacaaatctcccccaccaccgtacgtctacagctccccaccacccccatactacacaccttcaccaaaggttgtatacaagtctcctcctccaccatatgtttacagttccccaccaccaccatactactcaccatcccctaaggtagactacaaatctcctcctccaccatatgtttacagttctcctccaccaccatactactcgccatctccaaaggttgtatacaaatctcctcctccaccatatgtttacagttctcctccaccaccatactattcaccatcccctaaggtagactacaagtctcctccaccaccatatgtttacagttctccaccaccaccgtactactctccttcaccaaaggttttatacaagtctcccccaccaccgtatgtctacagttctccaccaccaccatactactctccttctcctaaggtagtctacaagtctcccccaccaccgtatgtttacagttctccaccacctccatactactctccttctcctaaggtagtctacaagtctcccccaccaccgtatgtctacagttctccaccaccaccatactactctccttctcctaaggtagtctacaagtctcccccaccaccatacgtttacagttctccaccaccaccatactactccccttctcctaaagtatactacaagtctcctccatcaccataccacgcaccatcccctaaggttctatacaaatctccaccacaccctcatgtatgtgtctgtccaccacctcctccatgttattctccatctccaaaggttgtgtacaagtcctccccaccaccgtacgtttacagttctccaccaccaccatatcactctccttctcctaaggtacactacaagtctcccccaccaccgtatgtctacagttctccaccaccaccatattactctccttcccctaaggtacactacaagtctcccccaccaccgtatgtctatagttctccaccaccaccatactactctccttctcctaaggtagtctacaagtctcccccaccaccgtatgtttacagttctccaccacctccatactattctccttctcctaaggtagtctacaagtctcccccaccaccgtatgtctacagttctccaccaccaccatactactctccttctcctaaggtagtctacaagtctcccccaccaccatacgtttacagttctccaccaccaccatattattctccttctcctaaggtagtctacaagtctcctccaccaccgtatgtctacagttctccaccaccaccatactactctccttctcctaaggtagtctacaagtctcccccaccaccgtacgtctacagctcaccaccaccaccatactactctccttctcctaaagtagtttacaagtctcccccaccaccgtacgtctacagctcaccaccaccaccatactactcaccttcccctaaggtagactacaaatctcccccaccaccgtacgtctacagctcaccaccaccaccatactactcaccttcccctaaagtagactacaaatctcctccaccaccgtacgtctatagctcaccaccaccaccatactactcaccttccccgaaggtagactacaaatctcccccaccaccgtatgtctacagctcacccccaccaccatactactcacctgcccctaaggtagattacaaatctccaccaccaccatacgtctatagttcaccaccaccaccatactactcaccttcccctaaggttgactacaaatctcctccaccaccatactactcaccttcccctaaggttgactacaaatctcctccaccaccatatgtctacagttctccaccaccaccatcatactcaccttctccaaaaactgagtactaa

SEQ ID NO: 70209 - protein, 1018 aa, Arabidopsis thaliana
  peptide (1)..(1018): Ceres Seq. ID no. 2178740
  misc_feature (656)..(967): Pfam Name: Formin Homology 2 Domain Pfam Description: Formin Homology 2 Domain
  misc_feature (117)..(719): Homolog of NCBI NO: 15239790 NR Description: putative protein; protein id: At5g49080.1 thaliana] >gi|10176941|dbj|BAB10090.1|
  misc_feature (28)..(602): Homolog of NCBI NO: 15240117 NR Description: putative protein; protein id: At5g06640.1 thaliana] >gi|10178120|dbj|BAB11413.1|
  misc_feature (92)..(694): Homolog of NCBI NO: 15239790 NR Description: putative protein; protein id: At5g49080.1 thaliana] >gi|10176941|dbj|BAB10090.1|
  misc_feature (69)..(638): Homolog of NCBI NO: 15239790 NR Description: putative protein; protein id: At5g49080.1 thaliana] >gi|10176941|dbj|BAB10090.1|
  misc_feature (32)..(602): Homolog of NCBI NO: 15239790 NR Description: putative protein; protein id: At5g49080.1 thaliana] >gi|10176941|dbj|BAB10090.1|
  misc_feature (192)..(769): Homolog of NCBI NO: 15239790 NR Description: putative protein; protein id: At5g49080.1 thaliana] >gi|10176941|dbj|BAB10090.1|
  misc_feature (160)..(744): Homolog of NCBI NO: 15239790 NR Description: putative protein; protein id: At5g49080.1 thaliana] >gi|10176941|dbj|BAB10090.1|
  misc_feature (417)..(1005): Homolog of NCBI NO: 15239790 NR Description: putative protein; protein id: At5g49080.1 thaliana] >gi|10176941|dbj|BAB10090.1|
  misc_feature (392)..(969): Homolog of NCBI NO: 15239790 NR Description: putative protein; protein id: At5g49080.1 thaliana] >gi|10176941|dbj|BAB10090.1|
  misc_feature (367)..(944): Homolog of NCBI NO: 15239790 NR Description: putative protein; protein id: At5g49080.1 thaliana] >gi|10176941|dbj|BAB10090.1|
MGPSAHLVYAIGVIIMATMVAAYEPYTDSSPPPYSVPLPKVEYKSPPLPDVYSSPPPPLEYSPAPKVDYKSPPPPYYSPSPKVEYKSPPPPYVYNSPPPPYYSPSPKVDYKSPPPPYVYSSPPPPIYSPSPKVDYKSPPPPYVYSSPPPPYYSPSPKVEYKSPPSPYVYNSPPPSYYSPSPKVDYKSPPPPYVYSSPPPPYYSPSPKVVYKSPPPPYVYSSPPPPYYSPSPKVDYKSPPPPYVYSSPPPPYYSPSPKIVYKSPPPPYVYSSPPPPYYSPSPKVDYKSPPPPYVYSSPPPPYYSPSPKVVYKSPPPPYVYSSPPPPYYSPTPKVDYKSPPPPYVYSSPPPPYYSPSPKVDYKSPPPPYVYSSPPPPYYSPSPKIVYKSPPPPYVYSSPPPPYYTPSPKVVYKSPPPPYVYSSPPPPYYSPSPKVDYKSPPPPYVYSSPPPPYYSPSPKVVYKSPPPPYVYSSPPPPYYSPSPKVDYKSPPPPYVYSSPPPPYYSPSPKVLYKSPPPPYVYSSPPPPYYSPSPKVVYKSPPPPYVYSSPPPPYYSPSPKVVYKSPPPPYVYSSPPPPYYSPSPKVVYKSPPPPYVYSSPPPPYYSPSPKVYYKSPPSPYHAPSPKVLYKSPPHPHVCVCPPPPPCYSPSPKVVYKSSPPPYVYSSPPPPYHSPSPKVHYKSPPPPYVYSSPPPPYYSPSPKVHYKSPPPPYVYSSPPPPYYSPSPKVVYKSPPPPYVYSSPPPPYYSPSPKVVYKSPPPPYVYSSPPPPYYSPSPKVVYKSPPPPYVYSSPPPPYYSPSPKVVYKSPPPPYVYSSPPPPYYSPSPKVVYKSPPPPYVYSSPPPPYYSPSPKVVYKSPPPPYVYSSPPPPYYSPSPKVDYKSPPPPYVYSSPPPPYYSPSPKVDYKSPPPPYVYSSPPPPYYSPSPKVDYKSPPPPYVYSSPPPPYYSPAPKVDYKSPPPPYVYSSPPPPYYSPSPKVDYKSPPPPYYSPSPKVDYKSPPPPYVYSSPPPPSYSPSPKTEY

SEQ ID NO: 70210 - protein, 1003 aa, Arabidopsis thaliana
  peptide (1)..(1003): Ceres Seq. ID no. 2178741
  misc_feature (641)..(952): Pfam Name: Formin Homology 2 Domain Pfam Description: Formin Homology 2 Domain
  misc_feature (102)..(704): Homolog of NCBI NO: 15239790 NR Description: putative protein; protein id: At5g49080.1 thaliana] >gi|10176941|dbj|BAB10090.1|
  misc_feature (13)..(587): Homolog of NCBI NO: 15240117 NR Description: putative protein; protein id: At5g06640.1 thaliana] >gi|10178120|dbj|BAB11413.1|
  misc_feature (77)..(679): Homolog of NCBI NO: 15239790 NR Description: putative protein; protein id: At5g49080.1 thaliana] >gi|10176941|dbj|BAB10090.1|
  misc_feature (54)..(623): Homolog of NCBI NO: 15239790 NR Description: putative protein; protein id: At5g49080.1 thaliana] >gi|10176941|dbj|BAB10090.1|
  misc_feature (17)..(587): Homolog of NCBI NO: 15239790 NR Description: putative protein; protein id: At5g49080.1 thaliana] >gi|10176941|dbj|BAB10090.1|
  misc_feature (177)..(754): Homolog of NCBI NO: 15239790 NR Description: putative protein; protein id: At5g49080.1 thaliana] >gi|10176941|dbj|BAB10090.1|
  misc_feature (145)..(729): Homolog of NCBI NO: 15239790 NR Description: putative protein; protein id: At5g49080.1 thaliana] >gi|10176941|dbj|BAB10090.1|
  misc_feature (402)..(990): Homolog of NCBI NO: 15239790 NR Description: putative protein; protein id: At5g49080.1 thaliana] >gi|10176941|dbj|BAB10090.1|
  misc_feature (377)..(954): Homolog of NCBI NO: 15239790 NR Description: putative protein; protein id: At5g49080.1 thaliana] >gi|10176941|dbj|BAB10090.1|
  misc_feature (352)..(929): Homolog of NCBI NO: 15239790 NR Description: putative protein; protein id: At5g49080.1 thaliana] >gi|10176941|dbj|BAB10090.1|
MATMVAAYEPYTDSSPPPYSVPLPKVEYKSPPLPDVYSSPPPPLEYSPAPKVDYKSPPPPYYSPSPKVEYKSPPPPYVYNSPPPPYYSPSPKVDYKSPPPPYVYSSPPPPIYSPSPKVDYKSPPPPYVYSSPPPPYYSPSPKVEYKSPPSPYVYNSPPPSYYSPSPKVDYKSPPPPYVYSSPPPPYYSPSPKVVYKSPPPPYVYSSPPPPYYSPSPKVDYKSPPPPYVYSSPPPPYYSPSPKIVYKSPPPPYVYSSPPPPYYSPSPKVDYKSPPPPYVYSSPPPPYYSPSPKVVYKSPPPPYVYSSPPPPYYSPTPKVDYKSPPPPYVYSSPPPPYYSPSPKVDYKSPPPPYVYSSPPPPYYSPSPKIVYKSPPPPYVYSSPPPPYYTPSPKVVYKSPPPPYVYSSPPPPYYSPSPKVDYKSPPPPYVYSSPPPPYYSPSPKVVYKSPPPPYVYSSPPPPYYSPSPKVDYKSPPPPYVYSSPPPPYYSPSPKVLYKSPPPPYVYSSPPPPYYSPSPKVVYKSPPPPYVYSSPPPPYYSPSPKVVYKSPPPPYVYSSPPPPYYSPSPKVVYKSPPPPYVYSSPPPPYYSPSPKVYYKSPPSPYHAPSPKVLYKSPPHPHVCVCPPPPPCYSPSPKVVYKSSPPPYVYSSPPPPYHSPSPKVHYKSPPPPYVYSSPPPPYYSPSPKVHYKSPPPPYVYSSPPPPYYSPSPKVVYKSPPPPYVYSSPPPPYYSPSPKVVYKSPPPPYVYSSPPPPYYSPSPKVVYKSPPPPYVYSSPPPPYYSPSPKVVYKSPPPPYVYSSPPPPYYSPSPKVVYKSPPPPYVYSSPPPPYYSPSPKVVYKSPPPPYVYSSPPPPYYSPSPKVDYKSPPPPYVYSSPPPPYYSPSPKVDYKSPPPPYVYSSPPPPYYSPSPKVDYKSPPPPYVYSSPPPPYYSPAPKVDYKSPPPPYVYSSPPPPYYSPSPKVDYKSPPPPYYSPSPKVDYKSPPPPYVYSSPPPPSYSPSPKTEY

SEQ ID NO: 70211 - protein, 1000 aa, Arabidopsis thaliana
  peptide (1)..(1000): Ceres Seq. ID no. 2178742
  misc_feature (638)..(949): Pfam Name: Formin Homology 2 Domain Pfam Description: Formin Homology 2 Domain
  misc_feature (99)..(701): Homolog of NCBI NO: 15239790 NR Description: putative protein; protein id: At5g49080.1 thaliana] >gi|10176941|dbj|BAB10090.1|
  misc_feature (10)..(584): Homolog of NCBI NO: 15240117 NR Description: putative protein; protein id: At5g06640.1 thaliana] >gi|10178120|dbj|BAB11413.1|
  misc_feature (74)..(676): Homolog of NCBI NO: 15239790 NR Description: putative protein; protein id: At5g49080.1 thaliana] >gi|10176941|dbj|BAB10090.1|
  misc_feature (51)..(620): Homolog of NCBI NO: 15239790 NR Description: putative protein; protein id: At5g49080.1 thaliana] >gi|10176941|dbj|BAB10090.1|
  misc_feature (14)..(584): Homolog of NCBI NO: 15239790 NR Description: putative protein; protein id: At5g49080.1 thaliana] >gi|10176941|dbj|BAB10090.1|
  misc_feature (174)..(751): Homolog of NCBI NO: 15239790 NR Description: putative protein; protein id: At5g49080.1 thaliana] >gi|10176941|dbj|BAB10090.1|
  misc_feature (142)..(726): Homolog of NCBI NO: 15239790 NR Description: putative protein; protein id: At5g49080.1 thaliana] >gi|10176941|dbj|BAB10090.1|
  misc_feature (399)..(987): Homolog of NCBI NO: 15239790 NR Description: putative protein; protein id: At5g49080.1 thaliana] >gi|10176941|dbj|BAB10090.1|
  misc_feature (374)..(951): Homolog of NCBI NO: 15239790 NR Description: putative protein; protein id: At5g49080.1 thaliana] >gi|10176941|dbj|BAB10090.1|
  misc_feature (349)..(926): Homolog of NCBI NO: 15239790 NR Description: putative protein; protein id: At5g49080.1 thaliana] >gi|10176941|dbj|BAB10090.1|
MVAAYEPYTDSSPPPYSVPLPKVEYKSPPLPDVYSSPPPPLEYSPAPKVDYKSPPPPYYSPSPKVEYKSPPPPYVYNSPPPPYYSPSPKVDYKSPPPPYVYSSPPPPIYSPSPKVDYKSPPPPYVYSSPPPPYYSPSPKVEYKSPPSPYVYNSPPPSYYSPSPKVDYKSPPPPYVYSSPPPPYYSPSPKVVYKSPPPPYVYSSPPPPYYSPSPKVDYKSPPPPYVYSSPPPPYYSPSPKIVYKSPPPPYVYSSPPPPYYSPSPKVDYKSPPPPYVYSSPPPPYYSPSPKVVYKSPPPPYVYSSPPPPYYSPTPKVDYKSPPPPYVYSSPPPPYYSPSPKVDYKSPPPPYVYSSPPPPYYSPSPKIVYKSPPPPYVYSSPPPPYYTPSPKVVYKSPPPPYVYSSPPPPYYSPSPKVDYKSPPPPYVYSSPPPPYYSPSPKVVYKSPPPPYVYSSPPPPYYSPSPKVDYKSPPPPYVYSSPPPPYYSPSPKVLYKSPPPPYVYSSPPPPYYSPSPKVVYKSPPPPYVYSSPPPPYYSPSPKVVYKSPPPPYVYSSPPPPYYSPSPKVVYKSPPPPYVYSSPPPPYYSPSPKVYYKSPPSPYHAPSPKVLYKSPPHPHVCVCPPPPPCYSPSPKVVYKSSPPPYVYSSPPPPYHSPSPKVHYKSPPPPYVYSSPPPPYYSPSPKVHYKSPPPPYVYSSPPPPYYSPSPKVVYKSPPPPYVYSSPPPPYYSPSPKVVYKSPPPPYVYSSPPPPYYSPSPKVVYKSPPPPYVYSSPPPPYYSPSPKVVYKSPPPPYVYSSPPPPYYSPSPKVVYKSPPPPYVYSSPPPPYYSPSPKVVYKSPPPPYVYSSPPPPYYSPSPKVDYKSPPPPYVYSSPPPPYYSPSPKVDYKSPPPPYVYSSPPPPYYSPSPKVDYKSPPPPYVYSSPPPPYYSPAPKVDYKSPPPPYVYSSPPPPYYSPSPKVDYKSPPPPYYSPSPKVDYKSPPPPYVYSSPPPPSYSPSPKTEY

SEQ ID NO: 70212 - DNA, 846 bp, Arabidopsis thaliana
  misc_feature (1)..(846): Ceres Seq. ID no. 2178940
  misc_feature: MA Experiment ID: 20000355 Result: Up-regulated in Transcription
  misc_feature: MA Experiment 20000355 PARAMETER Experiment Name: At_Siliques_Sub_P Parameter: Age (day) Value: 21
  misc_feature: MA Experiment 20000355 PARAMETER Experiment Name: At_Siliques_Sub_P Parameter: Organism Value: A. thaliana
  misc_feature: MA Experiment 20000355 PARAMETER Experiment Name: At_Siliques_Sub_P Parameter: Plant Line Value: WS
  misc_feature: MA Experiment 20000355 PARAMETER Experiment Name: At_Siliques_Sub_P Parameter: Tissue Value: Less Than 5mm Siliques vs. Whole Plant
atgggttcctccatattattggttttgtttactctcatggttatgctgtccatttcttatgaaccactcaaatggatgggcataaacgcgagccatgtaccggaaacttgctaccatcattgtaaccagacgttcgagagtagtcgccaatgctttaaatggtgtcaagaattagctcgtaaagatgagtacaagatttatgggtacccttactcaaccaacacaaggcgtgtcctcgccgttcttcatgagaaaggtctctcttacgatcccatcaccgtcaacttgatagccggtgaccagaagaagccgagttttctcgctatcaatccatttggtcaagtcccagttttcctagacgggggtcttaagttgactgaatctcgagctatatctgaatacatagcgactgtccataaatcaagaggcacacaacttctgaattacaaaagctacaaaacaatgggaacacaaagaatgtggatggctatcgaatcttttgagtttgatccactcacatcaacactgacctgggaacaatccatcaagcctatgtacggtctaaagacggactataaggttgtgaatgaaaccgaggcgaagctagagaaggttctagatatatacgaagaacgactcaaaaattctagcttcttggctagtaacagcttcacaatggctgatctttatcaccttcctaatatacaataccttatggacacacatacaaagagaatgtttgtaaaccggccaagcgtgcgccggtgggtggctgagatcacagctagaccggcttggaagagggcatgtgatgtgaaggcttggtaccataagaagaagaattaa

SEQ ID NO: 70213 - protein, 281 aa, Arabidopsis thaliana
  peptide (1)..(281): Ceres Seq. ID no. 2178941
  misc_feature (161)..(264): Pfam Name: Glutathione S-transferase, C-terminal domain Pfam Description: Glutathione S-transferase, C-terminal domain
  misc_feature (65)..(268): Homolog of NCBI NO: 15218639 NR Description: glutathione transferase, putative; protein id: supported by cDNA: gi_11095987, supported by cDNA: gi_17065131,
  misc_feature (1)..(281): Homolog of NCBI NO: 25518742 NR Description: hypothetical protein F22D16.6 - Arabidopsis
  misc_feature (54)..(281): Homolog of NCBI NO: 18379034 NR Description: glutathione transferase, putative; protein id:
  misc_feature (64)..(281): Homolog of NCBI NO: 30678437 NR Description: glutathione transferase, putative [Arabidopsis >gi|28973615|gb|AAO64132.1| putative glutathione transferase
  misc_feature (65)..(265): Homolog of NCBI NO: 15227063 NR Description: glutathione transferase, putative; protein id:
  misc_feature (65)..(265): Homolog of NCBI NO: 31790099 NR Description: glutathione S-transferase 4 [Brassica juncea]
  misc_feature (65)..(268): Homolog of NCBI NO: 17377644 NR Description: Glutathione S-transferase 11 (GST class-phi)
  misc_feature (54)..(281): Homolog of NCBI NO: 25287129 NR Description: hypothetical protein F22D16.5 - Arabidopsis
  misc_feature (26)..(281): Homolog of NCBI NO: 15218641 NR Description: glutathione transferase, putative; protein id:
  misc_feature (65)..(273): Homolog of NCBI NO: 1170094 NR Description: Glutathione S-transferase (GST class-PHI) (25 kDa binding protein) >gi|860956|emb|CAA55039.1| glutathione
MGSSILLVLFTLMVMLSISYEPLKWMGINASHVPETCYHHCNQTFESSRQCFKWCQELARKDEYKIYGYPYSTNTRRVLAVLHEKGLSYDPITVNLIAGDQKKPSFLAINPFGQVPVFLDGGLKLTESRAISEYIATVHKSRGTQLLNYKSYKTMGTQRMWMAIESFEFDPLTSTLTWEQSIKPMYGLKTDYKVVNETEAKLEKVLDIYEERLKNSSFLASNSFTMADLYHLPNIQYLMDTHTKRMFVNRPSVRRWVAEITARPAWKRACDVKAWYHKKKN

SEQ ID NO: 70214 - protein, 269 aa, Arabidopsis thaliana
  peptide (1)..(269): Ceres Seq. ID no. 2178942
  misc_feature (149)..(252): Pfam Name: Glutathione S-transferase, C-terminal domain Pfam Description: Glutathione S-transferase, C-terminal domain
  misc_feature (1)..(269): Homolog of NCBI NO: 25518742 NR Description: hypothetical protein F22D16.6 - Arabidopsis
  misc_feature (14)..(269): Homolog of NCBI NO: 15218641 NR Description: glutathione transferase, putative; protein id:
  misc_feature (42)..(269): Homolog of NCBI NO: 18379034 NR Description: glutathione transferase, putative; protein id:
  misc_feature (42)..(269): Homolog of NCBI NO: 25287129 NR Description: hypothetical protein F22D16.5 - Arabidopsis
  misc_feature (52)..(269): Homolog of NCBI NO: 30678437 NR Description: glutathione transferase, putative [Arabidopsis >gi|28973615|gb|AAO64132.1| putative glutathione transferase
  misc_feature (53)..(256): Homolog of NCBI NO: 17377644 NR Description: Glutathione S-transferase 11 (GST class-phi)
  misc_feature (53)..(253): Homolog of NCBI NO: 15227063 NR Description: glutathione transferase, putative; protein id:
  misc_feature (53)..(253): Homolog of NCBI NO: 31790099 NR Description: glutathione S-transferase 4 [Brassica juncea]
  misc_feature (53)..(256): Homolog of NCBI NO: 15218639 NR Description: glutathione transferase, putative; protein id: supported by cDNA: gi_11095987, supported by cDNA: gi_17065131,
  misc_feature (53)..(261): Homolog of NCBI NO: 1170094 NR Description: Glutathione S-transferase (GST class-PHI) (25 kDa binding protein) >gi|860956|emb|CAA55039.1| glutathione
MVMLSISYEPLKWMGINASHVPETCYHHCNQTFESSRQCFKWCQELARKDEYKIYGYPYSTNTRRVLAVLHEKGLSYDPITVNLIAGDQKKPSFLAINPFGQVPVFLDGGLKLTESRAISEYIATVHKSRGTQLLNYKSYKTMGTQRMWMAIESFEFDPLTSTLTWEQSIKPMYGLKTDYKVVNETEAKLEKVLDIYEERLKNSSFLASNSFTMADLYHLPNIQYLMDTHTKRMFVNRPSVRRWVAEITARPAWKRACDVKAWYHKKKN

SEQ ID NO: 70215 - protein, 267 aa, Arabidopsis thaliana
  peptide (1)..(267): Ceres Seq. ID no. 2178943
  misc_feature (147)..(250): Pfam Name: Glutathione S-transferase, C-terminal domain Pfam Description: Glutathione S-transferase, C-terminal domain
  misc_feature (1)..(267): Homolog of NCBI NO: 25518742 NR Description: hypothetical protein F22D16.6 - Arabidopsis
  misc_feature (12)..(267): Homolog of NCBI NO: 15218641 NR Description: glutathione transferase, putative; protein id:
  misc_feature (40)..(267): Homolog of NCBI NO: 18379034 NR Description: glutathione transferase, putative; protein id:
  misc_feature (40)..(267): Homolog of NCBI NO: 25287129 NR Description: hypothetical protein F22D16.5 - Arabidopsis
  misc_feature (50)..(267): Homolog of NCBI NO: 30678437 NR Description: glutathione transferase, putative [Arabidopsis >gi|28973615|gb|AAO64132.1| putative glutathione transferase
  misc_feature (51)..(254): Homolog of NCBI NO: 17377644 NR Description: Glutathione S-transferase 11 (GST class-phi)
  misc_feature (51)..(251): Homolog of NCBI NO: 15227063 NR Description: glutathione transferase, putative; protein id:
  misc_feature (51)..(251): Homolog of NCBI NO: 31790099 NR Description: glutathione S-transferase 4 [Brassica juncea]
  misc_feature (51)..(254): Homolog of NCBI NO: 15218639 NR Description: glutathione transferase, putative; protein id: supported by cDNA: gi_11095987, supported by cDNA: gi_17065131,
  misc_feature (51)..(259): Homolog of NCBI NO: 1170094 NR Description: Glutathione S-transferase (GST class-PHI) (25 kDa binding protein) >gi|860956|emb|CAA55039.1| glutathione
MLSISYEPLKWMGINASHVPETCYHHCNQTFESSRQCFKWCQELARKDEYKIYGYPYSTNTRRVLAVLHEKGLSYDPITVNLIAGDQKKPSFLAINPFGQVPVFLDGGLKLTESRAISEYIATVHKSRGTQLLNYKSYKTMGTQRMWMAIESFEFDPLTSTLTWEQSIKPMYGLKTDYKVVNETEAKLEKVLDIYEERLKNSSFLASNSFTMADLYHLPNIQYLMDTHTKRMFVNRPSVRRWVAEITARPAWKRACDVKAWYHKKKN

SEQ ID NO: 70216 - DNA, 1674 bp, Arabidopsis thaliana
  misc_feature (1)..(1674): Ceres Seq. ID no. 2181359
  misc_feature: MA Experiment ID: 20000185 Result: Up-regulated in Transcription
  misc_feature: MA Experiment 20000185 PARAMETER Experiment Name: At_Roots__P Parameter: Age (day) Value: 7 vs. 21
  misc_feature: MA Experiment 20000185 PARAMETER Experiment Name: At_Roots__P Parameter: Organism Value: A. thaliana
  misc_feature: MA Experiment 20000185 PARAMETER Experiment Name: At_Roots__P Parameter: Tissue Value: Roots vs. Whole Plant
  misc_feature: MA Experiment ID: 20000439 Result: Up-regulated in Transcription
  misc_feature: MA Experiment 20000439 PARAMETER Experiment Name: At_Roots__P Parameter: Age (day) Value: 14 vs. 21
  misc_feature: MA Experiment 20000439 PARAMETER Experiment Name: At_Roots__P Parameter: Organism Value: A. thaliana
  misc_feature: MA Experiment 20000439 PARAMETER Experiment Name: At_Roots__P Parameter: Tissue Value: Roots vs. Whole Plant
  misc_feature: MA Experiment ID: 20001451 Result: Down-regulated in Transcription
  misc_feature: MA Experiment 20001451 PARAMETER Experiment Name: At_Far-red-induction_P Parameter: Age (day) Value: 7
  misc_feature: MA Experiment 20001451 PARAMETER Experiment Name: At_Far-red-induction_P Parameter: Light Value: Far-red vs. White
  misc_feature: MA Experiment 20001451 PARAMETER Experiment Name: At_Far-red-induction_P Parameter: Organism Value: A. thaliana
  misc_feature: MA Experiment 20001451 PARAMETER Experiment Name: At_Far-red-induction_P Parameter: Plant Line Value: Columbia
  misc_feature: MA Experiment 20001451 PARAMETER Experiment Name: At_Far-red-induction_P Parameter: Timepoint (hr) Value: 24
  misc_feature: MA Experiment 20001451 PARAMETER Experiment Name: At_Far-red-induction_P Parameter: Tissue Value: Whole Plant
  misc_feature: MA Experiment ID: 20001557 Result: Down-regulated in Transcription
  misc_feature: MA Experiment 20001557 PARAMETER Experiment Name: At_Drought_Soil_Dry_P Parameter: Age (day) Value: 27
  misc_feature: MA Experiment 20001557 PARAMETER Experiment Name: At_Drought_Soil_Dry_P Parameter: Organism Value: A. thaliana
  misc_feature: MA Experiment 20001557 PARAMETER Experiment Name: At_Drought_Soil_Dry_P Parameter: Plant Line Value: WS
  misc_feature: MA Experiment 20001557 PARAMETER Experiment Name: At_Drought_Soil_Dry_P Parameter: Post Timepoint (hr) Value: 3
  misc_feature: MA Experiment 20001557 PARAMETER Experiment Name: At_Drought_Soil_Dry_P Parameter: Post-Treatment Value: Re-Water vs. No Drought
  misc_feature: MA Experiment 20001557 PARAMETER Experiment Name: At_Drought_Soil_Dry_P Parameter: Timepoint (day) Value: 13
  misc_feature: MA Experiment 20001557 PARAMETER Experiment Name: At_Drought_Soil_Dry_P Parameter: Treatment Value: Drought vs. No Drought
  misc_feature: MA Experiment ID: 20001558 Result: Down-regulated in Transcription
  misc_feature: MA Experiment 20001558 PARAMETER Experiment Name: At_Drought_Soil_Dry_P Parameter: Age (day) Value: 27
  misc_feature: MA Experiment 20001558 PARAMETER Experiment Name: At_Drought_Soil_Dry_P Parameter: Organism Value: A. thaliana
  misc_feature: MA Experiment 20001558 PARAMETER Experiment Name: At_Drought_Soil_Dry_P Parameter: Plant Line Value: WS
  misc_feature: MA Experiment 20001558 PARAMETER Experiment Name: At_Drought_Soil_Dry_P Parameter: Post Timepoint (hr) Value: 6
  misc_feature: MA Experiment 20001558 PARAMETER Experiment Name: At_Drought_Soil_Dry_P Parameter: Post-Treatment Value: Re-Water vs. No Drought
  misc_feature: MA Experiment 20001558 PARAMETER Experiment Name: At_Drought_Soil_Dry_P Parameter: Timepoint (day) Value: 13
  misc_feature: MA Experiment 20001558 PARAMETER Experiment Name: At_Drought_Soil_Dry_P Parameter: Treatment Value: Drought vs. No Drought
atgtcgatctccggcgctgttgatgaagctgggactccacttctcgctgtcaccgtcgactacaggaacaaacccgccgtcaaatcttcctccggtggctggagatccgccggattcatcatcggtgtggaggttgctgagcgatttgcttactatgggatatcgtcgaatctgataacgtatttgaccggaccactgggacaatcgacggcggctgcggcggctaacgtgaacgcttggtctggaacggcgtcgttgcttcctctccttggtgcttttgtcgctgactcgtttctaggtcgtttccggacaatcctcgccgcctctgctctctatatagtggggctgggtgtattgactttatctgcaatgattccttcagactgcaaagtttcgaatctactctcgtcatgctctcctcgatttcaagtaattacattctttagtgcattgtatctagtggctttagctcaaggtggtcacaagccgtgtgttcaggcttttggagcggatcagtttgatgaaaaggaacctgaagagtgcaaagcaaagagttctttctttaattggtggtattttggtatgtgctttgggacgttaacaactctatgggtgttgaattatatccaagataatctaagttgggcgttaggctttggtattccatgcattgctatggtagttgctttggttgttctcttgcttggaacctgcacttatcggttcagtattcgaagagaagatcaaagtccttttgtgaggattggaaatgtttatgtagcggctgtaaagaactggagtgtttcagctttagatgtagctgctgcagaggagagacttggtcttgtgtcttgcagtagctctcagcaatttagttttctcaacaaagctctggtcgcaaagaatggttcttgtagtatagatgaacttgaagaagcaaaatcagtgcttaggttagctccgatatggttaacatgcttggtttatgcggttgtgtttgcgcagtctccaactttcttcaccaaacaaggagctacaatggagagatcaatcacacctggttacaagatctctccggctaccctccagtccttcatcagcctctctatagtcatcttcatcccaatctacgaccgtgtactaatcccaattgcaagatcatttacacataaaccaggcggaatcacaatgcttcagagaatcggcacaggcatattcctctctttccttgctatggttgtagccgctctagtggagatgaaaaggcttaaaactgctgcggattacgggctcgtagattcacctgacgctacggttccaatgagtgtgtggtggttagttcctcagtatgttctctttggtatcacggatgttttcgcaatggtgggtcttcaagagttcttctatgaccaagtcccgaatgagctgaggagtgtggggttggctctgtacttgagcatattcggtattggtaactttctcagcagtttcatgatatcaatcattgagaaagcgacaagccaatctggtcaagcgagttggttcgcaaacaacctgaaccaagctcatctcgattacttttactggttactcgcttgtctcagcttcattggcttagcctcctacttgtatgttgcaaagtcttacgtctctaaaaggctcgacaccagttaa

SEQ ID NO: 70217 - protein, 557 aa, Arabidopsis thaliana
  peptide (1)..(557): Ceres Seq. ID no. 2181360
  misc_feature (102)..(488): Pfam Name: POT family Pfam Description: POT family
  misc_feature (1)..(557): Homolog of NCBI NO: 30687920 NR Description: oligopeptide transporter -related [Arabidopsis
  misc_feature (1)..(557): Homolog of NCBI NO: 25402970 NR Description: Similar to peptide transporter [imported] - thaliana >gi|6587835|gb|AAF18524.1|AC006551_10 Similar to peptide
  misc_feature (18)..(550): Homolog of NCBI NO: 15218381 NR Description: peptide transporter PTR2-B, putative; protein id:
  misc_feature (28)..(556): Homolog of NCBI NO: 22330582 NR Description: oligopeptide transporter, putative; protein id: supported by cDNA: gi_19699295 [Arabidopsis thaliana] At1g72130/F28P5.1 [Arabidopsis thaliana]
  misc_feature (28)..(556): Homolog of NCBI NO: 25406147 NR Description: probable peptide transporter PTR2-B T9N14.15 - Arabidopsis thaliana >gi|12323655|gb|AAG51788.1|AC067754_4
  misc_feature (28)..(538): Homolog of NCBI NO: 12322195 NR Description: oligopeptide transporter, putative [Arabidopsis
  misc_feature (19)..(555): Homolog of NCBI NO: 15218352 NR Description: oligopeptide transporter, putative; protein id: [Arabidopsis thaliana] >gi|25406146|pir||E96744 probable
  misc_feature (45)..(556): Homolog of NCBI NO: 26450432 NR Description: putative peptide transporter PTR2-B [Arabidopsis
  misc_feature (19)..(555): Homolog of NCBI NO: 18086410 NR Description: At1g72120/F28P5_2 [Arabidopsis thaliana]
  misc_feature (18)..(555): Homolog of NCBI NO: 15219905 NR Description: peptide transporter, putative; protein id: [Arabidopsis thaliana] >gi|25402971|pir||G86358 protein Similar
MSISGAVDEAGTPLLAVTVDYRNKPAVKSSSGGWRSAGFIIGVEVAERFAYYGISSNLITYLTGPLGQSTAAAAANVNAWSGTASLLPLLGAFVADSFLGRFRTILAASALYIVGLGVLTLSAMIPSDCKVSNLLSSCSPRFQVITFFSALYLVALAQGGHKPCVQAFGADQFDEKEPEECKAKSSFFNWWYFGMCFGTLTTLWVLNYIQDNLSWALGFGIPCIAMVVALVVLLLGTCTYRFSIRREDQSPFVRIGNVYVAAVKNWSVSALDVAAAEERLGLVSCSSSQQFSFLNKALVAKNGSCSIDELEEAKSVLRLAPIWLTCLVYAVVFAQSPTFFTKQGATMERSITPGYKISPATLQSFISLSIVIFIPIYDRVLIPIARSFTHKPGGITMLQRIGTGIFLSFLAMVVAALVEMKRLKTAADYGLVDSPDATVPMSVWWLVPQYVLFGITDVFAMVGLQEFFYDQVPNELRSVGLALYLSIFGIGNFLSSFMISIIEKATSQSGQASWFANNLNQAHLDYFYWLLACLSFIGLASYLYVAKSYVSKRLDTS

SEQ ID NO: 70218 - protein, 434 aa, Arabidopsis thaliana
  peptide (1)..(434): Ceres Seq. ID no. 2181361
  misc_feature (1)..(365): Pfam Name: POT family Pfam Description: POT family
  misc_feature (1)..(434): Homolog of NCBI NO: 30687920 NR Description: oligopeptide transporter -related [Arabidopsis
  misc_feature (1)..(434): Homolog of NCBI NO: 25402970 NR Description: Similar to peptide transporter [imported] - thaliana >gi|6587835|gb|AAF18524.1|AC006551_10 Similar to peptide
  misc_feature (1)..(427): Homolog of NCBI NO: 15218381 NR Description: peptide transporter PTR2-B, putative; protein id:
  misc_feature (1)..(433): Homolog of NCBI NO: 22330582 NR Description: oligopeptide transporter, putative; protein id: supported by cDNA: gi_19699295 [Arabidopsis thaliana] At1g72130/F28P5.1 [Arabidopsis thaliana]
  misc_feature (1)..(433): Homolog of NCBI NO: 25406147 NR Description: probable peptide transporter PTR2-B T9N14.15 - Arabidopsis thaliana >gi|12323655|gb|AAG51788.1|AC067754_4
  misc_feature (1)..(415): Homolog of NCBI NO: 12322195 NR Description: oligopeptide transporter, putative [Arabidopsis
  misc_feature (1)..(432): Homolog of NCBI NO: 15218352 NR Description: oligopeptide transporter, putative; protein id: [Arabidopsis thaliana] >gi|25406146|pir||E96744 probable
  misc_feature (1)..(433): Homolog of NCBI NO: 26450432 NR Description: putative peptide transporter PTR2-B [Arabidopsis
  misc_feature (1)..(432): Homolog of NCBI NO: 18086410 NR Description: At1g72120/F28P5_2 [Arabidopsis thaliana]
  misc_feature (1)..(432): Homolog of NCBI NO: 15219905 NR Description: peptide transporter, putative; protein id: [Arabidopsis thaliana] >gi|25402971|pir||G86358 protein Similar
MIPSDCKVSNLLSSCSPRFQVITFFSALYLVALAQGGHKPCVQAFGADQFDEKEPEECKAKSSFFNWWYFGMCFGTLTTLWVLNYIQDNLSWALGFGIPCIAMVVALVVLLLGTCTYRFSIRREDQSPFVRIGNVYVAAVKNWSVSALDVAAAEERLGLVSCSSSQQFSFLNKALVAKNGSCSIDELEEAKSVLRLAPIWLTCLVYAVVFAQSPTFFTKQGATMERSITPGYKISPATLQSFISLSIVIFIPIYDRVLIPIARSFTHKPGGITMLQRIGTGIFLSFLAMVVAALVEMKRLKTAADYGLVDSPDATVPMSVWWLVPQYVLFGITDVFAMVGLQEFFYDQVPNELRSVGLALYLSIFGIGNFLSSFMISIIEKATSQSGQASWFANNLNQAHLDYFYWLLACLSFIGLASYLYVAKSYVSKRLDTS

SEQ ID NO: 70219 - protein, 363 aa, Arabidopsis thaliana
  peptide (1)..(363): Ceres Seq. ID no. 2181362
  misc_feature (1)..(294): Pfam Name: POT family Pfam Description: POT family
  misc_feature (1)..(363): Homolog of NCBI NO: 30687920 NR Description: oligopeptide transporter -related [Arabidopsis
  misc_feature (1)..(363): Homolog of NCBI NO: 25402970 NR Description: Similar to peptide transporter [imported] - thaliana >gi|6587835|gb|AAF18524.1|AC006551_10 Similar to peptide
  misc_feature (1)..(356): Homolog of NCBI NO: 15218381 NR Description: peptide transporter PTR2-B, putative; protein id:
  misc_feature (1)..(362): Homolog of NCBI NO: 22330582 NR Description: oligopeptide transporter, putative; protein id: supported by cDNA: gi_19699295 [Arabidopsis thaliana] At1g72130/F28P5.1 [Arabidopsis thaliana]
  misc_feature (1)..(362): Homolog of NCBI NO: 25406147 NR Description: probable peptide transporter PTR2-B T9N14.15 - Arabidopsis thaliana >gi|12323655|gb|AAG51788.1|AC067754_4
  misc_feature (1)..(344): Homolog of NCBI NO: 12322195 NR Description: oligopeptide transporter, putative [Arabidopsis
  misc_feature (1)..(361): Homolog of NCBI NO: 15218352 NR Description: oligopeptide transporter, putative; protein id: [Arabidopsis thaliana] >gi|25406146|pir||E96744 probable
  misc_feature (1)..(362): Homolog of NCBI NO: 26450432 NR Description: putative peptide transporter PTR2-B [Arabidopsis
  misc_feature (1)..(361): Homolog of NCBI NO: 18086410 NR Description: At1g72120/F28P5_2 [Arabidopsis thaliana]
  misc_feature (1)..(361): Homolog of NCBI NO: 15219905 NR Description: peptide transporter, putative; protein id: [Arabidopsis thaliana] >gi|25402971|pir||G86358 protein Similar
MCFGTLTTLWVLNYIQDNLSWALGFGIPCIAMVVALVVLLLGTCTYRFSIRREDQSPFVRIGNVYVAAVKNWSVSALDVAAAEERLGLVSCSSSQQFSFLNKALVAKNGSCSIDELEEAKSVLRLAPIWLTCLVYAVVFAQSPTFFTKQGATMERSITPGYKISPATLQSFISLSIVIFIPIYDRVLIPIARSFTHKPGGITMLQRIGTGIFLSFLAMVVAALVEMKRLKTAADYGLVDSPDATVPMSVWWLVPQYVLFGITDVFAMVGLQEFFYDQVPNELRSVGLALYLSIFGIGNFLSSFMISIIEKATSQSGQASWFANNLNQAHLDYFYWLLACLSFIGLASYLYVAKSYVSKRLDTS

SEQ ID NO: 70220 - DNA, 546 bp, Arabidopsis thaliana
  misc_feature (1)..(546): Ceres Seq. ID no. 2182561
  misc_feature: MA Experiment ID: 20000306 Result: Up-regulated in Transcription
  misc_feature: MA Experiment 20000306 PARAMETER Experiment Name: At_Germinating_Seeds_Sub_P Parameter: Age (hr) Value: 6 vs. 0
  misc_feature: MA Experiment 20000306 PARAMETER Experiment Name: At_Germinating_Seeds_Sub_P Parameter: Organism Value: A. thaliana
  misc_feature: MA Experiment 20000306 PARAMETER Experiment Name: At_Germinating_Seeds_Sub_P Parameter: Plant Line Value: WS
  misc_feature: MA Experiment 20000306 PARAMETER Experiment Name: At_Germinating_Seeds_Sub_P Parameter: Tissue Value: Germinating Seeds
  misc_feature: MA Experiment ID: 20000307 Result: Up-regulated in Transcription
  misc_feature: MA Experiment 20000307 PARAMETER Experiment Name: At_Germinating_Seeds_Sub_P Parameter: Age (hr) Value: 24 vs. 0
  misc_feature: MA Experiment 20000307 PARAMETER Experiment Name: At_Germinating_Seeds_Sub_P Parameter: Organism Value: A. thaliana
  misc_feature: MA Experiment 20000307 PARAMETER Experiment Name: At_Germinating_Seeds_Sub_P Parameter: Plant Line Value: WS
  misc_feature: MA Experiment 20000307 PARAMETER Experiment Name: At_Germinating_Seeds_Sub_P Parameter: Tissue Value: Germinating Seeds
atggggctttcatttgcaaagctttttagccggctttttgccaagaaggagatgcgaatccttatggttggtcttgatgctgctggtaagaccaccattttgtacaagctcaagcttggtgagattgtcaccaccattcccaccatcgggtttaatgtggagacggttgagtacaagaacatcagcttcacggtttgggatgtcgggggtcaggacaagatccgtcccttgtggagacactacttccaaaacactcaaggtctgatatttgttgttgatagcaatgacagagaccgtgttgttgaagccagagatgaacttcacaggatgttgaatgaagatgagcttcgggatgcagtattgcttgtgtttgccaacaagcaggatcttccaaacgctatgaatgctgctgagattactgataagcttggccttcactcactccggcaacgccactggtacatccaaagcacatgcgcaactagcggtgaagggctctatgaaggtctggattggctttccaacaacattgctagcaaagcttga

SEQ ID NO: 70221 - protein, 181 aa, Arabidopsis thaliana
  peptide (1)..(181): Ceres Seq. ID no. 2182562
  misc_feature (4)..(177): Pfam Name: ADP-ribosylation factor family Pfam Description: ADP-ribosylation factor family
  misc_feature (1)..(181): Homolog of NCBI NO: 30681825 NR Description: ADP-ribosylation factor, putative [Arabidopsis
  misc_feature (1)..(181): Homolog of NCBI NO: 15223164 NR Description: putative ADP-ribosylation factor 1; protein id: supported by cDNA: 33126., supported by cDNA: gi_13430503,
  misc_feature (1)..(181): Homolog of NCBI NO: 15226521 NR Description: ADP-ribosylation factor 1; protein id: supported by cDNA: 34414., supported by cDNA: gi_18650621, by cDNA: gi_553037 [Arabidopsis thaliana]
  misc_feature (1)..(180): Homolog of NCBI NO: 6573751 NR Description: F20B24.7 [Arabidopsis thaliana]
  misc_feature (1)..(181): Homolog of NCBI NO: 25294169 NR Description: ADP-ribosylation factor [imported] - pepper
  misc_feature (1)..(180): Homolog of NCBI NO: 17154685 NR Description: ADP-ribosylation factor [Gossypium hirsutum]
  misc_feature (1)..(181): Homolog of NCBI NO: 39653273 NR Description: ADP-ribosylation factor [Medicago sativa]
  misc_feature (1)..(181): Homolog of NCBI NO: 11131026 NR Description: ADP-ribosylation factor
  misc_feature (1)..(180): Homolog of NCBI NO: 25294174 NR Description: F5O8.5 protein - Arabidopsis thaliana
  misc_feature (1)..(181): Homolog of NCBI NO: 15228723 NR Description: ADP-ribosylation factor-like protein; protein id: supported by cDNA: 14909., supported by cDNA: gi_13926301, by cDNA: gi_16323247 [Arabidopsis thaliana]
MGLSFAKLFSRLFAKKEMRILMVGLDAAGKTTILYKLKLGEIVTTIPTIGFNVETVEYKNISFTVWDVGGQDKIRPLWRHYFQNTQGLIFVVDSNDRDRVVEARDELHRMLNEDELRDAVLLVFANKQDLPNAMNAAEITDKLGLHSLRQRHWYIQSTCATSGEGLYEGLDWLSNNIASKA

SEQ ID NO: 70222 - protein, 164 aa, Arabidopsis thaliana; identical to SEQ ID NO: 22740
  peptide (1)..(164): Ceres Seq. ID no. 2182563
  misc_feature (1)..(160): Pfam Name: ADP-ribosylation factor family Pfam Description: ADP-ribosylation factor family
  misc_feature (1)..(164): Homolog of NCBI NO: 30681825 NR Description: ADP-ribosylation factor, putative [Arabidopsis
  misc_feature (1)..(164): Homolog of NCBI NO: 15223164 NR Description: putative ADP-ribosylation factor 1; protein id: supported by cDNA: 33126., supported by cDNA: gi_13430503,
  misc_feature (1)..(164): Homolog of NCBI NO: 15226521 NR Description: ADP-ribosylation factor 1; protein id: supported by cDNA: 34414., supported by cDNA: gi_18650621, by cDNA: gi_553037 [Arabidopsis thaliana]
  misc_feature (1)..(163): Homolog of NCBI NO: 6573751 NR Description: F20B24.7 [Arabidopsis thaliana]
  misc_feature (1)..(164): Homolog of NCBI NO: 25294169 NR Description: ADP-ribosylation factor [imported] - pepper
  misc_feature (1)..(163): Homolog of NCBI NO: 17154685 NR Description: ADP-ribosylation factor [Gossypium hirsutum]
  misc_feature (1)..(164): Homolog of NCBI NO: 39653273 NR Description: ADP-ribosylation factor [Medicago sativa]
  misc_feature (1)..(164): Homolog of NCBI NO: 11131026 NR Description: ADP-ribosylation factor
  misc_feature (1)..(163): Homolog of NCBI NO: 25294174 NR Description: F5O8.5 protein - Arabidopsis thaliana
  misc_feature (1)..(164): Homolog of NCBI NO: 15228723 NR Description: ADP-ribosylation factor-like protein; protein id: supported by cDNA: 14909., supported by cDNA: gi_13926301, by cDNA: gi_16323247 [Arabidopsis thaliana]

SEQ ID NO: 70223 - protein, 160 aa, Arabidopsis thaliana; identical to SEQ ID NO: 22741
  peptide (1)..(160): Ceres Seq. ID no. 2182564
  misc_feature (1)..(156): Pfam Name: ADP-ribosylation factor family Pfam Description: ADP-ribosylation factor family
  misc_feature (1)..(160): Homolog of NCBI NO: 30681825 NR Description: ADP-ribosylation factor, putative [Arabidopsis
  misc_feature (1)..(160): Homolog of NCBI NO: 15223164 NR Description: putative ADP-ribosylation factor 1; protein id: supported by cDNA: 33126., supported by cDNA: gi_13430503,
  misc_feature (1)..(160): Homolog of NCBI NO: 15226521 NR Description: ADP-ribosylation factor 1; protein id: supported by cDNA: 34414., supported by cDNA: gi_18650621, by cDNA: gi_553037 [Arabidopsis thaliana]
  misc_feature (1)..(159): Homolog of NCBI NO: 6573751 NR Description: F20B24.7 [Arabidopsis thaliana]
  misc_feature (1)..(160): Homolog of NCBI NO: 25294169 NR Description: ADP-ribosylation factor [imported] - pepper
  misc_feature (1)..(159): Homolog of NCBI NO: 17154685 NR Description: ADP-ribosylation factor [Gossypium hirsutum]
  misc_feature (1)..(160): Homolog of NCBI NO: 39653273 NR Description: ADP-ribosylation factor [Medicago sativa]
  misc_feature (1)..(160): Homolog of NCBI NO: 11131026 NR Description: ADP-ribosylation factor
  misc_feature (1)..(159): Homolog of NCBI NO: 25294174 NR Description: F5O8.5 protein - Arabidopsis thaliana
  misc_feature (1)..(160): Homolog of NCBI NO: 15228723 NR Description: ADP-ribosylation factor-like protein; protein id: supported by cDNA: 14909., supported by cDNA: gi_13926301, by cDNA: gi_16323247 [Arabidopsis thaliana]

SEQ ID NO: 70224 - DNA, 2193 bp, Arabidopsis thaliana
  misc_feature (1)..(2193): Ceres Seq. ID no. 2182678
  misc_feature: MA Experiment ID: 20000315 Result: Down-regulated in Transcription
  misc_feature: MA Experiment 20000315 PARAMETER Experiment Name: At_14day_Shoots-Roots_Sub_P Parameter: Age (day) Value: 14
  misc_feature: MA Experiment 20000315 PARAMETER Experiment Name: At_14day_Shoots-Roots_Sub_P Parameter: Organism Value: A. thaliana
  misc_feature: MA Experiment 20000315 PARAMETER Experiment Name: At_14day_Shoots-Roots_Sub_P Parameter: Plant Line Value: WS
  misc_feature: MA Experiment 20000315 PARAMETER Experiment Name: At_14day_Shoots-Roots_Sub_P Parameter: Tissue Value: Shoots vs. Whole Plant
  misc_feature: MA Experiment ID: 20000327 Result: Down-regulated in Transcription
  misc_feature: MA Experiment 20000327 PARAMETER Experiment Name: At_42deg_Heat_Sub_P Parameter: Age (day) Value: 14
  misc_feature: MA Experiment 20000327 PARAMETER Experiment Name: At_42deg_Heat_Sub_P Parameter: Organism Value: A. thaliana
  misc_feature: MA Experiment 20000327 PARAMETER Experiment Name: At_42deg_Heat_Sub_P Parameter: Plant Line Value: WS
  misc_feature: MA Experiment 20000327 PARAMETER Experiment Name: At_42deg_Heat_Sub_P Parameter: Temperature (deg C) Value: 42 vs. 22
  misc_feature: MA Experiment 20000327 PARAMETER Experiment Name: At_42deg_Heat_Sub_P Parameter: Timepoint (hr) Value: 1
  misc_feature: MA Experiment 20000327 PARAMETER Experiment Name: At_42deg_Heat_Sub_P Parameter: Tissue Value: Aerial
  misc_feature: MA Experiment ID: 20000328 Result: Down-regulated in Transcription
  misc_feature: MA Experiment 20000328 PARAMETER Experiment Name: At_42deg_Heat_Sub_P Parameter: Age (day) Value: 14
  misc_feature: MA Experiment 20000328 PARAMETER Experiment Name: At_42deg_Heat_Sub_P Parameter: Organism Value: A. thaliana
  misc_feature: MA Experiment 20000328 PARAMETER Experiment Name: At_42deg_Heat_Sub_P Parameter: Plant Line Value: WS
  misc_feature: MA Experiment 20000328 PARAMETER Experiment Name: At_42deg_Heat_Sub_P Parameter: Temperature (deg C) Value: 42 vs. 22
  misc_feature: MA Experiment 20000328 PARAMETER Experiment Name: At_42deg_Heat_Sub_P Parameter: Timepoint (hr) Value: 6
  misc_feature: MA Experiment 20000328 PARAMETER Experiment Name: At_42deg_Heat_Sub_P Parameter: Tissue Value: Aerial
  misc_feature: MA Experiment ID: 20000332 Result: Down-regulated in Transcription
  misc_feature: MA Experiment 20000332 PARAMETER Experiment Name: At_4deg_Cold_Sub_P Parameter: Age (day) Value: 14
  misc_feature: MA Experiment 20000332 PARAMETER Experiment Name: At_4deg_Cold_Sub_P Parameter: Organism Value: A. thaliana
  misc_feature: MA Experiment 20000332 PARAMETER Experiment Name: At_4deg_Cold_Sub_P Parameter: Plant Line Value: WS
  misc_feature: MA Experiment 20000332 PARAMETER Experiment Name: At_4deg_Cold_Sub_P Parameter: Temperature (deg C) Value: 4 vs. 22
  misc_feature: MA Experiment 20000332 PARAMETER Experiment Name: At_4deg_Cold_Sub_P Parameter: Timepoint (hr) Value: 2
  misc_feature: MA Experiment 20000332 PARAMETER Experiment Name: At_4deg_Cold_Sub_P Parameter: Tissue Value: Aerial
  misc_feature: MA Experiment ID: 20000440 Result: Down-regulated in Transcription
  misc_feature: MA Experiment 20000440 PARAMETER Experiment Name: At_Closed-Flower__Sub_P Parameter: Tissue Value: Closed Flower vs. Whole Plant
  misc_feature: Pfam Name: Pkinase Pfam Description: Protein kinase domain
atgaagacaaagactagcatcttccaatttattgtagcatctgtccttactctgctcatcaatgactcatcagcagcaacacctccacctccaattagcaattcttcaacgtcttgtaacaaaacctgtggaggaatctcgatcccgttcccattcggaattggcgggaaagattgttatctcaacggttggtacgaggttatctgcaacacaaccacttccgattctaacacaactgttcctttactctctatgatcaatcgggaagtggtgaatatctctctcccagacagtaacgaaccatacggacttgttcaaatcaaaggtcctgtgacatcgttgggttgttctagtaatactagtgaaggaccccaaaactcgctcccggttttgaatgtcacaggtaagggcagcccatatttcctgaccgacgagaaccgtcttgtggcggttggttgtggtataaaggcattgatgacagatacagaatcagagatcttgggttgtgaatcgagctgcgaacacagaaagagtggtgaagaagtaacaaatttgatctgtactggttacagatgctgccaggcgaggctaccggtggggcgtcctcaggctataaccgtaaatatagagaactctagtggaggagaagaaacgtgcaaagttgcgttcttgacggacaagaggtattcgccgtctaatgttacagagccagaacagtttcataacaatggatatgtggtgctagagttaggatggtactttgccacttcgaactctcgctttaagagcctcttgggttgtacaaatatgagccgaaaaggttctgggttctcggatgataattgcagttgcgagtatgattacttctccgggatgagttataggaattgttattgcgactatggctacacagggaacccataccttcgaggtggctgcgtagatactgattcatgcgaaggaaatcacaactgtggggaagatgctcattgtgttaacatgcctggaccaatgtccatgtgcaggcctaaccccaagataaccaaacctaccaaacccccggtgcttcaaggcattcttataggtttgtcaggattagtattttttgttgggctattctggctatttaaactcataaagaagcgaaggaacatcaaccgcagcaagaagtttttcaaacggaacggaggcttgctgttgaaacaacaattaactacaaaggacggaaatgtagaaatgtctaagattttcagttcaaaggagttaagaaaagccactgataacttcagcatagatagagtgcttgggcaaggcggtcaaggcactgtgtacaaaggaatgttggtagatgggagcatcgttgcggttaaaagatccaaagttgtggatgaagacaaaatggaagagtttatcaatgagattgttcttctgtcacaaatcaatcaccgcaacattgtgaaactcttgggatgttgcttggagacagaagttccaatcttggtgtacgaatatattcccaatggagatctgttcaagcggcttcatgatgaatctgatgattacaccatgacttgggaagtgcggcttcgcatagccatagagatagcaggagctcttacatacatgcactcagctgcaagttttccaatattccatagagatattaagactaccaatatcctactggacgagaaataccgagccaaagtgtctgactttggaacttcaagatcagtaaccttagatcaaactcacttgacaacattagttgcaggaacttttggttacatggatccagagtacttcttgtcaagccaatacactcacaagagcgatgtttatagtttcggggtcgtcttggtggagctcataaccggagaaaaaccattgtcccgtgtccggtctgaagaaggtagaggcttggcaactcatttcctcgaggccatgaaagagaacagagtgattgacataattgatattcggatcaaagacgaaagcaaactggagcaagtaatggcggtagcaaaactcgccagaaaatgtcttaaccggaaagggaagaaccggccaaacatgaaagaggtttcaaatgagctagagaggatccgttcatcacccgaagatttagatgtccgtaccgaaaacgaagacgaagaagaggatcaaccaatggcaatcaacaacaaaagatga

SEQ ID NO: 70225 - protein, 730 aa, Arabidopsis thaliana
  peptide (1)..(730): Ceres Seq. ID no. 2182679
  misc_feature: Pfam Name: Pkinase Pfam Description: Protein kinase domain
  misc_feature (20)..(729): Homolog of NCBI NO: 15219143 NR Description: WAK-like kinase (WLK); protein id: At1g16160.1
  misc_feature (77)..(727): Homolog of NCBI NO: 15219137 NR Description: WAK-like kinase (WLK); protein id: At1g16140.1
  misc_feature (2)..(634): Homolog of NCBI NO: 15219130 NR Description: WAK-like kinase (WLK); protein id: At1g16110.1
  misc_feature (2)..(634): Homolog of NCBI NO: 26451262 NR Description: unknown protein [Arabidopsis thaliana]
  misc_feature (19)..(634): Homolog of NCBI NO: 25518691 NR Description: hypothetical protein T24D18.19 - Arabidopsis >gi|6587815|gb|AAF18506.1|AC010924_19 Similar to gb|U44028 thaliana transcription factor CKC and contains a PF|00069
  misc_feature (282)..(727): Homolog of NCBI NO: 15219140 NR Description: WAK-like kinase (WLK); protein id: At1g16150.1
  misc_feature (1)..(358): Homolog of NCBI NO: 15219140 NR Description: WAK-like kinase (WLK); protein id: At1g16150.1
  misc_feature (1)..(727): Homolog of NCBI NO: 15219134 NR Description: WAK-like kinase (WLK); protein id: At1g16130.1
  misc_feature (1)..(727): Homolog of NCBI NO: 15219445 NR Description: WAK-like kinase (WLK); protein id: At1g79670.1, by cDNA: gi_19310446 [Arabidopsis thaliana]
  misc_feature (193)..(727): Homolog of NCBI NO: 30699443 NR Description: WAK-like kinase (WLK) [Arabidopsis thaliana]
MKTKTSIFQFIVASVLTLLINDSSAATPPPPISNSSTSCNKTCGGISIPFPFGIGGKDCYLNGWYEVICNTTTSDSNTTVPLLSMINREVVNISLPDSNEPYGLVQIKGPVTSLGCSSNTSEGPQNSLPVLNVTGKGSPYFLTDENRLVAVGCGIKALMTDTESEILGCESSCEHRKSGEEVTNLICTGYRCCQARLPVGRPQAITVNIENSSGGEETCKVAFLTDKRYSPSNVTEPEQFHNNGYVVLELGWYFATSNSRFKSLLGCTNMSRKGSGFSDDNCSCEYDYFSGMSYRNCYCDYGYTGNPYLRGGCVDTDSCEGNHNCGEDAHCVNMPGPMSMCRPNPKITKPTKPPVLQGILIGLSGLVFFVGLFWLFKLIKKRRNINRSKKFFKRNGGLLLKQQLTTKDGNVEMSKIFSSKELRKATDNFSIDRVLGQGGQGTVYKGMLVDGSIVAVKRSKVVDEDKMEEFINEIVLLSQINHRNIVKLLGCCLETEVPILVYEYIPNGDLFKRLHDESDDYTMTWEVRLRIAIEIAGALTYMHSAASFPIFHRDIKTTNILLDEKYRAKVSDFGTSRSVTLDQTHLTTLVAGTFGYMDPEYFLSSQYTHKSDVYSFGVVLVELITGEKPLSRVRSEEGRGLATHFLEAMKENRVIDIIDIRIKDESKLEQVMAVAKLARKCLNRKGKNRPNMKEVSNELERIRSSPEDLDVRTENEDEEEDQPMAINNKR

SEQ ID NO: 70226 - protein, 646 aa, Arabidopsis thaliana
  peptide (1)..(646): Ceres Seq. ID no. 2182680
  misc_feature: Pfam Name: Pkinase Pfam Description: Protein kinase domain
  misc_feature (1)..(645): Homolog of NCBI NO: 15219143 NR Description: WAK-like kinase (WLK); protein id: At1g16160.1
  misc_feature (1)..(643): Homolog of NCBI NO: 15219137 NR Description: WAK-like kinase (WLK); protein id: At1g16140.1
  misc_feature (1)..(550): Homolog of NCBI NO: 15219130 NR Description: WAK-like kinase (WLK); protein id: At1g16110.1
  misc_feature (1)..(550): Homolog of NCBI NO: 26451262 NR Description: unknown protein [Arabidopsis thaliana]
  misc_feature (1)..(550): Homolog of NCBI NO: 25518691 NR Description: hypothetical protein T24D18.19 - Arabidopsis >gi|6587815|gb|AAF18506.1|AC010924_19 Similar to gb|U44028 thaliana transcription factor CKC and contains a PF|00069
  misc_feature (198)..(643): Homolog of NCBI NO: 15219140 NR Description: WAK-like kinase (WLK); protein id: At1g16150.1
  misc_feature (1)..(274): Homolog of NCBI NO: 15219140 NR Description: WAK-like kinase (WLK); protein id: At1g16150.1
  misc_feature (1)..(643): Homolog of NCBI NO: 15219134 NR Description: WAK-like kinase (WLK); protein id: At1g16130.1
  misc_feature (1)..(643): Homolog of NCBI NO: 15219445 NR Description: WAK-like kinase (WLK); protein id: At1g79670.1, by cDNA: gi_19310446 [Arabidopsis thaliana]
  misc_feature (109)..(643): Homolog of NCBI NO: 30699443 NR Description: WAK-like kinase (WLK) [Arabidopsis thaliana]
MINREVVNISLPDSNEPYGLVQIKGPVTSLGCSSNTSEGPQNSLPVLNVTGKGSPYFLTDENRLVAVGCGIKALMTDTESEILGCESSCEHRKSGEEVTNLICTGYRCCQARLPVGRPQAITVNIENSSGGEETCKVAFLTDKRYSPSNVTEPEQFHNNGYVVLELGWYFATSNSRFKSLLGCTNMSRKGSGFSDDNCSCEYDYFSGMSYRNCYCDYGYTGNPYLRGGCVDTDSCEGNHNCGEDAHCVNMPGPMSMCRPNPKITKPTKPPVLQGILIGLSGLVFFVGLFWLFKLIKKRRNINRSKKFFKRNGGLLLKQQLTTKDGNVEMSKIFSSKELRKATDNFSIDRVLGQGGQGTVYKGMLVDGSIVAVKRSKVVDEDKMEEFINEIVLLSQINHRNIVKLLGCCLETEVPILVYEYIPNGDLFKRLHDESDDYTMTWEVRLRIAIEIAGALTYMHSAASFPIFHRDIKTTNILLDEKYRAKVSDFGTSRSVTLDQTHLTTLVAGTFGYMDPEYFLSSQYTHKSDVYSFGVVLVELITGEKPLSRVRSEEGRGLATHFLEAMKENRVIDIIDIRIKDESKLEQVMAVAKLARKCLNRKGKNRPNMKEVSNELERIRSSPEDLDVRTENEDEEEDQPMAINNKR

SEQ ID NO: 70227 - protein, 572 aa, Arabidopsis thaliana
  peptide (1)..(572): Ceres Seq. ID no. 2182681
  misc_feature: Pfam Name: Pkinase Pfam Description: Protein kinase domain
  misc_feature (1)..(571): Homolog of NCBI NO: 15219143 NR Description: WAK-like kinase (WLK); protein id: At1g16160.1
  misc_feature (1)..(569): Homolog of NCBI NO: 15219137 NR Description: WAK-like kinase (WLK); protein id: At1g16140.1
  misc_feature (1)..(476): Homolog of NCBI NO: 15219130 NR Description: WAK-like kinase (WLK); protein id: At1g16110.1
  misc_feature (1)..(476): Homolog of NCBI NO: 26451262 NR Description: unknown protein [Arabidopsis thaliana]
  misc_feature (1)..(476): Homolog of NCBI NO: 25518691 NR Description: hypothetical protein T24D18.19 - Arabidopsis >gi|6587815|gb|AAF18506.1|AC010924_19 Similar to gb|U44028 thaliana transcription factor CKC and contains a PF|00069
  misc_feature (124)..(569): Homolog of NCBI NO: 15219140 NR Description: WAK-like kinase (WLK); protein id: At1g16150.1
  misc_feature (1)..(200): Homolog of NCBI NO: 15219140 NR Description: WAK-like kinase (WLK); protein id: At1g16150.1
  misc_feature (1)..(569): Homolog of NCBI NO: 15219134 NR Description: WAK-like kinase (WLK); protein id: At1g16130.1
  misc_feature (1)..(569): Homolog of NCBI NO: 15219445 NR Description: WAK-like kinase (WLK); protein id: At1g79670.1, by cDNA: gi_19310446 [Arabidopsis thaliana]
  misc_feature (35)..(569): Homolog of NCBI NO: 30699443 NR Description: WAK-like kinase (WLK) [Arabidopsis thaliana]
MTDTESEILGCESSCEHRKSGEEVTNLICTGYRCCQARLPVGRPQAITVNIENSSGGEETCKVAFLTDKRYSPSNVTEPEQFHNNGYVVLELGWYFATSNSRFKSLLGCTNMSRKGSGFSDDNCSCEYDYFSGMSYRNCYCDYGYTGNPYLRGGCVDTDSCEGNHNCGEDAHCVNMPGPMSMCRPNPKITKPTKPPVLQGILIGLSGLVFFVGLFWLFKLIKKRRNINRSKKFFKRNGGLLLKQQLTTKDGNVEMSKIFSSKELRKATDNFSIDRVLGQGGQGTVYKGMLVDGSIVAVKRSKVVDEDKMEEFINEIVLLSQINHRNIVKLLGCCLETEVPILVYEYIPNGDLFKRLHDESDDYTMTWEVRLRIAIEIAGALTYMHSAASFPIFHRDIKTTNILLDEKYRAKVSDFGTSRSVTLDQTHLTTLVAGTFGYMDPEYFLSSQYTHKSDVYSFGVVLVELITGEKPLSRVRSEEGRGLATHFLEAMKENRVIDIIDIRIKDESKLEQVMAVAKLARKCLNRKGKNRPNMKEVSNELERIRSSPEDLDVRTENEDEEEDQPMAINNKR

SEQ ID NO: 70228 - DNA, 933 bp, Arabidopsis thaliana
  misc_feature (1)..(933): Ceres Seq. ID no. 2182836
  misc_feature: MA Experiment ID: 20000314 Result: Up-regulated in Transcription
  misc_feature: MA Experiment 20000314 PARAMETER Experiment Name: At_14day_Shoots-Roots_Sub_P Parameter: Age (day) Value: 14
  misc_feature: MA Experiment 20000314 PARAMETER Experiment Name: At_14day_Shoots-Roots_Sub_P Parameter: Organism Value: A. thaliana
  misc_feature: MA Experiment 20000314 PARAMETER Experiment Name: At_14day_Shoots-Roots_Sub_P Parameter: Plant Line Value: WS
  misc_feature: MA Experiment 20000314 PARAMETER Experiment Name: At_14day_Shoots-Roots_Sub_P Parameter: Tissue Value: Roots vs. Whole Plant
  misc_feature: MA Experiment ID: 20000352 Result: Down-regulated in Transcription
  misc_feature: MA Experiment 20000352 PARAMETER Experiment Name: At_Drought_Sub_P Parameter: Age (day) Value: 7
  misc_feature: MA Experiment 20000352 PARAMETER Experiment Name: At_Drought_Sub_P Parameter: Organism Value: A. thaliana
  misc_feature: MA Experiment 20000352 PARAMETER Experiment Name: At_Drought_Sub_P Parameter: Plant Line Value: WS
  misc_feature: MA Experiment 20000352 PARAMETER Experiment Name: At_Drought_Sub_P Parameter: Timepoint (hr) Value: 6
  misc_feature: MA Experiment 20000352 PARAMETER Experiment Name: At_Drought_Sub_P Parameter: Tissue Value: Whole Plant
  misc_feature: MA Experiment 20000352 PARAMETER Experiment Name: At_Drought_Sub_P Parameter: Treatment Value: Drought vs. No Drought
atgacggaagagtttgagatcgcaggaatctccaccggagcttggtggagctcgccaacaaacaccgccgcagtattctctggctactcgctgccatgttccactgagattagccctgatgtcacaaatttcggatggcaaaacttcgataacaagattaacgatcataatgatggttgtatgaacatgcataatagtttcttcgaaggactattaatcgatcctaacgatcaattactaccggatccatggtccaaaagtacaattcctaacgctaaatctgagctccttgaaaacttcccattcttagataacatgttcttggtcgattcagaagctgaatctttgttggatcatgaaatcagaaaccataagtcgtctaaggagcaaattacacaagactacaagaatcttacttcaaaggcacgtaacaaacataaaaacctaactatttttgttaggagtgaagaattagaagagaacagcgatgagtattcaccgcgattactaaaaagaccgagactcgagacactatctccattgccaagcttcaaagttcgtaaagaaaaactcggagatagaatcactgcgcttcagcaactggtttctccatttggcaagacagatacagcttctgttctcaacgaagctgtagagtacataaagtttcttcaagaacaagtcactgtattgagtaatccagaacagaacaccataggatctgttcaacaacagcagtgttcaaacaagaaatctatcaatactcaaggagaagtagaagaagacgaatgtagtccaagaagatatgtagatctttcgagccgtggactatgtctaatgccgatctcagcttcatatcccgtggctgcagctgcggcttcggctgcagagatgaacgtacatctggtttctggcatcttccattctttgtaa

SEQ ID NO: 70229 - protein, 310 aa, Arabidopsis thaliana
  peptide (1)..(310): Ceres Seq. ID no. 2182837
  misc_feature (187)..(225): Pfam Name: Helix-loop-helix DNA-binding domain Pfam Description: Helix-loop-helix DNA-binding domain
  misc_feature (1)..(310): Homolog of NCBI NO: 15234636 NR Description: putative protein; protein id: At4g05170.1
  misc_feature (1)..(286): Homolog of NCBI NO: 22328848 NR Description: hypothetical protein; protein id: At4g21340.1, by cDNA: gi_17529153 [Arabidopsis thaliana] unknown protein [Arabidopsis thaliana]
  misc_feature (138)..(289): Homolog of NCBI NO: 18407276 NR Description: expressed protein; protein id: At1g61660.1, by cDNA: 159557., supported by cDNA: gi_14190498 [Arabidopsis >gi|14190499|gb|AAK55730.1|AF380649_1 At1g61660/T13M11_21
  misc_feature (138)..(289): Homolog of NCBI NO: 21553730 NR Description: unknown [Arabidopsis thaliana]
  misc_feature (155)..(288): Homolog of NCBI NO: 15232315 NR Description: hypothetical protein; protein id: At3g20640.1 thaliana] >gi|26451163|dbj|BAC42685.1| putative bHLH
  misc_feature (155)..(288): Homolog of NCBI NO: 9294343 NR Description: gene_id:F3H11.2~unknown protein [Arabidopsis
  misc_feature (138)..(246): Homolog of NCBI NO: 30696595 NR Description: expressed protein [Arabidopsis thaliana]
  misc_feature (171)..(283): Homolog of NCBI NO: 15217667 NR Description: hypothetical protein; protein id: At1g27660.1
  misc_feature (155)..(228): Homolog of NCBI NO: 34910130 NR Description: B1070A12.8 [Oryza sativa (japonica
  misc_feature (138)..(230): Homolog of NCBI NO: 25404333 NR Description: hypothetical protein T13M11.1 [imported] -
MTEEFEIAGISTGAWWSSPTNTAAVFSGYSLPCSTEISPDVTNFGWQNFDNKINDHNDGCMNMHNSFFEGLLIDPNDQLLPDPWSKSTIPNAKSELLENFPFLDNMFLVDSEAESLLDHEIRNHKSSKEQITQDYKNLTSKARNKHKNLTIFVRSEELEENSDEYSPRLLKRPRLETLSPLPSFKVRKEKLGDRITALQQLVSPFGKTDTASVLNEAVEYIKFLQEQVTVLSNPEQNTIGSVQQQQCSNKKSINTQGEVEEDECSPRRYVDLSSRGLCLMPISASYPVAAAAASAAEMNVHLVSGIFHSL

SEQ ID NO: 70230 - protein, 250 aa, Arabidopsis thaliana
  peptide (1)..(250): Ceres Seq. ID no. 2182838
  misc_feature (127)..(165): Pfam Name: Helix-loop-helix DNA-binding domain Pfam Description: Helix-loop-helix DNA-binding domain
  misc_feature (1)..(250): Homolog of NCBI NO: 15234636 NR Description: putative protein; protein id: At4g05170.1
  misc_feature (1)..(226): Homolog of NCBI NO: 22328848 NR Description: hypothetical protein; protein id: At4g21340.1, by cDNA: gi_17529153 [Arabidopsis thaliana] unknown protein [Arabidopsis thaliana]
  misc_feature (78)..(229): Homolog of NCBI NO: 18407276 NR Description: expressed protein; protein id: At1g61660.1, by cDNA: 159557., supported by cDNA: gi_14190498 [Arabidopsis >gi|14190499|gb|AAK55730.1|AF380649_1 At1g61660/T13M11_21
  misc_feature (78)..(229): Homolog of NCBI NO: 21553730 NR Description: unknown [Arabidopsis thaliana]
  misc_feature (95)..(228): Homolog of NCBI NO: 15232315 NR Description: hypothetical protein; protein id: At3g20640.1 thaliana] >gi|26451163|dbj|BAC42685.1| putative bHLH
  misc_feature (95)..(228): Homolog of NCBI NO: 9294343 NR Description: gene_id:F3H11.2~unknown protein [Arabidopsis
  misc_feature (78)..(186): Homolog of NCBI NO: 30696595 NR Description: expressed protein [Arabidopsis thaliana]
  misc_feature (111)..(223): Homolog of NCBI NO: 15217667 NR Description: hypothetical protein; protein id: At1g27660.1
  misc_feature (95)..(168): Homolog of NCBI NO: 34910130 NR Description: B1070A12.8 [Oryza sativa (japonica
  misc_feature (78)..(170): Homolog of NCBI NO: 25404333 NR Description: hypothetical protein T13M11.1 [imported] -
MNMHNSFFEGLLIDPNDQLLPDPWSKSTIPNAKSELLENFPFLDNMFLVDSEAESLLDHEIRNHKSSKEQITQDYKNLTSKARNKHKNLTIFVRSEELEENSDEYSPRLLKRPRLETLSPLPSFKVRKEKLGDRITALQQLVSPFGKTDTASVLNEAVEYIKFLQEQVTVLSNPEQNTIGSVQQQQCSNKKSINTQGEVEEDECSPRRYVDLSSRGLCLMPISASYPVAAAAASAAEMNVHLVSGIFHSL

SEQ ID NO: 70231 - protein, 248 aa, Arabidopsis thaliana
  peptide (1)..(248): Ceres Seq. ID no. 2182839
  misc_feature (125)..(163): Pfam Name: Helix-loop-helix DNA-binding domain Pfam Description: Helix-loop-helix DNA-binding domain
  misc_feature (1)..(248): Homolog of NCBI NO: 15234636 NR Description: putative protein; protein id: At4g05170.1
  misc_feature (1)..(224): Homolog of NCBI NO: 22328848 NR Description: hypothetical protein; protein id: At4g21340.1, by cDNA: gi_17529153 [Arabidopsis thaliana] unknown protein [Arabidopsis thaliana]
  misc_feature (76)..(227): Homolog of NCBI NO: 18407276 NR Description: expressed protein; protein id: At1g61660.1, by cDNA: 159557., supported by cDNA: gi_14190498 [Arabidopsis >gi|14190499|gb|AAK55730.1|AF380649_1 At1g61660/T13M11_21
  misc_feature (76)..(227): Homolog of NCBI NO: 21553730 NR Description: unknown [Arabidopsis thaliana]
  misc_feature (93)..(226): Homolog of NCBI NO: 15232315 NR Description: hypothetical protein; protein id: At3g20640.1 thaliana] >gi|26451163|dbj|BAC42685.1| putative bHLH
  misc_feature (93)..(226): Homolog of NCBI NO: 9294343 NR Description: gene_id:F3H11.2~unknown protein [Arabidopsis
  misc_feature (76)..(184): Homolog of NCBI NO: 30696595 NR Description: expressed protein [Arabidopsis thaliana]
  misc_feature (109)..(221): Homolog of NCBI NO: 15217667 NR Description: hypothetical protein; protein id: At1g27660.1
  misc_feature (93)..(166): Homolog of NCBI NO: 34910130 NR Description: B1070A12.8 [Oryza sativa (japonica
  misc_feature (76)..(168): Homolog of NCBI NO: 25404333 NR Description: hypothetical protein T13M11.1 [imported] -
MHNSFFEGLLIDPNDQLLPDPWSKSTIPNAKSELLENFPFLDNMFLVDSEAESLLDHEIRNHKSSKEQITQDYKNLTSKARNKHKNLTIFVRSEELEENSDEYSPRLLKRPRLETLSPLPSFKVRKEKLGDRITALQQLVSPFGKTDTASVLNEAVEYIKFLQEQVTVLSNPEQNTIGSVQQQQCSNKKSINTQGEVEEDECSPRRYVDLSSRGLCLMPISASYPVAAAAASAAEMNVHLVSGIFHSL

SEQ ID NO: 70232 - DNA, 690 bp, Arabidopsis thaliana
  misc_feature (1)..(690): Ceres Seq. ID no. 2183288
  misc_feature: MA Experiment ID: 20000306 Result: Down-regulated in Transcription
  misc_feature: MA Experiment 20000306 PARAMETER Experiment Name: At_Germinating_Seeds_Sub_P Parameter: Age (hr) Value: 6 vs. 0
  misc_feature: MA Experiment 20000306 PARAMETER Experiment Name: At_Germinating_Seeds_Sub_P Parameter: Organism Value: A. thaliana
  misc_feature: MA Experiment 20000306 PARAMETER Experiment Name: At_Germinating_Seeds_Sub_P Parameter: Plant Line Value: WS
  misc_feature: MA Experiment 20000306 PARAMETER Experiment Name: At_Germinating_Seeds_Sub_P Parameter: Tissue Value: Germinating Seeds
  misc_feature: MA Experiment ID: 20000307 Result: Down-regulated in Transcription
  misc_feature: MA Experiment 20000307 PARAMETER Experiment Name: At_Germinating_Seeds_Sub_P Parameter: Age (hr) Value: 24 vs. 0
  misc_feature: MA Experiment 20000307 PARAMETER Experiment Name: At_Germinating_Seeds_Sub_P Parameter: Organism Value: A. thaliana
  misc_feature: MA Experiment 20000307 PARAMETER Experiment Name: At_Germinating_Seeds_Sub_P Parameter: Plant Line Value: WS
  misc_feature: MA Experiment 20000307 PARAMETER Experiment Name: At_Germinating_Seeds_Sub_P Parameter: Tissue Value: Germinating Seeds
  misc_feature: MA Experiment ID: 20000315 Result: Down-regulated in Transcription
  misc_feature: MA Experiment 20000315 PARAMETER Experiment Name: At_14day_Shoots-Roots_Sub_P Parameter: Age (day) Value: 14
  misc_feature: MA Experiment 20000315 PARAMETER Experiment Name: At_14day_Shoots-Roots_Sub_P Parameter: Organism Value: A. thaliana
  misc_feature: MA Experiment 20000315 PARAMETER Experiment Name: At_14day_Shoots-Roots_Sub_P Parameter: Plant Line Value: WS
  misc_feature: MA Experiment 20000315 PARAMETER Experiment Name: At_14day_Shoots-Roots_Sub_P Parameter: Tissue Value: Shoots vs. Whole Plant
  misc_feature: MA Experiment ID: 20000327 Result: Up-regulated in Transcription
  misc_feature: MA Experiment 20000327 PARAMETER Experiment Name: At_42deg_Heat_Sub_P Parameter: Age (day) Value: 14
  misc_feature: MA Experiment 20000327 PARAMETER Experiment Name: At_42deg_Heat_Sub_P Parameter: Organism Value: A. thaliana
  misc_feature: MA Experiment 20000327 PARAMETER Experiment Name: At_42deg_Heat_Sub_P Parameter: Plant Line Value: WS
  misc_feature: MA Experiment 20000327 PARAMETER Experiment Name: At_42deg_Heat_Sub_P Parameter: Temperature (deg C) Value: 42 vs. 22
  misc_feature: MA Experiment 20000327 PARAMETER Experiment Name: At_42deg_Heat_Sub_P Parameter: Timepoint (hr) Value: 1
  misc_feature: MA Experiment 20000327 PARAMETER Experiment Name: At_42deg_Heat_Sub_P Parameter: Tissue Value: Aerial
  misc_feature: MA Experiment ID: 20000355 Result: Down-regulated in Transcription
  misc_feature: MA Experiment 20000355 PARAMETER Experiment Name: At_Siliques_Sub_P Parameter: Age (day) Value: 21
  misc_feature: MA Experiment 20000355 PARAMETER Experiment Name: At_Siliques_Sub_P Parameter: Organism Value: A. thaliana
  misc_feature: MA Experiment 20000355 PARAMETER Experiment Name: At_Siliques_Sub_P Parameter: Plant Line Value: WS
  misc_feature: MA Experiment 20000355 PARAMETER Experiment Name: At_Siliques_Sub_P Parameter: Tissue Value: Less Than 5mm Siliques vs. Whole Plant
  misc_feature: MA Experiment ID: 20000440 Result: Down-regulated in Transcription
  misc_feature: MA Experiment 20000440 PARAMETER Experiment Name: At_Closed-Flower__Sub_P Parameter: Tissue Value: Closed Flower vs. Whole Plant
  misc_feature: Pfam Name: GST_C Pfam Description: Glutathione S-transferase, C-terminal domain
atggctcaaaatggttcgaatactactgtgaagctgatagggacatgggcaagcccattcgctataagggctcaagtggctctacacctcaagtcagtagagcacgagtatgtcgaagaaaccgatgttctgaaaggaaagagcgatcttcttattaaatccaaccctatacacaagaaagtccctgtcctcatccatggtgatgtatcaatctgtgaatctctcaacatcgtccaatacgtcgatgaatcttggccgtctgatctttccatcctcccaacacttccctcggaacgtgcctttgcccgtttttgggctcacttcgttgacggaaagttgtttgaatcgatcgatgcggtggcgggagcaaaagacgacgccgccaggatgacattggcggggaatctgatggagaatctagcggcacttgaagaggcgtttcaaaagagtagcaaaggcggggacttttttggaggggggaacattgggtttgtcgatataactgttggggccatagtaggtccaatctctgtcattgaagctttttcaggtgttaagtttttgcgtccagacacaacaccgggcctgattcagtgggctgagaaatttagggcccatgaagctgtaaaaccttacatgcctaccgttgccgagttcatcgagtttgccaaaaagaaattcagtgtttag

SEQ ID NO: 70233 - protein, 229 aa, Arabidopsis thaliana
  peptide (1)..(229): Ceres Seq. ID no. 2183289
  misc_feature: Pfam Name: GST_C Pfam Description: Glutathione S-transferase, C-terminal domain
  misc_feature (1)..(229): Homolog of NCBI NO: 15222497 NR Description: glutathione transferase, putative; protein id: [Arabidopsis thaliana] >gi|25313218|pir||F96721 probable
  misc_feature (1)..(229): Homolog of NCBI NO: 38454100 NR Description: At1g69920 [Arabidopsis thaliana]
  misc_feature (1)..(229): Homolog of NCBI NO: 15223432 NR Description: glutathione transferase, putative; protein id: supported by cDNA: 2985., supported by cDNA: gi_11096019, by cDNA: gi_14994260, supported by cDNA: gi_15215629, supported
  misc_feature (1)..(229): Homolog of NCBI NO: 25403291 NR Description: protein T7N9.20 [imported] - Arabidopsis thaliana
  misc_feature (9)..(229): Homolog of NCBI NO: 21592561 NR Description: glutathione transferase, putative [Arabidopsis
  misc_feature (1)..(226): Homolog of NCBI NO: 15223440 NR Description: glutathione transferase, putative; protein id:
  misc_feature (114)..(226): Homolog of NCBI NO: 25403291 NR Description: protein T7N9.20 [imported] - Arabidopsis thaliana
  misc_feature (9)..(112): Homolog of NCBI NO: 25403291 NR Description: protein T7N9.20 [imported] - Arabidopsis thaliana
  misc_feature (1)..(228): Homolog of NCBI NO: 15222499 NR Description: glutathione transferase, putative; protein id: [Arabidopsis thaliana] >gi|25313220|pir||G96721 probable
  misc_feature (6)..(224): Homolog of NCBI NO: 6856103 NR Description: glutathione S-transferase [Gossypium hirsutum]
MAQNGSNTTVKLIGTWASPFAIRAQVALHLKSVEHEYVEETDVLKGKSDLLIKSNPIHKKVPVLIHGDVSICESLNIVQYVDESWPSDLSILPTLPSERAFARFWAHFVDGKLFESIDAVAGAKDDAARMTLAGNLMENLAALEEAFQKSSKGGDFFGGGNIGFVDITVGAIVGPISVIEAFSGVKFLRPDTTPGLIQWAEKFRAHEAVKPYMPTVAEFIEFAKKKFSV

SEQ ID NO: 70234 - DNA, 1878 bp, Arabidopsis thaliana
  misc_feature (1)..(1878): Ceres Seq. ID no. 2183293
  misc_feature: MA Experiment ID: 20000171 Result: Up-regulated in Transcription
  misc_feature: MA Experiment 20000171 PARAMETER Experiment Name: At_42deg_Heat_P Parameter: Age (day) Value: 14
  misc_feature: MA Experiment 20000171 PARAMETER Experiment Name: At_42deg_Heat_P Parameter: Organism Value: A. thaliana
  misc_feature: MA Experiment 20000171 PARAMETER Experiment Name: At_42deg_Heat_P Parameter: Plant Line Value: WS
  misc_feature: MA Experiment 20000171 PARAMETER Experiment Name: At_42deg_Heat_P Parameter: Temperature (deg C) Value: 42 vs. 22
  misc_feature: MA Experiment 20000171 PARAMETER Experiment Name: At_42deg_Heat_P Parameter: Timepoint (hr) Value: 1
  misc_feature: MA Experiment 20000171 PARAMETER Experiment Name: At_42deg_Heat_P Parameter: Tissue Value: Aerial
  misc_feature: MA Experiment ID: 20000439 Result: Down-regulated in Transcription
  misc_feature: MA Experiment 20000439 PARAMETER Experiment Name: At_Roots__P Parameter: Age (day) Value: 14 vs. 21
  misc_feature: MA Experiment 20000439 PARAMETER Experiment Name: At_Roots__P Parameter: Organism Value: A. thaliana
  misc_feature: MA Experiment 20000439 PARAMETER Experiment Name: At_Roots__P Parameter: Tissue Value: Roots vs. Whole Plant
  misc_feature: MA Experiment ID: 20000495 Result: Up-regulated in Transcription
  misc_feature: MA Experiment 20000495 PARAMETER Experiment Name: At_Guard_Cells_P Parameter: Harvest Date Value: 8/2/2002
  misc_feature: MA Experiment 20000495 PARAMETER Experiment Name: At_Guard_Cells_P Parameter: Organism Value: A. thaliana
  misc_feature: MA Experiment 20000495 PARAMETER Experiment Name: At_Guard_Cells_P Parameter: Tissue Value: Guard Cells vs. Leaves
  misc_feature: MA Experiment ID: 20000794 Result: Down-regulated in Transcription
  misc_feature: MA Experiment 20000794 PARAMETER Experiment Name: At_Petals_P Parameter: Age (day) Value: 23-25 days
  misc_feature: MA Experiment 20000794 PARAMETER Experiment Name: At_Petals_P Parameter: Plant Line Value: WS
  misc_feature: MA Experiment 20000794 PARAMETER Experiment Name: At_Petals_P Parameter: Tissue Value: Petals vs. Whole plant
  misc_feature: Pfam Name: Pkinase Pfam Description: Protein kinase domain
atgtctcaaccaccgtggagatgtttctctctactcatctttgttctcaccatttttagtactaaaccttcctctgcatctacttcatgttcttcttcatttcattgcccaccgttcaactcctcaccaccgtaccctttctcagcttctccgggatgtggccacccaaacttccagatccaatgctcatcttcacgcgccaccatcacaatcaaaaacctcactttctctatcctccattactcatcaatctcctcttctctaaccctctctcccattacaaacactaaccggaacacaaacaactgttcttctctccggttctcctcctcaccaaaccggttcatcgacttaaccggttcacctttcagagtctctgactcttcttgctctcgtctctctcttctccgtccttgctctccttttactctccccaactgttctcgttgtccttgggactgtaaactcctaaagaatccgggtcggatcctccacggttgtgaatcaacccacgggtcgttatctgaacaaggctgtcaaggagatcttcttggttttcttcaagatttcttcactagatttggatttgaagttgaatgggacgaatctcaagatccatacttcattaaatgcagagattgtcaaatcaagaatggtgtttgcgggtttaattcgacccacccgaatcaagatttcatctgtttccacaaatcaagatccgaattagtaactcaaagagataacaacaaaagagtcaatcatattgctgtgttgtctcttatcttcgctttgacttgtctcttacttgttttctccgtcgccgtagcgattttccgatcacgaagagctagctttttatcctcaatcaatgaagaagacccggctgctctgttcctccgtcaccaccgctccgccgctcttctcccaccagtcttcaccttcgaagaactcgaatccgccacaaacaaattcgaccccaagcgaaaaatcggagacggtggtttcggttctgtttacttaggccaactcagcgacggacaactcctcgccgttaaattcctccaccatcaccacgctttctcaatgaagtctttttgcaatgagattttgatcctttcttcaatcaaccatcctaacctcgtcaagctccatggctattgctctgacccgagaggacttcttcttgttcacgattacgtcactaacggtactctcgctgatcatcttcacggcaggggaccgaagatgacgtggcgtgtaaggttagatattgcgttgcaaacggctttagctatggagtatcttcacttcgatattgttcctccggttgttcatagagatataacttcgtcgaatatctttgtggagaaggatatgaaaatcaaagtcggagactttggtctctctaggctcttggtgttttcagagacgactgtgaattcagctacttcgtctgattacgtttgtaccggaccacaaggtacgcccggttatttagacccggattatcaccggtcttttcggttaacggagaaaagtgacgtgtatagctacggtgtcgttttgatggagttgattacgggtatgaaagcggttgatcaacgacgtgagaagagggacatggctttagcggatcttgttgtatccaagattcaaatgggtcttttggatcaggtgattgaccccttgcttgcgttagacggcgatgatgtggctgcggtgagtgacggattcggtgttgcggcggttgctgagctggcgttccggtgtgttgcgacggataaggatgatcgtccggatgctaaagagattgttcaggagttgaggaggattaggagccatacacgtgtagcggatgatgacgtggcgaaaaattga

SEQ ID NO: 70235 - protein, 625 aa, Arabidopsis thaliana
  peptide (1)..(625): Ceres Seq. ID no. 2183294
  misc_feature: Pfam Name: Pkinase Pfam Description: Protein kinase domain
  misc_feature (194)..(612): Homolog of NCBI NO: 25404646 NR Description: probable wall-associated kinase T4O24.5
  misc_feature (5)..(226): Homolog of NCBI NO: 25404646 NR Description: probable wall-associated kinase T4O24.5
  misc_feature (363)..(612): Homolog of NCBI NO: 29150383 NR Description: putative protein kinase [Oryza sativa (japonica
  misc_feature (194)..(612): Homolog of NCBI NO: 12597754 NR Description: protein kinase, putative [Arabidopsis thaliana]
  misc_feature (29)..(226): Homolog of NCBI NO: 12597754 NR Description: protein kinase, putative [Arabidopsis thaliana]
  misc_feature (20)..(622): Homolog of NCBI NO: 25402857 NR Description: protein F15H18.11 [imported] - Arabidopsis >gi|6714300|gb|AAF25996.1|AC013354_15 F15H18.11 [Arabidopsis
  misc_feature (311)..(612): Homolog of NCBI NO: 30697422 NR Description: serine/threonine protein kinase family
  misc_feature (29)..(226): Homolog of NCBI NO: 30697422 NR Description: serine/threonine protein kinase family
  misc_feature (24)..(617): Homolog of NCBI NO: 15408730 NR Description: P0443D08.12 [Oryza sativa (japonica
  misc_feature (122)..(612): Homolog of NCBI NO: 34911340 NR Description: P0034C09.1 [Oryza sativa (japonica
MSQPPWRCFSLLIFVLTIFSTKPSSASTSCSSSFHCPPFNSSPPYPFSASPGCGHPNFQIQCSSSRATITIKNLTFSILHYSSISSSLTLSPITNTNRNTNNCSSLRFSSSPNRFIDLTGSPFRVSDSSCSRLSLLRPCSPFTLPNCSRCPWDCKLLKNPGRILHGCESTHGSLSEQGCQGDLLGFLQDFFTRFGFEVEWDESQDPYFIKCRDCQIKNGVCGFNSTHPNQDFICFHKSRSELVTQRDNNKRVNHIAVLSLIFALTCLLLVFSVAVAIFRSRRASFLSSINEEDPAALFLRHHRSAALLPPVFTFEELESATNKFDPKRKIGDGGFGSVYLGQLSDGQLLAVKFLHHHHAFSMKSFCNEILILSSINHPNLVKLHGYCSDPRGLLLVHDYVTNGTLADHLHGRGPKMTWRVRLDIALQTALAMEYLHFDIVPPVVHRDITSSNIFVEKDMKIKVGDFGLSRLLVFSETTVNSATSSDYVCTGPQGTPGYLDPDYHRSFRLTEKSDVYSYGVVLMELITGMKAVDQRREKRDMALADLVVSKIQMGLLDQVIDPLLALDGDDVAAVSDGFGVAAVAELAFRCVATDKDDRPDAKEIVQELRRIRSHTRVADDDVAKN

SEQ ID NO: 70236 - DNA, 1668 bp, Arabidopsis thaliana
  misc_feature (1)..(1668): Ceres Seq. ID no. 2183315
atggacaatgagaaagggacaagttcctcggatttaacgacgagacaaaggaagcctcttggttggaaagcgatgccttatatcatagggaatgaaacattggagaggcttgccacattcggtttgatggcgaatttcatggtgtatatggtaagagagtatcatatggaccaagttcaagctgtcactcttatcaacacttggtctgctctcaccaactttgctcctatcatcggagctttcatctccgactcctacaccggaaaatttaataccattgtcttcggttccatcgctgagttgttgggcatgttggtgttgactttcacgtctctggtccctaatctacgaccaccaccttgcactgccgaccaaatcactggacaatgtattccctatagctattcgcagttatacgttttactctcaggacttttcttgttatcagttggaacaggtggaatccggtcatgcagtgttcctttcagtctcgatcagttcgatgattcgactgaagaaggaagagaaggaagtagaagcttctttagctggtactataccactcatacaatcgtccagttagtttcaatgacactagtgttgtacgtacagaacaacatcagttggggcattggattcgcaatcccgaccgttctcaatttttttgcgcttcttctgctttttgtgggtactcggtattatgtctttgtcaaacccgaaggaagtgtcttctctggagttttcaaggttcttgtggctgcttataagaaacgcaaggcacggtttacttctggaattgactaccatcaacccttactagagacagatttacaatcaaataaactcgtactcactgatcaattcagattcttgaacaaagctgtgatagtgatgaacaatgatgaagctggaaatgaggagtggagaacctgcacagtgagacagatagaggacatcaagtcaataatcagtattattccaatatttgcttcgagcattattggatttttggctatgaaccaacaacagacgtttacagtctcacaagcactaaaaatggacctccaatttccaggcacttcttacctaatccctcctgcttctataaccgtcatatcattattaaacataggtatatggcttcccttctatgaaaccgttttggtccgacacatcgaaaacattacaaaacaaaacggaggtatctcgttactacaaaaagtcggcattgggaatattttctccatctcgacgatgctcatatccggtattgtggagcgaaagagaagagatttatcgcttaatggagtaaaaatgtcggttttctggctaaccccgcaacaagtactaatgggattttatcaagtcttcacgattgttggtctcaccgagttcttcaacaaacaagttccaatcaacatgagaagcattgggaactcgttgctttacttaggtttgtctctagccagttatctaagcagtgccatggtgagcattgttcatagtgtgactgctcgtggaggacagagttggctaacggatgatattgacaaaagcaagttggattgtttctattactttattgccgctttaagcactcttaatttcatcttcttcttctggtgtgctcgaaggtatcgttacagaaactatagtaatgaacaataa

SEQ ID NO: 70237 - protein, 555 aa, Arabidopsis thaliana
  peptide (1)..(555): Ceres Seq. ID no. 2183316
  misc_feature (90)..(486): Pfam Name: POT family Pfam Description: POT family
  misc_feature (1)..(555): Homolog of NCBI NO: 15222484 NR Description: putative peptide transporter; protein id: [Arabidopsis thaliana] >gi|25404845|pir||H96720 probable peptide
  misc_feature (16)..(549): Homolog of NCBI NO: 18409391 NR Description: putative peptide transporter; protein id: supported by cDNA: 22243., supported by cDNA: gi_19699103 thaliana] >gi|19699104|gb|AAL90918.1| At1g69870/T17F3_10
  misc_feature (89)..(549): Homolog of NCBI NO: 25404847 NR Description: probable peptide transporter T17F3.10 [imported] Arabidopsis thaliana >gi|12325237|gb|AAG52567.1|AC010675_15
  misc_feature (16)..(102): Homolog of NCBI NO: 25404847 NR Description: probable peptide transporter T17F3.10 [imported] Arabidopsis thaliana >gi|12325237|gb|AAG52567.1|AC010675_15
  misc_feature (28)..(549): Homolog of NCBI NO: 25403285 NR Description: protein T7N9.14 [imported] - Arabidopsis thaliana
  misc_feature (32)..(549): Homolog of NCBI NO: 34906908 NR Description: putative peptide transporter [Oryza sativa
  misc_feature (56)..(549): Homolog of NCBI NO: 15223425 NR Description: peptide transporter, putative; protein id:
MDNEKGTSSSDLTTRQRKPLGWKAMPYIIGNETLERLATFGLMANFMVYMVREYHMDQVQAVTLINTWSALTNFAPIIGAFISDSYTGKFNTIVFGSIAELLGMLVLTFTSLVPNLRPPPCTADQITGQCIPYSYSQLYVLLSGLFLLSVGTGGIRSCSVPFSLDQFDDSTEEGREGSRSFFSWYYTTHTIVQLVSMTLVLYVQNNISWGIGFAIPTVLNFFALLLLFVGTRYYVFVKPEGSVFSGVFKVLVAAYKKRKARFTSGIDYHQPLLETDLQSNKLVLTDQFRFLNKAVIVMNNDEAGNEEWRTCTVRQIEDIKSIISIIPIFASSIIGFLAMNQQQTFTVSQALKMDLQFPGTSYLIPPASITVISLLNIGIWLPFYETVLVRHIENITKQNGGISLLQKVGIGNIFSISTMLISGIVERKRRDLSLNGVKMSVFWLTPQQVLMGFYQVFTIVGLTEFFNKQVPINMRSIGNSLLYLGLSLASYLSSAMVSIVHSVTARGGQSWLTDDIDKSKLDCFYYFIAALSTLNFIFFFWCARRYRYRNYSNEQ

SEQ ID NO: 70238 - protein, 531 aa, Arabidopsis thaliana
  peptide (1)..(531): Ceres Seq. ID no. 2183317
  misc_feature (66)..(462): Pfam Name: POT family Pfam Description: POT family
  misc_feature (1)..(531): Homolog of NCBI NO: 15222484 NR Description: putative peptide transporter; protein id: [Arabidopsis thaliana] >gi|25404845|pir||H96720 probable peptide
  misc_feature (1)..(525): Homolog of NCBI NO: 18409391 NR Description: putative peptide transporter; protein id: supported by cDNA: 22243., supported by cDNA: gi_19699103 thaliana] >gi|19699104|gb|AAL90918.1| At1g69870/T17F3_10
  misc_feature (65)..(525): Homolog of NCBI NO: 25404847 NR Description: probable peptide transporter T17F3.10 [imported] Arabidopsis thaliana >gi|12325237|gb|AAG52567.1|AC010675_15
  misc_feature (1)..(78): Homolog of NCBI NO: 25404847 NR Description: probable peptide transporter T17F3.10 [imported] Arabidopsis thaliana >gi|12325237|gb|AAG52567.1|AC010675_15
  misc_feature (4)..(525): Homolog of NCBI NO: 25403285 NR Description: protein T7N9.14 [imported] - Arabidopsis thaliana
  misc_feature (8)..(525): Homolog of NCBI NO: 34906908 NR Description: putative peptide transporter [Oryza sativa
  misc_feature (32)..(525): Homolog of NCBI NO: 15223425 NR Description: peptide transporter, putative; protein id:
MPYIIGNETLERLATFGLMANFMVYMVREYHMDQVQAVTLINTWSALTNFAPIIGAFISDSYTGKFNTIVFGSIAELLGMLVLTFTSLVPNLRPPPCTADQITGQCIPYSYSQLYVLLSGLFLLSVGTGGIRSCSVPFSLDQFDDSTEEGREGSRSFFSWYYTTHTIVQLVSMTLVLYVQNNISWGIGFAIPTVLNFFALLLLFVGTRYYVFVKPEGSVFSGVFKVLVAAYKKRKARFTSGIDYHQPLLETDLQSNKLVLTDQFRFLNKAVIVMNNDEAGNEEWRTCTVRQIEDIKSIISIIPIFASSIIGFLAMNQQQTFTVSQALKMDLQFPGTSYLIPPASITVISLLNIGIWLPFYETVLVRHIENITKQNGGISLLQKVGIGNIFSISTMLISGIVERKRRDLSLNGVKMSVFWLTPQQVLMGFYQVFTIVGLTEFFNKQVPINMRSIGNSLLYLGLSLASYLSSAMVSIVHSVTARGGQSWLTDDIDKSKLDCFYYFIAALSTLNFIFFFWCARRYRYRNYSNEQ

SEQ ID NO: 70239 - protein, 513 aa, Arabidopsis thaliana
  peptide (1)..(513): Ceres Seq. ID no. 2183318
  misc_feature (48)..(444): Pfam Name: POT family Pfam Description: POT family
  misc_feature (1)..(513): Homolog of NCBI NO: 15222484 NR Description: putative peptide transporter; protein id: [Arabidopsis thaliana] >gi|25404845|pir||H96720 probable peptide
  misc_feature (1)..(507): Homolog of NCBI NO: 18409391 NR Description: putative peptide transporter; protein id: supported by cDNA: 22243., supported by cDNA: gi_19699103 thaliana] >gi|19699104|gb|AAL90918.1| At1g69870/T17F3_10
  misc_feature (47)..(507): Homolog of NCBI NO: 25404847 NR Description: probable peptide transporter T17F3.10 [imported] Arabidopsis thaliana >gi|12325237|gb|AAG52567.1|AC010675_15
  misc_feature (1)..(60): Homolog of NCBI NO: 25404847 NR Description: probable peptide transporter T17F3.10 [imported] Arabidopsis thaliana >gi|12325237|gb|AAG52567.1|AC010675_15
  misc_feature (1)..(507): Homolog of NCBI NO: 25403285 NR Description: protein T7N9.14 [imported] - Arabidopsis thaliana
  misc_feature (1)..(507): Homolog of NCBI NO: 34906908 NR Description: putative peptide transporter [Oryza sativa
  misc_feature (14)..(507): Homolog of NCBI NO: 15223425 NR Description: peptide transporter, putative; protein id:
MANFMVYMVREYHMDQVQAVTLINTWSALTNFAPIIGAFISDSYTGKFNTIVFGSIAELLGMLVLTFTSLVPNLRPPPCTADQITGQCIPYSYSQLYVLLSGLFLLSVGTGGIRSCSVPFSLDQFDDSTEEGREGSRSFFSWYYTTHTIVQLVSMTLVLYVQNNISWGIGFAIPTVLNFFALLLLFVGTRYYVFVKPEGSVFSGVFKVLVAAYKKRKARFTSGIDYHQPLLETDLQSNKLVLTDQFRFLNKAVIVMNNDEAGNEEWRTCTVRQIEDIKSIISIIPIFASSIIGFLAMNQQQTFTVSQALKMDLQFPGTSYLIPPASITVISLLNIGIWLPFYETVLVRHIENITKQNGGISLLQKVGIGNIFSISTMLISGIVERKRRDLSLNGVKMSVFWLTPQQVLMGFYQVFTIVGLTEFFNKQVPINMRSIGNSLLYLGLSLASYLSSAMVSIVHSVTARGGQSWLTDDIDKSKLDCFYYFIAALSTLNFIFFFWCARRYRYRNYSNEQ

SEQ ID NO: 70240 - DNA, 1740 bp, Arabidopsis thaliana
  misc_feature (1)..(1740): Ceres Seq. ID no. 2184283
  misc_feature: MA Experiment ID: 20000306 Result: Up-regulated in Transcription
  misc_feature: MA Experiment 20000306 PARAMETER Experiment Name: At_Germinating_Seeds_Sub_P Parameter: Age (hr) Value: 6 vs. 0
  misc_feature: MA Experiment 20000306 PARAMETER Experiment Name: At_Germinating_Seeds_Sub_P Parameter: Organism Value: A. thaliana
  misc_feature: MA Experiment 20000306 PARAMETER Experiment Name: At_Germinating_Seeds_Sub_P Parameter: Plant Line Value: WS
  misc_feature: MA Experiment 20000306 PARAMETER Experiment Name: At_Germinating_Seeds_Sub_P Parameter: Tissue Value: Germinating Seeds
  misc_feature: MA Experiment ID: 20000307 Result: Up-regulated in Transcription
  misc_feature: MA Experiment 20000307 PARAMETER Experiment Name: At_Germinating_Seeds_Sub_P Parameter: Age (hr) Value: 24 vs. 0
  misc_feature: MA Experiment 20000307 PARAMETER Experiment Name: At_Germinating_Seeds_Sub_P Parameter: Organism Value: A. thaliana
  misc_feature: MA Experiment 20000307 PARAMETER Experiment Name: At_Germinating_Seeds_Sub_P Parameter: Plant Line Value: WS
  misc_feature: MA Experiment 20000307 PARAMETER Experiment Name: At_Germinating_Seeds_Sub_P Parameter: Tissue Value: Germinating Seeds
  misc_feature: MA Experiment ID: 20000314 Result: Up-regulated in Transcription
  misc_feature: MA Experiment 20000314 PARAMETER Experiment Name: At_14day_Shoots-Roots_Sub_P Parameter: Age (day) Value: 14
  misc_feature: MA Experiment 20000314 PARAMETER Experiment Name: At_14day_Shoots-Roots_Sub_P Parameter: Organism Value: A. thaliana
  misc_feature: MA Experiment 20000314 PARAMETER Experiment Name: At_14day_Shoots-Roots_Sub_P Parameter: Plant Line Value: WS
  misc_feature: MA Experiment 20000314 PARAMETER Experiment Name: At_14day_Shoots-Roots_Sub_P Parameter: Tissue Value: Roots vs. Whole Plant
  misc_feature: MA Experiment ID: 20000328 Result: Down-regulated in Transcription
  misc_feature: MA Experiment 20000328 PARAMETER Experiment Name: At_42deg_Heat_Sub_P Parameter: Age (day) Value: 14
  misc_feature: MA Experiment 20000328 PARAMETER Experiment Name: At_42deg_Heat_Sub_P Parameter: Organism Value: A. thaliana
  misc_feature: MA Experiment 20000328 PARAMETER Experiment Name: At_42deg_Heat_Sub_P Parameter: Plant Line Value: WS
  misc_feature: MA Experiment 20000328 PARAMETER Experiment Name: At_42deg_Heat_Sub_P Parameter: Temperature (deg C) Value: 42 vs. 22
  misc_feature: MA Experiment 20000328 PARAMETER Experiment Name: At_42deg_Heat_Sub_P Parameter: Timepoint (hr) Value: 6
  misc_feature: MA Experiment 20000328 PARAMETER Experiment Name: At_42deg_Heat_Sub_P Parameter: Tissue Value: Aerial
  misc_feature: MA Experiment ID: 20000329 Result: Down-regulated in Transcription
  misc_feature: MA Experiment 20000329 PARAMETER Experiment Name: At_4deg_Cold_Sub_P Parameter: Age (day) Value: 14
  misc_feature: MA Experiment 20000329 PARAMETER Experiment Name: At_4deg_Cold_Sub_P Parameter: Organism Value: A. thaliana
  misc_feature: MA Experiment 20000329 PARAMETER Experiment Name: At_4deg_Cold_Sub_P Parameter: Plant Line Value: WS
  misc_feature: MA Experiment 20000329 PARAMETER Experiment Name: At_4deg_Cold_Sub_P Parameter: Temperature (deg C) Value: 4 vs. 22
  misc_feature: MA Experiment 20000329 PARAMETER Experiment Name: At_4deg_Cold_Sub_P Parameter: Timepoint (hr) Value: 6
  misc_feature: MA Experiment 20000329 PARAMETER Experiment Name: At_4deg_Cold_Sub_P Parameter: Tissue Value: Aerial
  misc_feature: MA Experiment ID: 20000440 Result: Up-regulated in Transcription
  misc_feature: MA Experiment 20000440 PARAMETER Experiment Name: At_Closed-Flower__Sub_P Parameter: Tissue Value: Closed Flower vs. Whole Plant
atggagaagcgagtcaaatacaagagctttgtgaaggatccaggaactcttggatccctcgaattaagtgaagtgatgctgctctttgtcccaaatgatcctaaatcagatttgaagcttaaagttcagactcacaacatcaaaagtcagaaatataccaaagaaggatcaaataaacctccttggctcaatctgaccagcaagcagggaaggagtcatatctttgagtttgaaaattatcctgacatgcatgcttgtcgtgatttcatcactaaggcccttgctaaatgtgaagaggagcctaataaactagttgtcttgacacctgctgaacaacttagtatggcagaatttgagctacgcttcaagcttcttcgagaaaatagtgagttgcagaaattgcataagcaatttgtggaaagtaaagtcctgacggaagacgaattctggtctacgaggaagaaattacttggtaaagattccattagaaagtcaaaacaacagatggggctcaaaagcatgatggtttcaggcatcaaaccgtctactgatggccggactaatagggtgacgtttaacttaacgtctgagataatttttcagatttttgctgagaagccggctgttcgccaggcattcataaattatgttccgaaaaagatgacagaaaaggacttttggacaaaatattttagagcagaatatctttacagcacaaaaaatacagcagtagctgcagcagaagctgctgaggatgaggaactcgctgtctttctgaagcctgacgagatattggctcaggaagctcgtcaaaagatgagacgggttgatccaactcttgacatggacgctgacgagggagatgactacacccatcttatggaccacgggatccagcgcgatggcaccaatgacattattgaaccacagaatgaccagcttaagaggtcacttttacaagatcttaatcgtcatgctgctgttgtattggaaggaagatgcatcaatgttcagtctgaagatacgagaattgttgcagaggctctcacacgggcgaaacaagtaagcaaagctgatggtgaaatcaccaaggacgctaatcaggagaggttggagagaatgtcccgtgcaacagaaatggaggatcttcaagcaccacaaaacttcccattagcaccactctctatcaaggaccctcgtgattactttgaatctcaacaaggaaacatcctcagtgaacccagaggagcaaaggcgtcaaaaagaaatgtccatgaagcttatggattactaaaagaatccattttggtgattagaatgacgggattaagtgatccgttgattaaacctgaagtttcctttgaggttttcagttcgttgacccgaactatctcaactgccaaaaatattctcgggaagaacccgcaagagagctttctggacagattaccaaagtccactaaggatgaagttatacatcactggacatcaatacaagaattagtgagacatttttggtcatcttacccaataacaacgacatatcttagtaccaaggttggtaaactgaaggatgcaatgtccaatacttattcactactcgatgcaatgaaacagtcggtgcagtctgatctccggcatcaagtttccttactagttcgtccaatgcaacaggctcttgatgctgcgttccaacactacgaatcggacttgcagagaagaaccgctaagattacatag

SEQ ID NO: 70241 - protein, 579 aa, Arabidopsis thaliana
  peptide (1)..(579): Ceres Seq. ID no. 2184284
  misc_feature (188)..(234): Pfam Name: BSD domain Pfam Description: BSD domain
  misc_feature (26)..(579): Homolog of NCBI NO: 15233107 NR Description: putative protein; protein id: At3g61420.1
  misc_feature (1)..(493): Homolog of NCBI NO: 30696007 NR Description: expressed protein [Arabidopsis thaliana]
  misc_feature (505)..(577): Homolog of NCBI NO: 30696007 NR Description: expressed protein [Arabidopsis thaliana]
  misc_feature (397)..(577): Homolog of NCBI NO: 8778495 NR Description: F20N2.15 [Arabidopsis thaliana]
  misc_feature (220)..(354): Homolog of NCBI NO: 8778495 NR Description: F20N2.15 [Arabidopsis thaliana]
  misc_feature (71)..(186): Homolog of NCBI NO: 8778495 NR Description: F20N2.15 [Arabidopsis thaliana]
  misc_feature (1)..(60): Homolog of NCBI NO: 8778495 NR Description: F20N2.15 [Arabidopsis thaliana]
  misc_feature (6)..(577): Homolog of NCBI NO: 38636938 NR Description: unknown protein [Oryza sativa (japonica
  misc_feature (277)..(397): Homolog of NCBI NO: 8778495 NR Description: F20N2.15 [Arabidopsis thaliana]
  misc_feature (46)..(574): Homolog of NCBI NO: 19922250 NR Description: CG8151-PB [Drosophila melanogaster]
MEKRVKYKSFVKDPGTLGSLELSEVMLLFVPNDPKSDLKLKVQTHNIKSQKYTKEGSNKPPWLNLTSKQGRSHIFEFENYPDMHACRDFITKALAKCEEEPNKLVVLTPAEQLSMAEFELRFKLLRENSELQKLHKQFVESKVLTEDEFWSTRKKLLGKDSIRKSKQQMGLKSMMVSGIKPSTDGRTNRVTFNLTSEIIFQIFAEKPAVRQAFINYVPKKMTEKDFWTKYFRAEYLYSTKNTAVAAAEAAEDEELAVFLKPDEILAQEARQKMRRVDPTLDMDADEGDDYTHLMDHGIQRDGTNDIIEPQNDQLKRSLLQDLNRHAAVVLEGRCINVQSEDTRIVAEALTRAKQVSKADGEITKDANQERLERMSRATEMEDLQAPQNFPLAPLSIKDPRDYFESQQGNILSEPRGAKASKRNVHEAYGLLKESILVIRMTGLSDPLIKPEVSFEVFSSLTRTISTAKNILGKNPQESFLDRLPKSTKDEVIHHWTSIQELVRHFWSSYPITTTYLSTKVGKLKDAMSNTYSLLDAMKQSVQSDLRHQVSLLVRPMQQALDAAFQHYESDLQRRTAKIT

SEQ ID NO: 70242 - protein, 554 aa, Arabidopsis thaliana
  peptide (1)..(554): Ceres Seq. ID no. 2184285
  misc_feature (163)..(209): Pfam Name: BSD domain Pfam Description: BSD domain
  misc_feature (1)..(554): Homolog of NCBI NO: 15233107 NR Description: putative protein; protein id: At3g61420.1
  misc_feature (1)..(468): Homolog of NCBI NO: 30696007 NR Description: expressed protein [Arabidopsis thaliana]
  misc_feature (480)..(552): Homolog of NCBI NO: 30696007 NR Description: expressed protein [Arabidopsis thaliana]
  misc_feature (372)..(552): Homolog of NCBI NO: 8778495 NR Description: F20N2.15 [Arabidopsis thaliana]
  misc_feature (195)..(329): Homolog of NCBI NO: 8778495 NR Description: F20N2.15 [Arabidopsis thaliana]
  misc_feature (46)..(161): Homolog of NCBI NO: 8778495 NR Description: F20N2.15 [Arabidopsis thaliana]
  misc_feature (1)..(35): Homolog of NCBI NO: 8778495 NR Description: F20N2.15 [Arabidopsis thaliana]
  misc_feature (1)..(552): Homolog of NCBI NO: 38636938 NR Description: unknown protein [Oryza sativa (japonica
  misc_feature (252)..(372): Homolog of NCBI NO: 8778495 NR Description: F20N2.15 [Arabidopsis thaliana]
  misc_feature (21)..(549): Homolog of NCBI NO: 19922250 NR Description: CG8151-PB [Drosophila melanogaster]
MLLFVPNDPKSDLKLKVQTHNIKSQKYTKEGSNKPPWLNLTSKQGRSHIFEFENYPDMHACRDFITKALAKCEEEPNKLVVLTPAEQLSMAEFELRFKLLRENSELQKLHKQFVESKVLTEDEFWSTRKKLLGKDSIRKSKQQMGLKSMMVSGIKPSTDGRTNRVTFNLTSEIIFQIFAEKPAVRQAFINYVPKKMTEKDFWTKYFRAEYLYSTKNTAVAAAEAAEDEELAVFLKPDEILAQEARQKMRRVDPTLDMDADEGDDYTHLMDHGIQRDGTNDIIEPQNDQLKRSLLQDLNRHAAVVLEGRCINVQSEDTRIVAEALTRAKQVSKADGEITKDANQERLERMSRATEMEDLQAPQNFPLAPLSIKDPRDYFESQQGNILSEPRGAKASKRNVHEAYGLLKESILVIRMTGLSDPLIKPEVSFEVFSSLTRTISTAKNILGKNPQESFLDRLPKSTKDEVIHHWTSIQELVRHFWSSYPITTTYLSTKVGKLKDAMSNTYSLLDAMKQSVQSDLRHQVSLLVRPMQQALDAAFQHYESDLQRRTAKIT

SEQ ID NO: 70243 - protein, 497 aa, Arabidopsis thaliana
  peptide (1)..(497): Ceres Seq. ID no. 2184286
  misc_feature (106)..(152): Pfam Name: BSD domain Pfam Description: BSD domain
  misc_feature (1)..(497): Homolog of NCBI NO: 15233107 NR Description: putative protein; protein id: At3g61420.1
  misc_feature (1)..(411): Homolog of NCBI NO: 30696007 NR Description: expressed protein [Arabidopsis thaliana]
  misc_feature (423)..(495): Homolog of NCBI NO: 30696007 NR Description: expressed protein [Arabidopsis thaliana]
  misc_feature (315)..(495): Homolog of NCBI NO: 8778495 NR Description: F20N2.15 [Arabidopsis thaliana]
  misc_feature (138)..(272): Homolog of NCBI NO: 8778495 NR Description: F20N2.15 [Arabidopsis thaliana]
  misc_feature (1)..(104): Homolog of NCBI NO: 8778495 NR Description: F20N2.15 [Arabidopsis thaliana]
  misc_feature (1)..(495): Homolog of NCBI NO: 38636938 NR Description: unknown protein [Oryza sativa (japonica
  misc_feature (195)..(315): Homolog of NCBI NO: 8778495 NR Description: F20N2.15 [Arabidopsis thaliana]
  misc_feature (1)..(492): Homolog of NCBI NO: 19922250 NR Description: CG8151-PB [Drosophila melanogaster]
  misc_feature (1)..(257): Homolog of NCBI NO: 31201175 NR Description: ENSANGP00000012561 [Anopheles gambiae]
MHACRDFITKALAKCEEEPNKLVVLTPAEQLSMAEFELRFKLLRENSELQKLHKQFVESKVLTEDEFWSTRKKLLGKDSIRKSKQQMGLKSMMVSGIKPSTDGRTNRVTFNLTSEIIFQIFAEKPAVRQAFINYVPKKMTEKDFWTKYFRAEYLYSTKNTAVAAAEAAEDEELAVFLKPDEILAQEARQKMRRVDPTLDMDADEGDDYTHLMDHGIQRDGTNDIIEPQNDQLKRSLLQDLNRHAAVVLEGRCINVQSEDTRIVAEALTRAKQVSKADGEITKDANQERLERMSRATEMEDLQAPQNFPLAPLSIKDPRDYFESQQGNILSEPRGAKASKRNVHEAYGLLKESILVIRMTGLSDPLIKPEVSFEVFSSLTRTISTAKNILGKNPQESFLDRLPKSTKDEVIHHWTSIQELVRHFWSSYPITTTYLSTKVGKLKDAMSNTYSLLDAMKQSVQSDLRHQVSLLVRPMQQALDAAFQHYESDLQRRTAKIT

SEQ ID NO: 70244 - DNA, 1056 bp, Arabidopsis thaliana
  misc_feature (1)..(1056): Ceres Seq. ID no. 2185574
  misc_feature: MA Experiment ID: 20000184 Result: Up-regulated in Transcription
  misc_feature: MA Experiment 20000184 PARAMETER Experiment Name: At_Shoots__P Parameter: Age (day) Value: 7
  misc_feature: MA Experiment 20000184 PARAMETER Experiment Name: At_Shoots__P Parameter: Tissue Value: Shoots vs. Whole Plant
  misc_feature: MA Experiment ID: 20000185 Result: Up-regulated in Transcription
  misc_feature: MA Experiment 20000185 PARAMETER Experiment Name: At_Roots__P Parameter: Age (day) Value: 7 vs. 21
  misc_feature: MA Experiment 20000185 PARAMETER Experiment Name: At_Roots__P Parameter: Organism Value: A. thaliana
  misc_feature: MA Experiment 20000185 PARAMETER Experiment Name: At_Roots__P Parameter: Tissue Value: Roots vs. Whole Plant
  misc_feature: MA Experiment ID: 20000227 Result: Down-regulated in Transcription
  misc_feature: MA Experiment 20000227 PARAMETER Experiment Name: At_Root-Tips-vs-Tops_P Parameter: Tissue Value: Root Tips vs. Root Tops
  misc_feature: MA Experiment ID: 20000439 Result: Up-regulated in Transcription
  misc_feature: MA Experiment 20000439 PARAMETER Experiment Name: At_Roots__P Parameter: Age (day) Value: 14 vs. 21
  misc_feature: MA Experiment 20000439 PARAMETER Experiment Name: At_Roots__P Parameter: Organism Value: A. thaliana
  misc_feature: MA Experiment 20000439 PARAMETER Experiment Name: At_Roots__P Parameter: Tissue Value: Roots vs. Whole Plant
  misc_feature: MA Experiment ID: 20000495 Result: Up-regulated in Transcription
  misc_feature: MA Experiment 20000495 PARAMETER Experiment Name: At_Guard_Cells_P Parameter: Harvest Date Value: 8/2/2002
  misc_feature: MA Experiment 20000495 PARAMETER Experiment Name: At_Guard_Cells_P Parameter: Organism Value: A. thaliana
  misc_feature: MA Experiment 20000495 PARAMETER Experiment Name: At_Guard_Cells_P Parameter: Tissue Value: Guard Cells vs. Leaves
  misc_feature: MA Experiment ID: 20000794 Result: Down-regulated in Transcription
  misc_feature: MA Experiment 20000794 PARAMETER Experiment Name: At_Petals_P Parameter: Age (day) Value: 23-25 days
  misc_feature: MA Experiment 20000794 PARAMETER Experiment Name: At_Petals_P Parameter: Plant Line Value: WS
  misc_feature: MA Experiment 20000794 PARAMETER Experiment Name: At_Petals_P Parameter: Tissue Value: Petals vs. Whole plant
  misc_feature: MA Experiment ID: 20001248 Result: Down-regulated in Transcription
  misc_feature: MA Experiment 20001248 PARAMETER Experiment Name: At_Far-red-induction_P Parameter: Age (day) Value: 7
  misc_feature: MA Experiment 20001248 PARAMETER Experiment Name: At_Far-red-induction_P Parameter: Light Value: Far-red vs. White
  misc_feature: MA Experiment 20001248 PARAMETER Experiment Name: At_Far-red-induction_P Parameter: Organism Value: A. thaliana
  misc_feature: MA Experiment 20001248 PARAMETER Experiment Name: At_Far-red-induction_P Parameter: Plant Line Value: Columbia
  misc_feature: MA Experiment 20001248 PARAMETER Experiment Name: At_Far-red-induction_P Parameter: Timepoint (hr) Value: 4
  misc_feature: MA Experiment 20001248 PARAMETER Experiment Name: At_Far-red-induction_P Parameter: Tissue Value: Whole Plant
  misc_feature: MA Experiment ID: 20001557 Result: Down-regulated in Transcription
  misc_feature: MA Experiment 20001557 PARAMETER Experiment Name: At_Drought_Soil_Dry_P Parameter: Age (day) Value: 27
  misc_feature: MA Experiment 20001557 PARAMETER Experiment Name: At_Drought_Soil_Dry_P Parameter: Organism Value: A. thaliana
  misc_feature: MA Experiment 20001557 PARAMETER Experiment Name: At_Drought_Soil_Dry_P Parameter: Plant Line Value: WS
  misc_feature: MA Experiment 20001557 PARAMETER Experiment Name: At_Drought_Soil_Dry_P Parameter: Post Timepoint (hr) Value: 3
  misc_feature: MA Experiment 20001557 PARAMETER Experiment Name: At_Drought_Soil_Dry_P Parameter: Post-Treatment Value: Re-Water vs. No Drought
  misc_feature: MA Experiment 20001557 PARAMETER Experiment Name: At_Drought_Soil_Dry_P Parameter: Timepoint (day) Value: 13
  misc_feature: MA Experiment 20001557 PARAMETER Experiment Name: At_Drought_Soil_Dry_P Parameter: Treatment Value: Drought vs. No Drought
  misc_feature: MA Experiment ID: 20001905 Result: Down-regulated in Transcription
  misc_feature: MA Experiment 20001905 PARAMETER Experiment Name: At_Drought_Reproduction_P Parameter: Age (day) Value: 40
  misc_feature: MA Experiment 20001905 PARAMETER Experiment Name: At_Drought_Reproduction_P Parameter: Organism Value: A. thaliana
  misc_feature: MA Experiment 20001905 PARAMETER Experiment Name: At_Drought_Reproduction_P Parameter: Plant Line Value: WS
  misc_feature: MA Experiment 20001905 PARAMETER Experiment Name: At_Drought_Reproduction_P Parameter: Timepoint (day) Value: 10
  misc_feature: MA Experiment 20001905 PARAMETER Experiment Name: At_Drought_Reproduction_P Parameter: Tissue Value: Rosettes
  misc_feature: MA Experiment 20001905 PARAMETER Experiment Name: At_Drought_Reproduction_P Parameter: Treatment Value: Drought vs. No Drought
  misc_feature: MA Experiment ID: 20001906 Result: Down-regulated in Transcription
  misc_feature: MA Experiment 20001906 PARAMETER Experiment Name: At_Drought_Reproduction_P Parameter: Age (day) Value: 35
  misc_feature: MA Experiment 20001906 PARAMETER Experiment Name: At_Drought_Reproduction_P Parameter: Organism Value: A. thaliana
  misc_feature: MA Experiment 20001906 PARAMETER Experiment Name: At_Drought_Reproduction_P Parameter: Plant Line Value: WS
  misc_feature: MA Experiment 20001906 PARAMETER Experiment Name: At_Drought_Reproduction_P Parameter: Timepoint (day) Value: 5
  misc_feature: MA Experiment 20001906 PARAMETER Experiment Name: At_Drought_Reproduction_P Parameter: Tissue Value: Siliques
  misc_feature: MA Experiment 20001906 PARAMETER Experiment Name: At_Drought_Reproduction_P Parameter: Treatment Value: Drought vs. No Drought
atgcaaaagatgagagtttcggggtttagagttcttctcttggtttcttgtttcttctgcaaatccaaaggagctgttgttcctgcactcatcatgtttggcgactccattgttgacgttggcaacaacaataacttactcagcattgtcaaatccaactttcttccttacggtagagacttcatcgaccaaagacccaccggaagattctgcaacggaaaactcgctgtagatttctcagccgagtaccttggtttctcttcatacccacctgcattcctaagccgggaagcaagcaacgagaatatcctgatcggtgccaactttgcatcagcttcttcaggatactatgatgccacatctgttccatttggctcgatctccttaacacgacagctgagctattacagggcgtatcaaaatagagtaacgagaatgatcgggagggggaacgcgcgcatactgttctctagaggtatccacattttgagtgcgggatctagcgactttcttcagaattattacatcaatcctctactcaacatcctaaatacacctgatcagttcgctgacattctcctgagatccttctcagaattcatccagaatctgtatgaactaggagcaaggagaatcggagtgatatcgctaccgccgatgggttgcctgcctgcagctatcactcttttcggtgcaggaaacaaaagttgtgttgagagactgaacaatgatgctatcatgttcaatactaaacttgagaacacaacccggttactgatgaatagacactcaggcctcagactcgtcgcctttaatgtctaccaacctttcctggacatcatcaccaacccaactgacaatggattctttgaaacaaaaagggcatgctgcggaacagggacaatagaaacatcgttcctttgcaattctctatccttcggaacgtgtgtaaatgccacaggatatgtgttttgggatggatttcatcccacagaggctgtaaacgagctgttggctggtcaactactgggtcaagggatttctctaatcaattga

SEQ ID NO: 70245 - protein, 351 aa, Arabidopsis thaliana
  peptide (1)..(351): Ceres Seq. ID no. 2185575
  misc_feature (30)..(289): Pfam Name: GDSL-like Lipase/Acylhydrolase Pfam Description: GDSL-like Lipase/Acylhydrolase
  misc_feature (321)..(351): Homolog of NCBI NO: 11280580 NR Description: hypothetical protein T4D2.30 - Arabidopsis >gi|6630730|emb|CAB64213.1| putative protein [Arabidopsis
  misc_feature (3)..(351): Homolog of NCBI NO: 9758010 NR Description: proline-rich protein APG-like [Arabidopsis
  misc_feature (3)..(351): Homolog of NCBI NO: 15237531 NR Description: putative protein; protein id: At5g03820.1
  misc_feature (34)..(351): Homolog of NCBI NO: 15237528 NR Description: putative protein; protein id: At5g03810.1
  misc_feature (1)..(351): Homolog of NCBI NO: 30693763 NR Description: GDSL-motif lipase/hydrolase protein [Arabidopsis
  misc_feature (4)..(289): Homolog of NCBI NO: 11280580 NR Description: hypothetical protein T4D2.30 - Arabidopsis >gi|6630730|emb|CAB64213.1| putative protein [Arabidopsis
  misc_feature (26)..(351): Homolog of NCBI NO: 15237137 NR Description: GDSL-motif lipase/hydrolase-like protein; protein
  misc_feature (12)..(351): Homolog of NCBI NO: 13174242 NR Description: putative proline-rich protein [Oryza sativa]
  misc_feature (7)..(350): Homolog of NCBI NO: 15228189 NR Description: putative APG protein; protein id: At3g16370.1,
  misc_feature (33)..(350): Homolog of NCBI NO: 2062167 NR Description: Proline-rich protein APG isolog [Arabidopsis
MQKMRVSGFRVLLLVSCFFCKSKGAVVPALIMFGDSIVDVGNNNNLLSIVKSNFLPYGRDFIDQRPTGRFCNGKLAVDFSAEYLGFSSYPPAFLSREASNENILIGANFASASSGYYDATSVPFGSISLTRQLSYYRAYQNRVTRMIGRGNARILFSRGIHILSAGSSDFLQNYYINPLLNILNTPDQFADILLRSFSEFIQNLYELGARRIGVISLPPMGCLPAAITLFGAGNKSCVERLNNDAIMFNTKLENTTRLLMNRHSGLRLVAFNVYQPFLDIITNPTDNGFFETKRACCGTGTIETSFLCNSLSFGTCVNATGYVFWDGFHPTEAVNELLAGQLLGQGISLIN

SEQ ID NO: 70246 - protein, 348 aa, Arabidopsis thaliana
  peptide (1)..(348): Ceres Seq. ID no. 2185576
  misc_feature (27)..(286): Pfam Name: GDSL-like Lipase/Acylhydrolase Pfam Description: GDSL-like Lipase/Acylhydrolase
  misc_feature (1)..(348): Homolog of NCBI NO: 30693763 NR Description: GDSL-motif lipase/hydrolase protein [Arabidopsis
  misc_feature (1)..(286): Homolog of NCBI NO: 11280580 NR Description: hypothetical protein T4D2.30 - Arabidopsis >gi|6630730|emb|CAB64213.1| putative protein [Arabidopsis
  misc_feature (318)..(348): Homolog of NCBI NO: 11280580 NR Description: hypothetical protein T4D2.30 - Arabidopsis >gi|6630730|emb|CAB64213.1| putative protein [Arabidopsis
  misc_feature (1)..(348): Homolog of NCBI NO: 9758010 NR Description: proline-rich protein APG-like [Arabidopsis
  misc_feature (1)..(348): Homolog of NCBI NO: 15237531 NR Description: putative protein; protein id: At5g03820.1
  misc_feature (31)..(348): Homolog of NCBI NO: 15237528 NR Description: putative protein; protein id: At5g03810.1
  misc_feature (23)..(348): Homolog of NCBI NO: 15237137 NR Description: GDSL-motif lipase/hydrolase-like protein; protein
  misc_feature (9)..(348): Homolog of NCBI NO: 13174242 NR Description: putative proline-rich protein [Oryza sativa]
  misc_feature (4)..(347): Homolog of NCBI NO: 15228189 NR Description: putative APG protein; protein id: At3g16370.1,
  misc_feature (30)..(347): Homolog of NCBI NO: 2062167 NR Description: Proline-rich protein APG isolog [Arabidopsis
MRVSGFRVLLLVSCFFCKSKGAVVPALIMFGDSIVDVGNNNNLLSIVKSNFLPYGRDFIDQRPTGRFCNGKLAVDFSAEYLGFSSYPPAFLSREASNENILIGANFASASSGYYDATSVPFGSISLTRQLSYYRAYQNRVTRMIGRGNARILFSRGIHILSAGSSDFLQNYYINPLLNILNTPDQFADILLRSFSEFIQNLYELGARRIGVISLPPMGCLPAAITLFGAGNKSCVERLNNDAIMFNTKLENTTRLLMNRHSGLRLVAFNVYQPFLDIITNPTDNGFFETKRACCGTGTIETSFLCNSLSFGTCVNATGYVFWDGFHPTEAVNELLAGQLLGQGISLIN

SEQ ID NO: 70247 - protein, 320 aa, Arabidopsis thaliana
  peptide (1)..(320): Ceres Seq. ID no. 2185577
  misc_feature (1)..(258): Pfam Name: GDSL-like Lipase/Acylhydrolase Pfam Description: GDSL-like Lipase/Acylhydrolase
  misc_feature (1)..(320): Homolog of NCBI NO: 30693763 NR Description: GDSL-motif lipase/hydrolase protein [Arabidopsis
  misc_feature (1)..(258): Homolog of NCBI NO: 11280580 NR Description: hypothetical protein T4D2.30 - Arabidopsis >gi|6630730|emb|CAB64213.1| putative protein [Arabidopsis
  misc_feature (290)..(320): Homolog of NCBI NO: 11280580 NR Description: hypothetical protein T4D2.30 - Arabidopsis >gi|6630730|emb|CAB64213.1| putative protein [Arabidopsis
  misc_feature (1)..(320): Homolog of NCBI NO: 9758010 NR Description: proline-rich protein APG-like [Arabidopsis
  misc_feature (1)..(320): Homolog of NCBI NO: 15237531 NR Description: putative protein; protein id: At5g03820.1
  misc_feature (3)..(320): Homolog of NCBI NO: 15237528 NR Description: putative protein; protein id: At5g03810.1
  misc_feature (1)..(320): Homolog of NCBI NO: 15237137 NR Description: GDSL-motif lipase/hydrolase-like protein; protein
  misc_feature (1)..(320): Homolog of NCBI NO: 13174242 NR Description: putative proline-rich protein [Oryza sativa]
  misc_feature (1)..(319): Homolog of NCBI NO: 15228189 NR Description: putative APG protein; protein id: At3g16370.1,
  misc_feature (2)..(319): Homolog of NCBI NO: 2062167 NR Description: Proline-rich protein APG isolog [Arabidopsis
MFGDSIVDVGNNNNLLSIVKSNFLPYGRDFIDQRPTGRFCNGKLAVDFSAEYLGFSSYPPAFLSREASNENILIGANFASASSGYYDATSVPFGSISLTRQLSYYRAYQNRVTRMIGRGNARILFSRGIHILSAGSSDFLQNYYINPLLNILNTPDQFADILLRSFSEFIQNLYELGARRIGVISLPPMGCLPAAITLFGAGNKSCVERLNNDAIMFNTKLENTTRLLMNRHSGLRLVAFNVYQPFLDIITNPTDNGFFETKRACCGTGTIETSFLCNSLSFGTCVNATGYVFWDGFHPTEAVNELLAGQLLGQGISLIN

SEQ ID NO: 70248 - DNA, 1620 bp, Arabidopsis thaliana
  misc_feature (1)..(1620): Ceres Seq. ID no. 2185743
  misc_feature: MA Experiment ID: 20000171 Result: Down-regulated in Transcription
  misc_feature: MA Experiment 20000171 PARAMETER Experiment Name: At_42deg_Heat_P Parameter: Age (day) Value: 14
  misc_feature: MA Experiment 20000171 PARAMETER Experiment Name: At_42deg_Heat_P Parameter: Organism Value: A. thaliana
  misc_feature: MA Experiment 20000171 PARAMETER Experiment Name: At_42deg_Heat_P Parameter: Plant Line Value: WS
  misc_feature: MA Experiment 20000171 PARAMETER Experiment Name: At_42deg_Heat_P Parameter: Temperature (deg C) Value: 42 vs. 22
  misc_feature: MA Experiment 20000171 PARAMETER Experiment Name: At_42deg_Heat_P Parameter: Timepoint (hr) Value: 1
  misc_feature: MA Experiment 20000171 PARAMETER Experiment Name: At_42deg_Heat_P Parameter: Tissue Value: Aerial
  misc_feature: MA Experiment ID: 20000173 Result: Down-regulated in Transcription
  misc_feature: MA Experiment 20000173 PARAMETER Experiment Name: At_42deg_Heat_P Parameter: Age (day) Value: 14
  misc_feature: MA Experiment 20000173 PARAMETER Experiment Name: At_42deg_Heat_P Parameter: Organism Value: A. thaliana
  misc_feature: MA Experiment 20000173 PARAMETER Experiment Name: At_42deg_Heat_P Parameter: Plant Line Value: WS
  misc_feature: MA Experiment 20000173 PARAMETER Experiment Name: At_42deg_Heat_P Parameter: Temperature (deg C) Value: 42 vs. 22
  misc_feature: MA Experiment 20000173 PARAMETER Experiment Name: At_42deg_Heat_P Parameter: Timepoint (hr) Value: 6
  misc_feature: MA Experiment 20000173 PARAMETER Experiment Name: At_42deg_Heat_P Parameter: Tissue Value: Aerial
  misc_feature: MA Experiment ID: 20000265 Result: Up-regulated in Transcription
  misc_feature: MA Experiment 20000265 PARAMETER Experiment Name: At_Open_Flower_P Parameter: Age (day) Value: 21
  misc_feature: MA Experiment 20000265 PARAMETER Experiment Name: At_Open_Flower_P Parameter: Plant Line Value: WS
  misc_feature: MA Experiment 20000265 PARAMETER Experiment Name: At_Open_Flower_P Parameter: Tissue Value: Closed Flower vs. Whole Plant
  misc_feature: MA Experiment ID: 20000286 Result: Up-regulated in Transcription
  misc_feature: MA Experiment 20000286 PARAMETER Experiment Name: At_Open_Flower_P Parameter: Age (day) Value: 21
  misc_feature: MA Experiment 20000286 PARAMETER Experiment Name: At_Open_Flower_P Parameter: Plant Line Value: WS
  misc_feature: MA Experiment 20000286 PARAMETER Experiment Name: At_Open_Flower_P Parameter: Tissue Value: Half Open vs. Whole Plant
  misc_feature: MA Experiment ID: 20000438 Result: Up-regulated in Transcription
  misc_feature: MA Experiment 20000438 PARAMETER Experiment Name: At_Shoots__P Parameter: Age (day) Value: 14
  misc_feature: MA Experiment 20000438 PARAMETER Experiment Name: At_Shoots__P Parameter: Tissue Value: Shoots vs. Whole Plant
  misc_feature: MA Experiment ID: 20000495 Result: Up-regulated in Transcription
  misc_feature: MA Experiment 20000495 PARAMETER Experiment Name: At_Guard_Cells_P Parameter: Harvest Date Value: 8/2/2002
  misc_feature: MA Experiment 20000495 PARAMETER Experiment Name: At_Guard_Cells_P Parameter: Organism Value: A. thaliana
  misc_feature: MA Experiment 20000495 PARAMETER Experiment Name: At_Guard_Cells_P Parameter: Tissue Value: Guard Cells vs. Leaves
atgatgaggaactcgccgtcatatacctctgcaacgcactctcgtaatttcgacaccattttgtctccactcgtcaaaaccggcaccggtgcttctaaccgatcctacgccttcttctccatctttctcttcctcctcctcggcgcgtttctctccacgcgcctcctcctcgatccctccgttttgatagagaaagaagcggtgtccgtgactgagagagaaaccactcaatccccagaataccctcagtcgactaagctaattacggaaaaaccaaaagagtttacgctaaactgcgctgctttctccggcaacgacactggaacttgcccaaaggacaattatccgacgagtttccgatctagcgccggagaaggagaatctgaccgttctccatccgccacgtgcccagattacttccgatggattcacgaggatctacggccatgggagaagaccgggatcacgagggaagccttggagcgagccaatgcgacggcgattttccgcctggcgattatcaacgggagaatctacgtcgagaaatttcgtgaggcttttcagacaagagatgtgttcacgatctggggattcgtacagctcctacggagatatccgggaaagattccggatctcgagctcatgtttgactgcgttgactggccggtagtgaaggcggctgaattcgccggagttgatcaacctccaccgccgccattgttccgttattgcgcgaacgacgagacgctcgacattgtatttcccgattggtcctattggggatgggctgaggtgaatataaagccatgggaaagtctgttgaaagaactaagagaaggaaaccagaggactaaatggatagatagagagccttatgcttactggaaagggaatccaacggttgctgagacgagacttgatctcatgaaatgtaatctctccgaggtgtatgactggaaagctcgtttgtacaagcaggactgggtcaaggaatcaaaggaaggttacaagcagtcagacttggcgagccaatgccatcacaggtacaagatttacatagaagggtctgcgtggtcggtgagtgagaagtacattctggcttgtgactcggtgacattaatggtgaaacctcattactacgatttcttcacaagaggtatgtttccaggtcaccattactggcctgtcaaggaggacgacaaatgccgttccatcaaattcgctgttgattggggcaacttgcatatgcgaaaggcacaagacataggtaagaaggcaagtgagtttgtgcaacaagaactcaagatggactatgtgtacgattacatgtttcatctcttaatccaatactctaaactcctccggtttaaacccgagatccctcagaactccactgagctctgctcagaggcaatggcatgcccgagggatggaaatgaacgaaagtttatgatggaatcactcgtaaaacgcccagctgagacaggtccctgcgccatgccgcctccgtatgatccggcatcattttattcagttttgaaaaggagacagagtacgactagtagaatcgaacagtgggagagtaagtactggaggaagcagaacaagaccggttcgtaa

SEQ ID NO: 70249 - protein, 539 aa, Arabidopsis thaliana
  peptide (1)..(539): Ceres Seq. ID no. 2185744
  misc_feature (131)..(532): Pfam Name: Arabidopsis thaliana protein of unknown function Pfam Description: Arabidopsis thaliana protein of unknown
  misc_feature (1)..(539): Homolog of NCBI NO: 15229061 NR Description: putative protein; protein id: At3g48980.1
  misc_feature (2)..(539): Homolog of NCBI NO: 15237842 NR Description: putative protein; protein id: At5g23850.1 thaliana] >gi|10176852|dbj|BAB10058.1| contains similarity to
  misc_feature (31)..(531): Homolog of NCBI NO: 7486461 NR Description: hypothetical protein At2g45830 [imported] - thaliana >gi|3386611|gb|AAC28541.1| unknown protein [Arabidopsis
  misc_feature (88)..(533): Homolog of NCBI NO: 15222413 NR Description: hypothetical protein; protein id: At1g63420.1
  misc_feature (116)..(537): Homolog of NCBI NO: 15233070 NR Description: putative protein; protein id: At3g61270.1
  misc_feature (88)..(326): Homolog of NCBI NO: 25404907 NR Description: protein F2K11.20 [imported] - Arabidopsis >gi|6633846|gb|AAF19705.1|AC008047_12 F2K11.20 [Arabidopsis
  misc_feature (328)..(533): Homolog of NCBI NO: 25404907 NR Description: protein F2K11.20 [imported] - Arabidopsis >gi|6633846|gb|AAF19705.1|AC008047_12 F2K11.20 [Arabidopsis
  misc_feature (160)..(527): Homolog of NCBI NO: 21742339 NR Description: OSJNBb0020O11.18 [Oryza sativa (japonica
  misc_feature (111)..(529): Homolog of NCBI NO: 38346998 NR Description: OSJNBb0039L24.21 [Oryza sativa (japonica
  misc_feature (160)..(531): Homolog of NCBI NO: 30690136 NR Description: expressed protein [Arabidopsis thaliana]
MMRNSPSYTSATHSRNFDTILSPLVKTGTGASNRSYAFFSIFLFLLLGAFLSTRLLLDPSVLIEKEAVSVTERETTQSPEYPQSTKLITEKPKEFTLNCAAFSGNDTGTCPKDNYPTSFRSSAGEGESDRSPSATCPDYFRWIHEDLRPWEKTGITREALERANATAIFRLAIINGRIYVEKFREAFQTRDVFTIWGFVQLLRRYPGKIPDLELMFDCVDWPVVKAAEFAGVDQPPPPPLFRYCANDETLDIVFPDWSYWGWAEVNIKPWESLLKELREGNQRTKWIDREPYAYWKGNPTVAETRLDLMKCNLSEVYDWKARLYKQDWVKESKEGYKQSDLASQCHHRYKIYIEGSAWSVSEKYILACDSVTLMVKPHYYDFFTRGMFPGHHYWPVKEDDKCRSIKFAVDWGNLHMRKAQDIGKKASEFVQQELKMDYVYDYMFHLLIQYSKLLRFKPEIPQNSTELCSEAMACPRDGNERKFMMESLVKRPAETGPCAMPPPYDPASFYSVLKRRQSTTSRIEQWESKYWRKQNKTGS

SEQ ID NO: 70250 - protein, 538 aa, Arabidopsis thaliana
  peptide (1)..(538): Ceres Seq. ID no. 2185745
  misc_feature (130)..(531): Pfam Name: Arabidopsis thaliana protein of unknown function Pfam Description: Arabidopsis thaliana protein of unknown
  misc_feature (1)..(538): Homolog of NCBI NO: 15229061 NR Description: putative protein; protein id: At3g48980.1
  misc_feature (1)..(538): Homolog of NCBI NO: 15237842 NR Description: putative protein; protein id: At5g23850.1 thaliana] >gi|10176852|dbj|BAB10058.1| contains similarity to
  misc_feature (30)..(530): Homolog of NCBI NO: 7486461 NR Description: hypothetical protein At2g45830 [imported] - thaliana >gi|3386611|gb|AAC28541.1| unknown protein [Arabidopsis
  misc_feature (87)..(532): Homolog of NCBI NO: 15222413 NR Description: hypothetical protein; protein id: At1g63420.1
  misc_feature (115)..(536): Homolog of NCBI NO: 15233070 NR Description: putative protein; protein id: At3g61270.1
  misc_feature (87)..(325): Homolog of NCBI NO: 25404907 NR Description: protein F2K11.20 [imported] - Arabidopsis >gi|6633846|gb|AAF19705.1|AC008047_12 F2K11.20 [Arabidopsis
  misc_feature (327)..(532): Homolog of NCBI NO: 25404907 NR Description: protein F2K11.20 [imported] - Arabidopsis >gi|6633846|gb|AAF19705.1|AC008047_12 F2K11.20 [Arabidopsis
  misc_feature (159)..(526): Homolog of NCBI NO: 21742339 NR Description: OSJNBb0020O11.18 [Oryza sativa (japonica
  misc_feature (110)..(528): Homolog of NCBI NO: 38346998 NR Description: OSJNBb0039L24.21 [Oryza sativa (japonica
  misc_feature (159)..(530): Homolog of NCBI NO: 30690136 NR Description: expressed protein [Arabidopsis thaliana]
MRNSPSYTSATHSRNFDTILSPLVKTGTGASNRSYAFFSIFLFLLLGAFLSTRLLLDPSVLIEKEAVSVTERETTQSPEYPQSTKLITEKPKEFTLNCAAFSGNDTGTCPKDNYPTSFRSSAGEGESDRSPSATCPDYFRWIHEDLRPWEKTGITREALERANATAIFRLAIINGRIYVEKFREAFQTRDVFTIWGFVQLLRRYPGKIPDLELMFDCVDWPVVKAAEFAGVDQPPPPPLFRYCANDETLDIVFPDWSYWGWAEVNIKPWESLLKELREGNQRTKWIDREPYAYWKGNPTVAETRLDLMKCNLSEVYDWKARLYKQDWVKESKEGYKQSDLASQCHHRYKIYIEGSAWSVSEKYILACDSVTLMVKPHYYDFFTRGMFPGHHYWPVKEDDKCRSIKFAVDWGNLHMRKAQDIGKKASEFVQQELKMDYVYDYMFHLLIQYSKLLRFKPEIPQNSTELCSEAMACPRDGNERKFMMESLVKRPAETGPCAMPPPYDPASFYSVLKRRQSTTSRIEQWESKYWRKQNKTGS

SEQ ID NO: 70251 - protein, 325 aa, Arabidopsis thaliana
  peptide (1)..(325): Ceres Seq. ID no. 2185746
  misc_feature (1)..(318): Pfam Name: Arabidopsis thaliana protein of unknown function Pfam Description: Arabidopsis thaliana protein of unknown
  misc_feature (1)..(325): Homolog of NCBI NO: 15229061 NR Description: putative protein; protein id: At3g48980.1
  misc_feature (1)..(325): Homolog of NCBI NO: 15237842 NR Description: putative protein; protein id: At5g23850.1 thaliana] >gi|10176852|dbj|BAB10058.1| contains similarity to
  misc_feature (1)..(317): Homolog of NCBI NO: 7486461 NR Description: hypothetical protein At2g45830 [imported] - thaliana >gi|3386611|gb|AAC28541.1| unknown protein [Arabidopsis
  misc_feature (1)..(319): Homolog of NCBI NO: 15222413 NR Description: hypothetical protein; protein id: At1g63420.1
  misc_feature (1)..(323): Homolog of NCBI NO: 15233070 NR Description: putative protein; protein id: At3g61270.1
  misc_feature (1)..(112): Homolog of NCBI NO: 25404907 NR Description: protein F2K11.20 [imported] - Arabidopsis >gi|6633846|gb|AAF19705.1|AC008047_12 F2K11.20 [Arabidopsis
  misc_feature (114)..(319): Homolog of NCBI NO: 25404907 NR Description: protein F2K11.20 [imported] - Arabidopsis >gi|6633846|gb|AAF19705.1|AC008047_12 F2K11.20 [Arabidopsis
  misc_feature (1)..(313): Homolog of NCBI NO: 21742339 NR Description: OSJNBb0020O11.18 [Oryza sativa (japonica
  misc_feature (1)..(315): Homolog of NCBI NO: 38346998 NR Description: OSJNBb0039L24.21 [Oryza sativa (japonica
  misc_feature (1)..(317): Homolog of NCBI NO: 30690136 NR Description: expressed protein [Arabidopsis thaliana]
MFDCVDWPVVKAAEFAGVDQPPPPPLFRYCANDETLDIVFPDWSYWGWAEVNIKPWESLLKELREGNQRTKWIDREPYAYWKGNPTVAETRLDLMKCNLSEVYDWKARLYKQDWVKESKEGYKQSDLASQCHHRYKIYIEGSAWSVSEKYILACDSVTLMVKPHYYDFFTRGMFPGHHYWPVKEDDKCRSIKFAVDWGNLHMRKAQDIGKKASEFVQQELKMDYVYDYMFHLLIQYSKLLRFKPEIPQNSTELCSEAMACPRDGNERKFMMESLVKRPAETGPCAMPPPYDPASFYSVLKRRQSTTSRIEQWESKYWRKQNKTGS

SEQ ID NO: 70252 - DNA, 699 bp, Arabidopsis thaliana
  misc_feature (1)..(699): Ceres Seq. ID no. 2187003
  misc_feature: MA Experiment ID: 20000180 Result: Up-regulated in Transcription
  misc_feature: MA Experiment 20000180 PARAMETER Experiment Name: At_Germinating_Seeds_P Parameter: Age (hr) Value: 24 vs. 0
  misc_feature: MA Experiment 20000180 PARAMETER Experiment Name: At_Germinating_Seeds_P Parameter: Tissue Value: Germinating Seeds
atgaactctcgagatcttacactcgtctctacatctgcaatcttcggtgctttgatttcagctctagcatttcgcttcttctcatcaaaccctaaaaaccccaaatcccgaaaattcacttccaccgaaatctctgcaatttccagaaaattccctgctctagatcctttcagtcctttgaaacgaaatgggtacttatcatgggatgattatttcatggcgattgcattcctttctgcagaacgatccaaggatcctaacaggcaggttggcgcatgtttggtgagccaaaatggtgtaatccttgggattggctataatggttttccaagaggctgctctgatgacaaacttccttgggccaagaaatcaagaactggggacccattagagaccaagtatccatatgtttgtcacgctgaagtcaatgccatactaaacacaaaccacgcatcggcggctggccagaagctttatgtgacaatgttcccttgcaatgaatgtgccaagattattttacagtctggtgttgctgaggtaatctattttgtggaaaagagaccaaatgactcagatgttgcctatgtagcttctcacaagctcttatccatggcaaacgtcaaagtcaggaaacatcaaccagagatggatgagatcttgatcaagttcgaagaacacttactccaaccagagacctaa

SEQ ID NO: 70253 - protein, 232 aa, Arabidopsis thaliana
  peptide (1)..(232): Ceres Seq. ID no. 2187004
  misc_feature (66)..(182): Pfam Name: Cytidine and deoxycytidylate deaminase Pfam Description: Cytidine and deoxycytidylate deaminase
  misc_feature (1)..(103): Homolog of NCBI NO: 15228398 NR Description: putative protein; protein id: At3g48540.1
  misc_feature (156)..(211): Homolog of NCBI NO: 15228398 NR Description: putative protein; protein id: At3g48540.1
  misc_feature (2)..(92): Homolog of NCBI NO: 34909822 NR Description: P0403C05.19 [Oryza sativa (japonica
  misc_feature (136)..(221): Homolog of NCBI NO: 34909822 NR Description: P0403C05.19 [Oryza sativa (japonica
  misc_feature (61)..(224): Homolog of NCBI NO: 23503055 NR Description: Deoxycytidylate deaminase (dCMP deaminase)
  misc_feature (61)..(224): Homolog of NCBI NO: 4503277 NR Description: dCMP deaminase [Homo sapiens]
  misc_feature (61)..(224): Homolog of NCBI NO: 18310048 NR Description: deoxycytidylate deaminase [Clostridium >gi|18144727|dbj|BAB80772.1| deoxycytidylate deaminase
  misc_feature (61)..(224): Homolog of NCBI NO: 12654885 NR Description: Similar to dCMP deaminase [Homo sapiens]
  misc_feature (61)..(224): Homolog of NCBI NO: 21619349 NR Description: Similar to dCMP deaminase [Mus musculus] unnamed protein product [Mus musculus]
  misc_feature (61)..(224): Homolog of NCBI NO: 30520263 NR Description: RIKEN cDNA 6030466N05 gene [Mus musculus]
MNSRDLTLVSTSAIFGALISALAFRFFSSNPKNPKSRKFTSTEISAISRKFPALDPFSPLKRNGYLSWDDYFMAIAFLSAERSKDPNRQVGACLVSQNGVILGIGYNGFPRGCSDDKLPWAKKSRTGDPLETKYPYVCHAEVNAILNTNHASAAGQKLYVTMFPCNECAKIILQSGVAEVIYFVEKRPNDSDVAYVASHKLLSMANVKVRKHQPEMDEILIKFEEHLLQPET

SEQ ID NO: 70254 - protein, 160 aa, Arabidopsis thaliana
  peptide (1)..(160): Ceres Seq. ID no. 2187005
  misc_feature (1)..(110): Pfam Name: Cytidine and deoxycytidylate deaminase Pfam Description: Cytidine and deoxycytidylate deaminase
  misc_feature (1)..(31): Homolog of NCBI NO: 15228398 NR Description: putative protein; protein id: At3g48540.1
  misc_feature (84)..(139): Homolog of NCBI NO: 15228398 NR Description: putative protein; protein id: At3g48540.1
  misc_feature (1)..(20): Homolog of NCBI NO: 34909822 NR Description: P0403C05.19 [Oryza sativa (japonica
  misc_feature (64)..(149): Homolog of NCBI NO: 34909822 NR Description: P0403C05.19 [Oryza sativa (japonica
  misc_feature (1)..(152): Homolog of NCBI NO: 23503055 NR Description: Deoxycytidylate deaminase (dCMP deaminase)
  misc_feature (1)..(152): Homolog of NCBI NO: 4503277 NR Description: dCMP deaminase [Homo sapiens]
  misc_feature (1)..(152): Homolog of NCBI NO: 18310048 NR Description: deoxycytidylate deaminase [Clostridium >gi|18144727|dbj|BAB80772.1| deoxycytidylate deaminase
  misc_feature (1)..(152): Homolog of NCBI NO: 12654885 NR Description: Similar to dCMP deaminase [Homo sapiens]
  misc_feature (1)..(152): Homolog of NCBI NO: 21619349 NR Description: Similar to dCMP deaminase [Mus musculus] unnamed protein product [Mus musculus]
  misc_feature (1)..(152): Homolog of NCBI NO: 30520263 NR Description: RIKEN cDNA 6030466N05 gene [Mus musculus]
MAIAFLSAERSKDPNRQVGACLVSQNGVILGIGYNGFPRGCSDDKLPWAKKSRTGDPLETKYPYVCHAEVNAILNTNHASAAGQKLYVTMFPCNECAKIILQSGVAEVIYFVEKRPNDSDVAYVASHKLLSMANVKVRKHQPEMDEILIKFEEHLLQPET

SEQ ID NO: 70255 - DNA, 1563 bp, Arabidopsis thaliana
  misc_feature (1)..(1563): Ceres Seq. ID no. 2187026
  misc_feature: MA Experiment ID: 20000171 Result: Down-regulated in Transcription
  misc_feature: MA Experiment 20000171 PARAMETER Experiment Name: At_42deg_Heat_P Parameter: Age (day) Value: 14
  misc_feature: MA Experiment 20000171 PARAMETER Experiment Name: At_42deg_Heat_P Parameter: Organism Value: A. thaliana
  misc_feature: MA Experiment 20000171 PARAMETER Experiment Name: At_42deg_Heat_P Parameter: Plant Line Value: WS
  misc_feature: MA Experiment 20000171 PARAMETER Experiment Name: At_42deg_Heat_P Parameter: Temperature (deg C) Value: 42 vs. 22
  misc_feature: MA Experiment 20000171 PARAMETER Experiment Name: At_42deg_Heat_P Parameter: Timepoint (hr) Value: 1
  misc_feature: MA Experiment 20000171 PARAMETER Experiment Name: At_42deg_Heat_P Parameter: Tissue Value: Aerial
  misc_feature: MA Experiment ID: 20000173 Result: Down-regulated in Transcription
  misc_feature: MA Experiment 20000173 PARAMETER Experiment Name: At_42deg_Heat_P Parameter: Age (day) Value: 14
  misc_feature: MA Experiment 20000173 PARAMETER Experiment Name: At_42deg_Heat_P Parameter: Organism Value: A. thaliana
  misc_feature: MA Experiment 20000173 PARAMETER Experiment Name: At_42deg_Heat_P Parameter: Plant Line Value: WS
  misc_feature: MA Experiment 20000173 PARAMETER Experiment Name: At_42deg_Heat_P Parameter: Temperature (deg C) Value: 42 vs. 22
  misc_feature: MA Experiment 20000173 PARAMETER Experiment Name: At_42deg_Heat_P Parameter: Timepoint (hr) Value: 6
  misc_feature: MA Experiment 20000173 PARAMETER Experiment Name: At_42deg_Heat_P Parameter: Tissue Value: Aerial
  misc_feature: MA Experiment ID: 20000180 Result: Up-regulated in Transcription
  misc_feature: MA Experiment 20000180 PARAMETER Experiment Name: At_Germinating_Seeds_P Parameter: Age (hr) Value: 24 vs. 0
  misc_feature: MA Experiment 20000180 PARAMETER Experiment Name: At_Germinating_Seeds_P Parameter: Tissue Value: Germinating Seeds
  misc_feature: MA Experiment ID: 20000184 Result: Up-regulated in Transcription
  misc_feature: MA Experiment 20000184 PARAMETER Experiment Name: At_Shoots__P Parameter: Age (day) Value: 7
  misc_feature: MA Experiment 20000184 PARAMETER Experiment Name: At_Shoots__P Parameter: Tissue Value: Shoots vs. Whole Plant
  misc_feature: MA Experiment ID: 20000227 Result: Down-regulated in Transcription
  misc_feature: MA Experiment 20000227 PARAMETER Experiment Name: At_Root-Tips-vs-Tops_P Parameter: Tissue Value: Root Tips vs. Root Tops
  misc_feature: MA Experiment ID: 20000234 Result: Up-regulated in Transcription
  misc_feature: MA Experiment 20000234 PARAMETER Experiment Name: At_Siliques_P Parameter: Age (day) Value: 21
  misc_feature: MA Experiment 20000234 PARAMETER Experiment Name: At_Siliques_P Parameter: Organism Value: A. thaliana
  misc_feature: MA Experiment 20000234 PARAMETER Experiment Name: At_Siliques_P Parameter: Plant Line Value: WS
  misc_feature: MA Experiment 20000234 PARAMETER Experiment Name: At_Siliques_P Parameter: Tissue Value: Less Than 5mm Siliques vs. Whole Plant
  misc_feature: MA Experiment ID: 20000286 Result: Up-regulated in Transcription
  misc_feature: MA Experiment 20000286 PARAMETER Experiment Name: At_Open_Flower_P Parameter: Age (day) Value: 21
  misc_feature: MA Experiment 20000286 PARAMETER Experiment Name: At_Open_Flower_P Parameter: Plant Line Value: WS
  misc_feature: MA Experiment 20000286 PARAMETER Experiment Name: At_Open_Flower_P Parameter: Tissue Value: Half Open vs. Whole Plant
  misc_feature: MA Experiment ID: 20000437 Result: Down-regulated in Transcription
  misc_feature: MA Experiment 20000437 PARAMETER Experiment Name: At_Drought_P Parameter: Age (day) Value: 8
  misc_feature: MA Experiment 20000437 PARAMETER Experiment Name: At_Drought_P Parameter: Organism Value: A. thaliana
  misc_feature: MA Experiment 20000437 PARAMETER Experiment Name: At_Drought_P Parameter: Plant Line Value: WS
  misc_feature: MA Experiment 20000437 PARAMETER Experiment Name: At_Drought_P Parameter: Timepoint (hr) Value: 24
  misc_feature: MA Experiment 20000437 PARAMETER Experiment Name: At_Drought_P Parameter: Tissue Value: Whole Plant
  misc_feature: MA Experiment 20000437 PARAMETER Experiment Name: At_Drought_P Parameter: Treatment Value: Drought vs. No Drought
  misc_feature: MA Experiment ID: 20000438 Result: Up-regulated in Transcription
  misc_feature: MA Experiment 20000438 PARAMETER Experiment Name: At_Shoots__P Parameter: Age (day) Value: 14
  misc_feature: MA Experiment 20000438 PARAMETER Experiment Name: At_Shoots__P Parameter: Tissue Value: Shoots vs. Whole Plant
  misc_feature: MA Experiment ID: 20000496 Result: Up-regulated in Transcription
  misc_feature: MA Experiment 20000496 PARAMETER Experiment Name: At_Guard_Cells_P Parameter: Harvest Date Value: 7/19/2002
  misc_feature: MA Experiment 20000496 PARAMETER Experiment Name: At_Guard_Cells_P Parameter: Organism Value: Canola
  misc_feature: MA Experiment 20000496 PARAMETER Experiment Name: At_Guard_Cells_P Parameter: Tissue Value: Guard Cells vs. Leaves
  misc_feature: MA Experiment ID: 20000794 Result: Down-regulated in Transcription
  misc_feature: MA Experiment 20000794 PARAMETER Experiment Name: At_Petals_P Parameter: Age (day) Value: 23-25 days
  misc_feature: MA Experiment 20000794 PARAMETER Experiment Name: At_Petals_P Parameter: Plant Line Value: WS
  misc_feature: MA Experiment 20000794 PARAMETER Experiment Name: At_Petals_P Parameter: Tissue Value: Petals vs. Whole plant
  misc_feature: MA Experiment ID: 20001248 Result: Down-regulated in Transcription
  misc_feature: MA Experiment 20001248 PARAMETER Experiment Name: At_Far-red-induction_P Parameter: Age (day) Value: 7
  misc_feature: MA Experiment 20001248 PARAMETER Experiment Name: At_Far-red-induction_P Parameter: Light Value: Far-red vs. White
  misc_feature: MA Experiment 20001248 PARAMETER Experiment Name: At_Far-red-induction_P Parameter: Organism Value: A. thaliana
  misc_feature: MA Experiment 20001248 PARAMETER Experiment Name: At_Far-red-induction_P Parameter: Plant Line Value: Columbia
  misc_feature: MA Experiment 20001248 PARAMETER Experiment Name: At_Far-red-induction_P Parameter: Timepoint (hr) Value: 4
  misc_feature: MA Experiment 20001248 PARAMETER Experiment Name: At_Far-red-induction_P Parameter: Tissue Value: Whole Plant
  misc_feature: MA Experiment ID: 20001450 Result: Down-regulated in Transcription
  misc_feature: MA Experiment 20001450 PARAMETER Experiment Name: At_Far-red-induction_P Parameter: Age (day) Value: 7
  misc_feature: MA Experiment 20001450 PARAMETER Experiment Name: At_Far-red-induction_P Parameter: Light Value: Far-red vs. White
  misc_feature: MA Experiment 20001450 PARAMETER Experiment Name: At_Far-red-induction_P Parameter: Organism Value: A. thaliana
  misc_feature: MA Experiment 20001450 PARAMETER Experiment Name: At_Far-red-induction_P Parameter: Plant Line Value: Columbia
  misc_feature: MA Experiment 20001450 PARAMETER Experiment Name: At_Far-red-induction_P Parameter: Timepoint (hr) Value: 8
  misc_feature: MA Experiment 20001450 PARAMETER Experiment Name: At_Far-red-induction_P Parameter: Tissue Value: Whole Plant
  misc_feature: MA Experiment ID: 20001451 Result: Down-regulated in Transcription
  misc_feature: MA Experiment 20001451 PARAMETER Experiment Name: At_Far-red-induction_P Parameter: Age (day) Value: 7
  misc_feature: MA Experiment 20001451 PARAMETER Experiment Name: At_Far-red-induction_P Parameter: Light Value: Far-red vs. White
  misc_feature: MA Experiment 20001451 PARAMETER Experiment Name: At_Far-red-induction_P Parameter: Organism Value: A. thaliana
  misc_feature: MA Experiment 20001451 PARAMETER Experiment Name: At_Far-red-induction_P Parameter: Plant Line Value: Columbia
  misc_feature: MA Experiment 20001451 PARAMETER Experiment Name: At_Far-red-induction_P Parameter: Timepoint (hr) Value: 24
  misc_feature: MA Experiment 20001451 PARAMETER Experiment Name: At_Far-red-induction_P Parameter: Tissue Value: Whole Plant
  misc_feature: MA Experiment ID: 20001558 Result: Up-regulated in Transcription
  misc_feature: MA Experiment 20001558 PARAMETER Experiment Name: At_Drought_Soil_Dry_P Parameter: Age (day) Value: 27
  misc_feature: MA Experiment 20001558 PARAMETER Experiment Name: At_Drought_Soil_Dry_P Parameter: Organism Value: A. thaliana
  misc_feature: MA Experiment 20001558 PARAMETER Experiment Name: At_Drought_Soil_Dry_P Parameter: Plant Line Value: WS
  misc_feature: MA Experiment 20001558 PARAMETER Experiment Name: At_Drought_Soil_Dry_P Parameter: Post Timepoint (hr) Value: 6
  misc_feature: MA Experiment 20001558 PARAMETER Experiment Name: At_Drought_Soil_Dry_P Parameter: Post-Treatment Value: Re-Water vs. No Drought
  misc_feature: MA Experiment 20001558 PARAMETER Experiment Name: At_Drought_Soil_Dry_P Parameter: Timepoint (day) Value: 13
  misc_feature: MA Experiment 20001558 PARAMETER Experiment Name: At_Drought_Soil_Dry_P Parameter: Treatment Value: Drought vs. No Drought
  misc_feature: MA Experiment ID: 20001560 Result: Up-regulated in Transcription
  misc_feature: MA Experiment 20001560 PARAMETER Experiment Name: At_Drought_Soil_Dry_P Parameter: Age (day) Value: 28
  misc_feature: MA Experiment 20001560 PARAMETER Experiment Name: At_Drought_Soil_Dry_P Parameter: Organism Value: A. thaliana
  misc_feature: MA Experiment 20001560 PARAMETER Experiment Name: At_Drought_Soil_Dry_P Parameter: Plant Line Value: WS
  misc_feature: MA Experiment 20001560 PARAMETER Experiment Name: At_Drought_Soil_Dry_P Parameter: Post Timepoint (hr) Value: None
  misc_feature: MA Experiment 20001560 PARAMETER Experiment Name: At_Drought_Soil_Dry_P Parameter: Post-Treatment Value: None
  misc_feature: MA Experiment 20001560 PARAMETER Experiment Name: At_Drought_Soil_Dry_P Parameter: Timepoint (day) Value: 14
  misc_feature: MA Experiment 20001560 PARAMETER Experiment Name: At_Drought_Soil_Dry_P Parameter: Treatment Value: Drought vs. No Drought
  misc_feature: MA Experiment ID: 20001911 Result: Down-regulated in Transcription
  misc_feature: MA Experiment 20001911 PARAMETER Experiment Name: At_Drought_Reproduction_P Parameter: Age (day) Value: 40
  misc_feature: MA Experiment 20001911 PARAMETER Experiment Name: At_Drought_Reproduction_P Parameter: Organism Value: A. thaliana
  misc_feature: MA Experiment 20001911 PARAMETER Experiment Name: At_Drought_Reproduction_P Parameter: Plant Line Value: WS
  misc_feature: MA Experiment 20001911 PARAMETER Experiment Name: At_Drought_Reproduction_P Parameter: Timepoint (day) Value: 10
  misc_feature: MA Experiment 20001911 PARAMETER Experiment Name: At_Drought_Reproduction_P Parameter: Tissue Value: Flowers
  misc_feature: MA Experiment 20001911 PARAMETER Experiment Name: At_Drought_Reproduction_P Parameter: Treatment Value: Drought vs. No Drought
atgaaaccatcatcagcttcaagattttctttaactttctcacactttctcacactctactgtcttctcacacaaacacatgtagctcaaggatctcatcaatggcaatcaccaatcaaaaccgtcgtcgttttagtgttggagaatcgatctttcgatcatctcttaggatggatgaagaactcagtaaacccgacaataaacggtgtaacgggtcaagaatgtaacccggttccgaattctacacaaactatatgtttcactagtgatgctgagtttgtggatccggatccgggtcattcgtttgaagctgttgagcaacaagtattcgggtctgggccgggtcagatcccgtccatgatgggtttcgttgagcaagcgctttccatgccgggaaatttgtcggagactgtaatgaaaggctttaggcctgaagctgttccggtttatgctgagctggttaaggaattcgctgtgttcgaccggtggttttcttcaattcccggtccgactcaaccaaaccggttatttgtctattcggctacctcacatggttccactagccatgtcaagaaacaactcgctcaagggtatccacagaagacgatatttgattcgcttcatagcaacgacatcgacttcggaatatactttcagaatattccgaccacattattctaccgtaatctccgacagctaaagtacattttcaatttgcatcaatacgatttgaaattcaagaaagacgcggccaaaggaaagttaccgagcttaaccgtaatcgaaccgaggtatttcgatctcaaaggtttaccggctaacgatgatcacccgtcgcatgacgtggctaacggtcaaaagctggttaaagaagtgtacgaggcacttaggtcgagtccacagtggaacgagacgctcctagttataacctatgatgagcatggtgggttctatgatcacgtcaagactccttatgtcggtataccaaatcccgatgggaatactggaccggctcctggtttctttaaattcgaccggttaggtgttcgtgttcctaccattatggtttcgccttggattcaaaaaggaaccgtcgtaagtgaagcaaaaggaccaacagagagctcagagtacgagcattcatcaataccagcgacaatcaagaaactcttcaatctctcttccaatttcttaacacatagagatgcatgggctgctactttcgaagacgttgtatctcacttaaccactcctcgaaccgattgtcccatgactctacctgaagttgcacctatgagagccactgagcctaaagaagacgctgctctttctgagtttcaaggtgaagtggttcagcttgcagcggttctcaatggtgatcacttcctcagtagcttcccggaagaaattggaaagaagatgactgtgaaacaagctcatgagtatgtcaaaggagctacttctcggttcattagagctagtaaagaggcaatgaagcttggtgccgataaatctgctattgtcgatatgcgatcttcgctcactacacggccacacaactga

SEQ ID NO: 70256 - protein, 520 aa, Arabidopsis thaliana
  peptide (1)..(520): Ceres Seq. ID no. 2187027
  misc_feature (59)..(411): Pfam Name: Phosphoesterase family Pfam Description: Phosphoesterase family
  misc_feature (1)..(520): Homolog of NCBI NO: 30693062 NR Description: phosphoesterase family [Arabidopsis thaliana] phosphatidylglycerol specific phospholipase C [Arabidopsis
  misc_feature (59)..(520): Homolog of NCBI NO: 11358440 NR Description: hypothetical protein T8P19.120 - Arabidopsis >gi|6523092|emb|CAB62350.1| putative protein [Arabidopsis
  misc_feature (29)..(517): Homolog of NCBI NO: 21703147 NR Description: At1g07230/F10K1_4 [Arabidopsis thaliana] phosphatidylglycerol specific phospholipase C [Arabidopsis
  misc_feature (29)..(517): Homolog of NCBI NO: 15222342 NR Description: unknown protein; protein id: At1g07230.1
  misc_feature (33)..(517): Homolog of NCBI NO: 34897344 NR Description: putative phospholipase [Oryza sativa] putative phospholipase [Oryza sativa] >gi|18855062|gb|AAL79754.1|
  misc_feature (22)..(517): Homolog of NCBI NO: 15225806 NR Description: putative phospholipase C; protein id: At2g26870.1
  misc_feature (37)..(517): Homolog of NCBI NO: 20161866 NR Description: B1139B11.7 [Oryza sativa (japonica
  misc_feature (17)..(507): Homolog of NCBI NO: 34894016 NR Description: P0672D08.18 [Oryza sativa (japonica >gi|15128448|dbj|BAB62632.1| hypothetical protein~similar to
  misc_feature (39)..(507): Homolog of NCBI NO: 27573343 NR Description: putative phosphoesterase [Oryza sativa (japonica group)] >gi|29126358|gb|AAO66550.1| putative phosphoesterase
  misc_feature (29)..(515): Homolog of NCBI NO: 15228577 NR Description: unknown protein; protein id: At3g03520.1, by cDNA: gi_17529015 [Arabidopsis thaliana] unknown protein [Arabidopsis thaliana]
MKPSSASRFSLTFSHFLTLYCLLTQTHVAQGSHQWQSPIKTVVVLVLENRSFDHLLGWMKNSVNPTINGVTGQECNPVPNSTQTICFTSDAEFVDPDPGHSFEAVEQQVFGSGPGQIPSMMGFVEQALSMPGNLSETVMKGFRPEAVPVYAELVKEFAVFDRWFSSIPGPTQPNRLFVYSATSHGSTSHVKKQLAQGYPQKTIFDSLHSNDIDFGIYFQNIPTTLFYRNLRQLKYIFNLHQYDLKFKKDAAKGKLPSLTVIEPRYFDLKGLPANDDHPSHDVANGQKLVKEVYEALRSSPQWNETLLVITYDEHGGFYDHVKTPYVGIPNPDGNTGPAPGFFKFDRLGVRVPTIMVSPWIQKGTVVSEAKGPTESSEYEHSSIPATIKKLFNLSSNFLTHRDAWAATFEDVVSHLTTPRTDCPMTLPEVAPMRATEPKEDAALSEFQGEVVQLAAVLNGDHFLSSFPEEIGKKMTVKQAHEYVKGATSRFIRASKEAMKLGADKSAIVDMRSSLTTRPHN

SEQ ID NO: 70257 - protein, 462 aa, Arabidopsis thaliana
  peptide (1)..(462): Ceres Seq. ID no. 2187028
  misc_feature (1)..(353): Pfam Name: Phosphoesterase family Pfam Description: Phosphoesterase family
  misc_feature (1)..(462): Homolog of NCBI NO: 30693062 NR Description: phosphoesterase family [Arabidopsis thaliana] phosphatidylglycerol specific phospholipase C [Arabidopsis
  misc_feature (1)..(462): Homolog of NCBI NO: 11358440 NR Description: hypothetical protein T8P19.120 - Arabidopsis >gi|6523092|emb|CAB62350.1| putative protein [Arabidopsis
  misc_feature (1)..(459): Homolog of NCBI NO: 21703147 NR Description: At1g07230/F10K1_4 [Arabidopsis thaliana] phosphatidylglycerol specific phospholipase C [Arabidopsis
  misc_feature (1)..(459): Homolog of NCBI NO: 15222342 NR Description: unknown protein; protein id: At1g07230.1
  misc_feature (1)..(459): Homolog of NCBI NO: 34897344 NR Description: putative phospholipase [Oryza sativa] putative phospholipase [Oryza sativa] >gi|18855062|gb|AAL79754.1|
  misc_feature (1)..(459): Homolog of NCBI NO: 15225806 NR Description: putative phospholipase C; protein id: At2g26870.1
  misc_feature (1)..(459): Homolog of NCBI NO: 20161866 NR Description: B1139B11.7 [Oryza sativa (japonica
  misc_feature (1)..(449): Homolog of NCBI NO: 34894016 NR Description: P0672D08.18 [Oryza sativa (japonica >gi|15128448|dbj|BAB62632.1| hypothetical protein~similar to
  misc_feature (1)..(449): Homolog of NCBI NO: 27573343 NR Description: putative phosphoesterase [Oryza sativa (japonica group)] >gi|29126358|gb|AAO66550.1| putative phosphoesterase
  misc_feature (1)..(457): Homolog of NCBI NO: 15228577 NR Description: unknown protein; protein id: At3g03520.1, by cDNA: gi_17529015 [Arabidopsis thaliana] unknown protein [Arabidopsis thaliana]
MKNSVNPTINGVTGQECNPVPNSTQTICFTSDAEFVDPDPGHSFEAVEQQVFGSGPGQIPSMMGFVEQALSMPGNLSETVMKGFRPEAVPVYAELVKEFAVFDRWFSSIPGPTQPNRLFVYSATSHGSTSHVKKQLAQGYPQKTIFDSLHSNDIDFGIYFQNIPTTLFYRNLRQLKYIFNLHQYDLKFKKDAAKGKLPSLTVIEPRYFDLKGLPANDDHPSHDVANGQKLVKEVYEALRSSPQWNETLLVITYDEHGGFYDHVKTPYVGIPNPDGNTGPAPGFFKFDRLGVRVPTIMVSPWIQKGTVVSEAKGPTESSEYEHSSIPATIKKLFNLSSNFLTHRDAWAATFEDVVSHLTTPRTDCPMTLPEVAPMRATEPKEDAALSEFQGEVVQLAAVLNGDHFLSSFPEEIGKKMTVKQAHEYVKGATSRFIRASKEAMKLGADKSAIVDMRSSLTTRPHN

SEQ ID NO: 70258 - protein, 401 aa, Arabidopsis thaliana
  peptide (1)..(401): Ceres Seq. ID no. 2187029
  misc_feature (1)..(292): Pfam Name: Phosphoesterase family Pfam Description: Phosphoesterase family
  misc_feature (1)..(388): Homolog of NCBI NO: 27573343 NR Description: putative phosphoesterase [Oryza sativa (japonica group)] >gi|29126358|gb|AAO66550.1| putative phosphoesterase
  misc_feature (1)..(401): Homolog of NCBI NO: 30693062 NR Description: phosphoesterase family [Arabidopsis thaliana] phosphatidylglycerol specific phospholipase C [Arabidopsis
  misc_feature (1)..(398): Homolog of NCBI NO: 21703147 NR Description: At1g07230/F10K1_4 [Arabidopsis thaliana] phosphatidylglycerol specific phospholipase C [Arabidopsis
  misc_feature (1)..(398): Homolog of NCBI NO: 34897344 NR Description: putative phospholipase [Oryza sativa] putative phospholipase [Oryza sativa] >gi|18855062|gb|AAL79754.1|
  misc_feature (1)..(398): Homolog of NCBI NO: 20161866 NR Description: B1139B11.7 [Oryza sativa (japonica
  misc_feature (1)..(388): Homolog of NCBI NO: 34894016 NR Description: P0672D08.18 [Oryza sativa (japonica >gi|15128448|dbj|BAB62632.1| hypothetical protein~similar to
  misc_feature (1)..(398): Homolog of NCBI NO: 15225806 NR Description: putative phospholipase C; protein id: At2g26870.1
  misc_feature (1)..(398): Homolog of NCBI NO: 15222342 NR Description: unknown protein; protein id: At1g07230.1
  misc_feature (1)..(401): Homolog of NCBI NO: 11358440 NR Description: hypothetical protein T8P19.120 - Arabidopsis >gi|6523092|emb|CAB62350.1| putative protein [Arabidopsis
  misc_feature (1)..(396): Homolog of NCBI NO: 15228577 NR Description: unknown protein; protein id: At3g03520.1, by cDNA: gi_17529015 [Arabidopsis thaliana] unknown protein [Arabidopsis thaliana]
MMGFVEQALSMPGNLSETVMKGFRPEAVPVYAELVKEFAVFDRWFSSIPGPTQPNRLFVYSATSHGSTSHVKKQLAQGYPQKTIFDSLHSNDIDFGIYFQNIPTTLFYRNLRQLKYIFNLHQYDLKFKKDAAKGKLPSLTVIEPRYFDLKGLPANDDHPSHDVANGQKLVKEVYEALRSSPQWNETLLVITYDEHGGFYDHVKTPYVGIPNPDGNTGPAPGFFKFDRLGVRVPTIMVSPWIQKGTVVSEAKGPTESSEYEHSSIPATIKKLFNLSSNFLTHRDAWAATFEDVVSHLTTPRTDCPMTLPEVAPMRATEPKEDAALSEFQGEVVQLAAVLNGDHFLSSFPEEIGKKMTVKQAHEYVKGATSRFIRASKEAMKLGADKSAIVDMRSSLTTRPHN

SEQ ID NO: 70259 - DNA, 1626 bp, Arabidopsis thaliana
  misc_feature (1)..(1626): Ceres Seq. ID no. 2701859
  misc_feature: MA Experiment ID: 20000182 Result: Down-regulated in Transcription
  misc_feature: MA Experiment 20000182 PARAMETER Experiment Name: At_2mM_SA_P Parameter: Age (day) Value: 14
  misc_feature: MA Experiment 20000182 PARAMETER Experiment Name: At_2mM_SA_P Parameter: Organism Value: A. thaliana
  misc_feature: MA Experiment 20000182 PARAMETER Experiment Name: At_2mM_SA_P Parameter: Plant Line Value: WS
  misc_feature: MA Experiment 20000182 PARAMETER Experiment Name: At_2mM_SA_P Parameter: Timepoint (hr) Value: 6
  misc_feature: MA Experiment 20000182 PARAMETER Experiment Name: At_2mM_SA_P Parameter: Tissue Value: Aerial
  misc_feature: MA Experiment 20000182 PARAMETER Experiment Name: At_2mM_SA_P Parameter: Treatment Value: 2mM SA vs. No Treatment
  misc_feature: MA Experiment ID: 20000184 Result: Down-regulated in Transcription
  misc_feature: MA Experiment 20000184 PARAMETER Experiment Name: At_Shoots__P Parameter: Age (day) Value: 7
  misc_feature: MA Experiment 20000184 PARAMETER Experiment Name: At_Shoots__P Parameter: Tissue Value: Shoots vs. Whole Plant
  misc_feature: MA Experiment ID: 20000234 Result: Up-regulated in Transcription
  misc_feature: MA Experiment 20000234 PARAMETER Experiment Name: At_Siliques_P Parameter: Age (day) Value: 21
  misc_feature: MA Experiment 20000234 PARAMETER Experiment Name: At_Siliques_P Parameter: Organism Value: A. thaliana
  misc_feature: MA Experiment 20000234 PARAMETER Experiment Name: At_Siliques_P Parameter: Plant Line Value: WS
  misc_feature: MA Experiment 20000234 PARAMETER Experiment Name: At_Siliques_P Parameter: Tissue Value: Less Than 5mm Siliques vs. Whole Plant
  misc_feature: MA Experiment ID: 20000794 Result: Down-regulated in Transcription
  misc_feature: MA Experiment 20000794 PARAMETER Experiment Name: At_Petals_P Parameter: Age (day) Value: 23-25 days
  misc_feature: MA Experiment 20000794 PARAMETER Experiment Name: At_Petals_P Parameter: Plant Line Value: WS
  misc_feature: MA Experiment 20000794 PARAMETER Experiment Name: At_Petals_P Parameter: Tissue Value: Petals vs. Whole plant
  misc_feature: MA Experiment ID: 20001906 Result: Down-regulated in Transcription
  misc_feature: MA Experiment 20001906 PARAMETER Experiment Name: At_Drought_Reproduction_P Parameter: Age (day) Value: 35
  misc_feature: MA Experiment 20001906 PARAMETER Experiment Name: At_Drought_Reproduction_P Parameter: Organism Value: A. thaliana
  misc_feature: MA Experiment 20001906 PARAMETER Experiment Name: At_Drought_Reproduction_P Parameter: Plant Line Value: WS
  misc_feature: MA Experiment 20001906 PARAMETER Experiment Name: At_Drought_Reproduction_P Parameter: Timepoint (day) Value: 5
  misc_feature: MA Experiment 20001906 PARAMETER Experiment Name: At_Drought_Reproduction_P Parameter: Tissue Value: Siliques
  misc_feature: MA Experiment 20001906 PARAMETER Experiment Name: At_Drought_Reproduction_P Parameter: Treatment Value: Drought vs. No Drought
  misc_feature: MA Experiment ID: 20001911 Result: Down-regulated in Transcription
  misc_feature: MA Experiment 20001911 PARAMETER Experiment Name: At_Drought_Reproduction_P Parameter: Age (day) Value: 40
  misc_feature: MA Experiment 20001911 PARAMETER Experiment Name: At_Drought_Reproduction_P Parameter: Organism Value: A. thaliana
  misc_feature: MA Experiment 20001911 PARAMETER Experiment Name: At_Drought_Reproduction_P Parameter: Plant Line Value: WS
  misc_feature: MA Experiment 20001911 PARAMETER Experiment Name: At_Drought_Reproduction_P Parameter: Timepoint (day) Value: 10
  misc_feature: MA Experiment 20001911 PARAMETER Experiment Name: At_Drought_Reproduction_P Parameter: Tissue Value: Flowers
  misc_feature: MA Experiment 20001911 PARAMETER Experiment Name: At_Drought_Reproduction_P Parameter: Treatment Value: Drought vs. No Drought
atggcattggcagaggagcagcatcagaattatcatgtggctgaggcgattccgggtacgcctgggatccatgatgtcaggattcaacccggttctgagaattccgggttctgtgttgatccggttggtgtttctaatgtacctggaattaggagagttgggttgagagctgaaatcgatacttctcctccattcggatcggttcaggaggcggtgactcgattcggtggtcgtggttattgggttcctttcaagcttgatgacactttccattacaatattgagattgaatataactcgagtctagaatttcataatcgaggttttagcaacatatataatggtgaatttgacattaagagaatggaggagcatgcagcggagcttgagaaggatctgattgtgaaagagcttgaaactttggatgttttagaagctcttggatcaaccaaaaggatcgttgaagatttgaagcggcagcttcagcaagaagcactgagatgctctgaccaactcagttcagatatcaaagagatgaacgatgagcattgccatcacaatcccatgtcatctcctgatttgatcttgatggaattgaagcaagctaagatgaatcttggtaaaaccatggacaaccttgtagtgatccagtcctctgttgaatctctgaataagaaaatgaaagaagagaaagacttccttgagaagacacgggctaagctaacgtatgggtttggtggaccggtatctctagctgaggagttgagtcggattaaggtaaaaccacaggttcaagatgaaccgttaagggagcaggttaagatggttgctgaagccgatgaaacgggtttaaacctgcagaacaagaacagtctgagaactgcagagatgagattggttgctgctaggaaaatggaagaagctgcgaaagcagcggaagcacttgcgattgctgaaattacaatgttatcatccaatggtgaaagccaggacgatgattcggaattttgctttccagagcctccaagatctcctgtgacaccaagaggactcaggattgataatgacttctccacggataagagttcaagacgagggattttgaagaagcttgaggaagctactgaaggagttaaacaaagtaagcaggctttagaagctgcgttaaaccgagtagagatcgctaatgtgaagcaacttgcagctgaaaatgctttccgcgggtggacaaaagactcattgaaaggcgataactttacacctttgaatcatacccgacgctcctttttcagccatttgaacaagcatcacgagccacttgacattctcccaaagccagtgttaaagtctaatatctcaatgcgtgatgttctaaggcgtaagcaagttccaaaggaagatgttgttgctccccaaagacagagccttgaagggcaaataccgaggcgaaatgtgaatttgagccaaatgttgaaggaactaaagcaggatgtgaagttttcggcacggggagagaaagaggaggtacatgaagagaaacagtacgtcacgcagaggagaaagtttgggttcatacacattacacttccactgcagaagcagagcaagaaaaaatccagcctttaa

SEQ ID NO: 70260 - protein, 541 aa, Arabidopsis thaliana
  peptide (1)..(541): Ceres Seq. ID no. 2701860
  misc_feature (62)..(389): Pfam Name: Plant protein of unknown function (DUF827) Pfam Description: Plant protein of unknown function (DUF827)
  misc_feature (1)..(541): Homolog of NCBI NO: 15226689 NR Description: hypothetical protein; protein id: At2g40480.1
  misc_feature (115)..(474): Homolog of NCBI NO: 15228874 NR Description: putative protein; protein id: At3g56270.1, by cDNA: 20787. [Arabidopsis thaliana] >gi|11357538|pir||T47744
  misc_feature (56)..(538): Homolog of NCBI NO: 15224495 NR Description: hypothetical protein; protein id: At2g38370.1
  misc_feature (271)..(538): Homolog of NCBI NO: 33146426 NR Description: myosin heavy chain-like [Oryza sativa (japonica
  misc_feature (121)..(272): Homolog of NCBI NO: 33146426 NR Description: myosin heavy chain-like [Oryza sativa (japonica
  misc_feature (54)..(77): Homolog of NCBI NO: 33146426 NR Description: myosin heavy chain-like [Oryza sativa (japonica
  misc_feature (126)..(327): Homolog of NCBI NO: 15230567 NR Description: putative protein; protein id: At3g51720.1, by cDNA: 99756., supported by cDNA: gi_17978990 [Arabidopsis
  misc_feature (55)..(87): Homolog of NCBI NO: 15230567 NR Description: putative protein; protein id: At3g51720.1, by cDNA: 99756., supported by cDNA: gi_17978990 [Arabidopsis
  misc_feature (126)..(327): Homolog of NCBI NO: 21618181 NR Description: unknown [Arabidopsis thaliana]
  misc_feature (55)..(87): Homolog of NCBI NO: 21618181 NR Description: unknown [Arabidopsis thaliana]
MALAEEQHQNYHVAEAIPGTPGIHDVRIQPGSENSGFCVDPVGVSNVPGIRRVGLRAEIDTSPPFGSVQEAVTRFGGRGYWVPFKLDDTFHYNIEIEYNSSLEFHNRGFSNIYNGEFDIKRMEEHAAELEKDLIVKELETLDVLEALGSTKRIVEDLKRQLQQEALRCSDQLSSDIKEMNDEHCHHNPMSSPDLILMELKQAKMNLGKTMDNLVVIQSSVESLNKKMKEEKDFLEKTRAKLTYGFGGPVSLAEELSRIKVKPQVQDEPLREQVKMVAEADETGLNLQNKNSLRTAEMRLVAARKMEEAAKAAEALAIAEITMLSSNGESQDDDSEFCFPEPPRSPVTPRGLRIDNDFSTDKSSRRGILKKLEEATEGVKQSKQALEAALNRVEIANVKQLAAENAFRGWTKDSLKGDNFTPLNHTRRSFFSHLNKHHEPLDILPKPVLKSNISMRDVLRRKQVPKEDVVAPQRQSLEGQIPRRNVNLSQMLKELKQDVKFSARGEKEEVHEEKQYVTQRRKFGFIHITLPLQKQSKKKSSL

SEQ ID NO: 70261 - protein, 420 aa, Arabidopsis thaliana
  peptide (1)..(420): Ceres Seq. ID no. 2701861
  misc_feature (1)..(268): Pfam Name: Plant protein of unknown function (DUF827) Pfam Description: Plant protein of unknown function (DUF827)
  misc_feature (1)..(420): Homolog of NCBI NO: 15226689 NR Description: hypothetical protein; protein id: At2g40480.1
  misc_feature (1)..(353): Homolog of NCBI NO: 15228874 NR Description: putative protein; protein id: At3g56270.1, by cDNA: 20787. [Arabidopsis thaliana] >gi|11357538|pir||T47744
  misc_feature (1)..(417): Homolog of NCBI NO: 15224495 NR Description: hypothetical protein; protein id: At2g38370.1
  misc_feature (150)..(417): Homolog of NCBI NO: 33146426 NR Description: myosin heavy chain-like [Oryza sativa (japonica
  misc_feature (1)..(151): Homolog of NCBI NO: 33146426 NR Description: myosin heavy chain-like [Oryza sativa (japonica
  misc_feature (5)..(206): Homolog of NCBI NO: 15230567 NR Description: putative protein; protein id: At3g51720.1, by cDNA: 99756., supported by cDNA: gi_17978990 [Arabidopsis
  misc_feature (5)..(206): Homolog of NCBI NO: 21618181 NR Description: unknown [Arabidopsis thaliana]
  misc_feature (1)..(119): Homolog of NCBI NO: 4433618 NR Description: putative myosin heavy chain [Dendrobium grex
  misc_feature (1)..(284): Homolog of NCBI NO: 15239100 NR Description: putative protein; protein id: At5g42880.1 thaliana] >gi|9758576|dbj|BAB09189.1|
MEEHAAELEKDLIVKELETLDVLEALGSTKRIVEDLKRQLQQEALRCSDQLSSDIKEMNDEHCHHNPMSSPDLILMELKQAKMNLGKTMDNLVVIQSSVESLNKKMKEEKDFLEKTRAKLTYGFGGPVSLAEELSRIKVKPQVQDEPLREQVKMVAEADETGLNLQNKNSLRTAEMRLVAARKMEEAAKAAEALAIAEITMLSSNGESQDDDSEFCFPEPPRSPVTPRGLRIDNDFSTDKSSRRGILKKLEEATEGVKQSKQALEAALNRVEIANVKQLAAENAFRGWTKDSLKGDNFTPLNHTRRSFFSHLNKHHEPLDILPKPVLKSNISMRDVLRRKQVPKEDVVAPQRQSLEGQIPRRNVNLSQMLKELKQDVKFSARGEKEEVHEEKQYVTQRRKFGFIHITLPLQKQSKKKSSL

SEQ ID NO: 70262 - protein, 363 aa, Arabidopsis thaliana
  peptide (1)..(363): Ceres Seq. ID no. 2701862
  misc_feature (1)..(211): Pfam Name: Plant protein of unknown function (DUF827) Pfam Description: Plant protein of unknown function (DUF827)
  misc_feature (1)..(363): Homolog of NCBI NO: 15226689 NR Description: hypothetical protein; protein id: At2g40480.1
  misc_feature (1)..(296): Homolog of NCBI NO: 15228874 NR Description: putative protein; protein id: At3g56270.1, by cDNA: 20787. [Arabidopsis thaliana] >gi|11357538|pir||T47744
  misc_feature (1)..(360): Homolog of NCBI NO: 15224495 NR Description: hypothetical protein; protein id: At2g38370.1
  misc_feature (93)..(360): Homolog of NCBI NO: 33146426 NR Description: myosin heavy chain-like [Oryza sativa (japonica
  misc_feature (1)..(94): Homolog of NCBI NO: 33146426 NR Description: myosin heavy chain-like [Oryza sativa (japonica
  misc_feature (1)..(149): Homolog of NCBI NO: 15230567 NR Description: putative protein; protein id: At3g51720.1, by cDNA: 99756., supported by cDNA: gi_17978990 [Arabidopsis
  misc_feature (1)..(149): Homolog of NCBI NO: 21618181 NR Description: unknown [Arabidopsis thaliana]
  misc_feature (1)..(62): Homolog of NCBI NO: 4433618 NR Description: putative myosin heavy chain [Dendrobium grex
  misc_feature (1)..(227): Homolog of NCBI NO: 15239100 NR Description: putative protein; protein id: At5g42880.1 thaliana] >gi|9758576|dbj|BAB09189.1|
MNDEHCHHNPMSSPDLILMELKQAKMNLGKTMDNLVVIQSSVESLNKKMKEEKDFLEKTRAKLTYGFGGPVSLAEELSRIKVKPQVQDEPLREQVKMVAEADETGLNLQNKNSLRTAEMRLVAARKMEEAAKAAEALAIAEITMLSSNGESQDDDSEFCFPEPPRSPVTPRGLRIDNDFSTDKSSRRGILKKLEEATEGVKQSKQALEAALNRVEIANVKQLAAENAFRGWTKDSLKGDNFTPLNHTRRSFFSHLNKHHEPLDILPKPVLKSNISMRDVLRRKQVPKEDVVAPQRQSLEGQIPRRNVNLSQMLKELKQDVKFSARGEKEEVHEEKQYVTQRRKFGFIHITLPLQKQSKKKSSL

SEQ ID NO: 70263 - DNA, 1017 bp, Arabidopsis thaliana
  misc_feature (1)..(1017): Ceres Seq. ID no. 2702062
  misc_feature: MA Experiment ID: 20001760 Result: Up-regulated in Transcription
  misc_feature: MA Experiment 20001760 PARAMETER Experiment Name: At_50mM_NH4NO3_L-to-H_P Parameter: Timepoint (hr) Value: 2
  misc_feature: MA Experiment 20001760 PARAMETER Experiment Name: At_50mM_NH4NO3_L-to-H_P Parameter: Tissue Value: Siliques
  misc_feature: MA Experiment 20001760 PARAMETER Experiment Name: At_50mM_NH4NO3_L-to-H_P Parameter: Treatment Value: 50mM NH4NO3 vs 100mM Mannitol
  misc_feature: Pfam Name: Pkinase_Tyr Pfam Description: Protein tyrosine kinase
atgtttttttttcttgtcatcacatatgtagcaaatcaaaagaatcaaaaaccacaagatcttgcaaagcctaaggagattcttcccattatagttccttccttgtcagtggatgaggttaatgaacagactgacaattttggaccaaattctctgattggtgagggatcttatggaagggtatactatgcaactctaaatgatggaaaagcagttgctttgaagaaactcgatcttgcacctgaagatgaaacaaacaccgagtttttaagccaggtttccatggtttcaagactaaagcatgagaatctcattcaactggtcggttattgtgttgatgaaaaccttcgtgttcttgcttatgagtttgcaacaatgggatcattgcacgatattctgcatggtaggaagggagttcaagatgcactaccaggtccaacacttgactggataacaagggtgaagatagccgttgaggcagctagaggtttagaataccttcatgagaaggttcagcctcaagtaatacatagagacataagatctagcaatatacttctttttgacgactatcaagcaaaaattgctgattttaatctttcaaatcaatctcctgataatgctgctcgtttacaatctacaagagttttgggcagctttggctattactctccagaatatgctatgactggagagttgacacataagagtgatgtatatggttttggggttgtacttctagagctcttgacagggaggaaaccagttgaccatacaatgccgcgaggccaacaaagtcttgtaacttgggctacaccgaaacttagtgaagatacagtagaggagtgtgttgatccaaagctaaagggagaatattctcctaaatcagtagctaagctagcagcggtggcagcattgtgtgtgcaatatgaatctaattgtagaccaaaaatgagtacagttgtgaaagctttgcaacaacttcttatagcgacaggctcaataccgcaattctaa

SEQ ID NO: 70264 - protein, 338 aa, Arabidopsis thaliana
  peptide (1)..(338): Ceres Seq. ID no. 2702063
  misc_feature: Pfam Name: Pkinase_Tyr Pfam Description: Protein tyrosine kinase
  misc_feature (1)..(338): Homolog of NCBI NO: 15224556 NR Description: putative protein kinase; protein id: At2g30730.1
  misc_feature (11)..(329): Homolog of NCBI NO: 15224557 NR Description: putative protein kinase; protein id: At2g30740.1
  misc_feature (6)..(336): Homolog of NCBI NO: 25287624 NR Description: probable protein kinase [imported] - Arabidopsis >gi|7523708|gb|AAF63147.1|AC011001_17 Putative protein kinase
  misc_feature (11)..(336): Homolog of NCBI NO: 15222170 NR Description: protein kinase interactor, putative; protein id: supported by cDNA: gi_13877994 [Arabidopsis thaliana]
  misc_feature (11)..(336): Homolog of NCBI NO: 13877995 NR Description: putative protein kinase interactor [Arabidopsis
  misc_feature (16)..(329): Homolog of NCBI NO: 11259776 NR Description: protein kinase-like protein - Arabidopsis thaliana
  misc_feature (16)..(329): Homolog of NCBI NO: 30694970 NR Description: serine/threonine protein kinase, putative
  misc_feature (16)..(329): Homolog of NCBI NO: 30694972 NR Description: serine/threonine protein kinase, putative
MFFFLVITYVANQKNQKPQDLAKPKEILPIIVPSLSVDEVNEQTDNFGPNSLIGEGSYGRVYYATLNDGKAVALKKLDLAPEDETNTEFLSQVSMVSRLKHENLIQLVGYCVDENLRVLAYEFATMGSLHDILHGRKGVQDALPGPTLDWITRVKIAVEAARGLEYLHEKVQPQVIHRDIRSSNILLFDDYQAKIADFNLSNQSPDNAARLQSTRVLGSFGYYSPEYAMTGELTHKSDVYGFGVVLLELLTGRKPVDHTMPRGQQSLVTWATPKLSEDTVEECVDPKLKGEYSPKSVAKLAAVAALCVQYESNCRPKMSTVVKALQQLLIATGSIPQF

SEQ ID NO: 70265 - protein, 244 aa, Arabidopsis thaliana
  peptide (1)..(244): Ceres Seq. ID no. 2702064
  misc_feature: Pfam Name: Pkinase_Tyr Pfam Description: Protein tyrosine kinase
  misc_feature (1)..(244): Homolog of NCBI NO: 15224556 NR Description: putative protein kinase; protein id: At2g30730.1
  misc_feature (1)..(235): Homolog of NCBI NO: 15224557 NR Description: putative protein kinase; protein id: At2g30740.1
  misc_feature (1)..(242): Homolog of NCBI NO: 25287624 NR Description: probable protein kinase [imported] - Arabidopsis >gi|7523708|gb|AAF63147.1|AC011001_17 Putative protein kinase
  misc_feature (1)..(242): Homolog of NCBI NO: 15222170 NR Description: protein kinase interactor, putative; protein id: supported by cDNA: gi_13877994 [Arabidopsis thaliana]
  misc_feature (1)..(242): Homolog of NCBI NO: 13877995 NR Description: putative protein kinase interactor [Arabidopsis
  misc_feature (1)..(235): Homolog of NCBI NO: 11259776 NR Description: protein kinase-like protein - Arabidopsis thaliana
  misc_feature (1)..(235): Homolog of NCBI NO: 30694970 NR Description: serine/threonine protein kinase, putative
  misc_feature (1)..(235): Homolog of NCBI NO: 30694972 NR Description: serine/threonine protein kinase, putative
MVSRLKHENLIQLVGYCVDENLRVLAYEFATMGSLHDILHGRKGVQDALPGPTLDWITRVKIAVEAARGLEYLHEKVQPQVIHRDIRSSNILLFDDYQAKIADFNLSNQSPDNAARLQSTRVLGSFGYYSPEYAMTGELTHKSDVYGFGVVLLELLTGRKPVDHTMPRGQQSLVTWATPKLSEDTVEECVDPKLKGEYSPKSVAKLAAVAALCVQYESNCRPKMSTVVKALQQLLIATGSIPQF

SEQ ID NO: 70266 - protein, 213 aa, Arabidopsis thaliana
  peptide (1)..(213): Ceres Seq. ID no. 2702065
  misc_feature: Pfam Name: Pkinase_Tyr Pfam Description: Protein tyrosine kinase
  misc_feature (1)..(213): Homolog of NCBI NO: 15224556 NR Description: putative protein kinase; protein id: At2g30730.1
  misc_feature (1)..(204): Homolog of NCBI NO: 15224557 NR Description: putative protein kinase; protein id: At2g30740.1
  misc_feature (1)..(211): Homolog of NCBI NO: 25287624 NR Description: probable protein kinase [imported] - Arabidopsis >gi|7523708|gb|AAF63147.1|AC011001_17 Putative protein kinase
  misc_feature (1)..(211): Homolog of NCBI NO: 15222170 NR Description: protein kinase interactor, putative; protein id: supported by cDNA: gi_13877994 [Arabidopsis thaliana]
  misc_feature (1)..(211): Homolog of NCBI NO: 13877995 NR Description: putative protein kinase interactor [Arabidopsis
  misc_feature (1)..(204): Homolog of NCBI NO: 11259776 NR Description: protein kinase-like protein - Arabidopsis thaliana
  misc_feature (1)..(204): Homolog of NCBI NO: 30694970 NR Description: serine/threonine protein kinase, putative
  misc_feature (1)..(204): Homolog of NCBI NO: 30694972 NR Description: serine/threonine protein kinase, putative
MGSLHDILHGRKGVQDALPGPTLDWITRVKIAVEAARGLEYLHEKVQPQVIHRDIRSSNILLFDDYQAKIADFNLSNQSPDNAARLQSTRVLGSFGYYSPEYAMTGELTHKSDVYGFGVVLLELLTGRKPVDHTMPRGQQSLVTWATPKLSEDTVEECVDPKLKGEYSPKSVAKLAAVAALCVQYESNCRPKMSTVVKALQQLLIATGSIPQF

SEQ ID NO: 70267 - DNA, 1317 bp, Arabidopsis thaliana
  misc_feature (1)..(1317): Ceres Seq. ID no. 2702066
  misc_feature: MA Experiment ID: 20000173 Result: Down-regulated in Transcription
  misc_feature: MA Experiment 20000173 PARAMETER Experiment Name: At_42deg_Heat_P Parameter: Age (day) Value: 14
  misc_feature: MA Experiment 20000173 PARAMETER Experiment Name: At_42deg_Heat_P Parameter: Organism Value: A. thaliana
  misc_feature: MA Experiment 20000173 PARAMETER Experiment Name: At_42deg_Heat_P Parameter: Plant Line Value: WS
  misc_feature: MA Experiment 20000173 PARAMETER Experiment Name: At_42deg_Heat_P Parameter: Temperature (deg C) Value: 42 vs. 22
  misc_feature: MA Experiment 20000173 PARAMETER Experiment Name: At_42deg_Heat_P Parameter: Timepoint (hr) Value: 6
  misc_feature: MA Experiment 20000173 PARAMETER Experiment Name: At_42deg_Heat_P Parameter: Tissue Value: Aerial
  misc_feature: MA Experiment ID: 20000185 Result: Down-regulated in Transcription
  misc_feature: MA Experiment 20000185 PARAMETER Experiment Name: At_Roots__P Parameter: Age (day) Value: 7 vs. 21
  misc_feature: MA Experiment 20000185 PARAMETER Experiment Name: At_Roots__P Parameter: Organism Value: A. thaliana
  misc_feature: MA Experiment 20000185 PARAMETER Experiment Name: At_Roots__P Parameter: Tissue Value: Roots vs. Whole Plant
  misc_feature: MA Experiment ID: 20001905 Result: Up-regulated in Transcription
  misc_feature: MA Experiment 20001905 PARAMETER Experiment Name: At_Drought_Reproduction_P Parameter: Age (day) Value: 40
  misc_feature: MA Experiment 20001905 PARAMETER Experiment Name: At_Drought_Reproduction_P Parameter: Organism Value: A. thaliana
  misc_feature: MA Experiment 20001905 PARAMETER Experiment Name: At_Drought_Reproduction_P Parameter: Plant Line Value: WS
  misc_feature: MA Experiment 20001905 PARAMETER Experiment Name: At_Drought_Reproduction_P Parameter: Timepoint (day) Value: 10
  misc_feature: MA Experiment 20001905 PARAMETER Experiment Name: At_Drought_Reproduction_P Parameter: Tissue Value: Rosettes
  misc_feature: MA Experiment 20001905 PARAMETER Experiment Name: At_Drought_Reproduction_P Parameter: Treatment Value: Drought vs. No Drought
  misc_feature: Pfam Name: 4HBT Pfam Description: Thioesterase superfamily
atgagatcttcagcgggaaagcttctctcccattctctacggagaaaccgcgggaaacttggtgatggattttggattccggctacgaggtctcagaagatgtggaattcgacggtaccgtcagatgaaaatcctgatcaaaattcgatcgatgcaggatcttcaatgcggaaaccaattagcttatggcctggaatgtatcattctccggtgactaatgcgctttgggaagctcgtcgtaatatgttcgaaattcctaccggagacgacgcttctcagtcaaaattgacggctaaatctccgtctcgaagccgaacgaatccttggaatgagattcgtactggtaaattggttgaagatcttgacgctcttgctggaaccatctccttcaagcattgtggtggtgacagcagtgcgagatcgatgattttggtgactgcttcagtggataggattatcatgaaaagacctattcgtgtagatactgaccttagtatagttggtgctgttacatgggttggtagatcatccatggagatgcaattacaagtactccaaattcaagataccaacaactcctctgagtcggttgcccttgaagcaaactttacattcgtggctcgggatgctcagacaggcaagtcagctccaattaaccaagtcgtgccagaaactgagcatgaaaaatttctgtggaaagaggcagaagagaggaacaaactacgaaaacaaaagagagcacagggtaaagaagagcatgagaagttgaaggacttagagaggctaaatgagttattagcagaaggacgagtattcctggacatgccagctcttgcagatcggaacagcatcctaattaaggatacttcccatgaaaactcattgatctgccagccacagcaacgaaatattcatggcagaatttttggaggcttcttgatgcgcaaagcttttgagttggctttctccaatgcttacaccttcgctggggtttcaccacgttttctcgaagttgatcgcgtcgattttatcaaaccagtggatgttggaaatttccttcgtttcaagtcacgcgtattgtacacagaagcaaccagttcagctgaaccgctgataaacatcgaggttgtagctcatgttacaagtccagagctcagatccagcgaagtctccaacaggttttacttcaccttcagtgtgagacctgaggccatgaaagatggattgaaaataagaaatgtggttccagcaacagaagaagaagctagaagagtgatcgagcgcatggacgcagagagacccatctcattgccttga

SEQ ID NO: 70268 - protein, 438 aa, Arabidopsis thaliana
  peptide (1)..(438): Ceres Seq. ID no. 2702067
  misc_feature: Pfam Name: 4HBT Pfam Description: Thioesterase superfamily
  misc_feature (1)..(438): Homolog of NCBI NO: 15224555 NR Description: hypothetical protein; protein id: At2g30720.1
  misc_feature (107)..(432): Homolog of NCBI NO: 15238956 NR Description: putative protein; protein id: At5g48370.1
  misc_feature (57)..(106): Homolog of NCBI NO: 15238956 NR Description: putative protein; protein id: At5g48370.1
  misc_feature (110)..(403): Homolog of NCBI NO: 31980998 NR Description: acyl-Coenzyme A thioesterase 2, mitochondrial;
  misc_feature (110)..(403): Homolog of NCBI NO: 34880562 NR Description: similar to acyl-CoA thioesterase [Rattus
  misc_feature (110)..(403): Homolog of NCBI NO: 12331400 NR Description: acyl-Coenzyme A thioesterase 3, mitochondrial;
  misc_feature (110)..(403): Homolog of NCBI NO: 6912518 NR Description: Mitochondrial Acyl-CoA Thioesterase [Homo sapiens]
  misc_feature (110)..(400): Homolog of NCBI NO: 40741147 NR Description: hypothetical protein AN4420.2 [Aspergillus
  misc_feature (195)..(433): Homolog of NCBI NO: 27528374 NR Description: acyl-CoA thioester hydrolase [Parasitella
  misc_feature (36)..(209): Homolog of NCBI NO: 27528374 NR Description: acyl-CoA thioester hydrolase [Parasitella
MRSSAGKLLSHSLRRNRGKLGDGFWIPATRSQKMWNSTVPSDENPDQNSIDAGSSMRKPISLWPGMYHSPVTNALWEARRNMFEIPTGDDASQSKLTAKSPSRSRTNPWNEIRTGKLVEDLDALAGTISFKHCGGDSSARSMILVTASVDRIIMKRPIRVDTDLSIVGAVTWVGRSSMEMQLQVLQIQDTNNSSESVALEANFTFVARDAQTGKSAPINQVVPETEHEKFLWKEAEERNKLRKQKRAQGKEEHEKLKDLERLNELLAEGRVFLDMPALADRNSILIKDTSHENSLICQPQQRNIHGRIFGGFLMRKAFELAFSNAYTFAGVSPRFLEVDRVDFIKPVDVGNFLRFKSRVLYTEATSSAEPLINIEVVAHVTSPELRSSEVSNRFYFTFSVRPEAMKDGLKIRNVVPATEEEARRVIERMDAERPISLP

SEQ ID NO: 70269 - protein, 405 aa, Arabidopsis thaliana
  peptide (1)..(405): Ceres Seq. ID no. 2702068
  misc_feature: Pfam Name: 4HBT Pfam Description: Thioesterase superfamily
  misc_feature (1)..(405): Homolog of NCBI NO: 15224555 NR Description: hypothetical protein; protein id: At2g30720.1
  misc_feature (74)..(399): Homolog of NCBI NO: 15238956 NR Description: putative protein; protein id: At5g48370.1
  misc_feature (24)..(73): Homolog of NCBI NO: 15238956 NR Description: putative protein; protein id: At5g48370.1
  misc_feature (77)..(370): Homolog of NCBI NO: 31980998 NR Description: acyl-Coenzyme A thioesterase 2, mitochondrial;
  misc_feature (77)..(370): Homolog of NCBI NO: 34880562 NR Description: similar to acyl-CoA thioesterase [Rattus
  misc_feature (77)..(370): Homolog of NCBI NO: 12331400 NR Description: acyl-Coenzyme A thioesterase 3, mitochondrial;
  misc_feature (77)..(370): Homolog of NCBI NO: 6912518 NR Description: Mitochondrial Acyl-CoA Thioesterase [Homo sapiens]
  misc_feature (77)..(367): Homolog of NCBI NO: 40741147 NR Description: hypothetical protein AN4420.2 [Aspergillus
  misc_feature (162)..(400): Homolog of NCBI NO: 27528374 NR Description: acyl-CoA thioester hydrolase [Parasitella
  misc_feature (3)..(176): Homolog of NCBI NO: 27528374 NR Description: acyl-CoA thioester hydrolase [Parasitella
MWNSTVPSDENPDQNSIDAGSSMRKPISLWPGMYHSPVTNALWEARRNMFEIPTGDDASQSKLTAKSPSRSRTNPWNEIRTGKLVEDLDALAGTISFKHCGGDSSARSMILVTASVDRIIMKRPIRVDTDLSIVGAVTWVGRSSMEMQLQVLQIQDTNNSSESVALEANFTFVARDAQTGKSAPINQVVPETEHEKFLWKEAEERNKLRKQKRAQGKEEHEKLKDLERLNELLAEGRVFLDMPALADRNSILIKDTSHENSLICQPQQRNIHGRIFGGFLMRKAFELAFSNAYTFAGVSPRFLEVDRVDFIKPVDVGNFLRFKSRVLYTEATSSAEPLINIEVVAHVTSPELRSSEVSNRFYFTFSVRPEAMKDGLKIRNVVPATEEEARRVIERMDAERPISLP

SEQ ID NO: 70270 - protein, 383 aa, Arabidopsis thaliana
  peptide (1)..(383): Ceres Seq. ID no. 2702069
  misc_feature: Pfam Name: 4HBT Pfam Description: Thioesterase superfamily
  misc_feature (1)..(383): Homolog of NCBI NO: 15224555 NR Description: hypothetical protein; protein id: At2g30720.1
  misc_feature (52)..(377): Homolog of NCBI NO: 15238956 NR Description: putative protein; protein id: At5g48370.1
  misc_feature (2)..(51): Homolog of NCBI NO: 15238956 NR Description: putative protein; protein id: At5g48370.1
  misc_feature (55)..(348): Homolog of NCBI NO: 31980998 NR Description: acyl-Coenzyme A thioesterase 2, mitochondrial;
  misc_feature (55)..(348): Homolog of NCBI NO: 34880562 NR Description: similar to acyl-CoA thioesterase [Rattus
  misc_feature (55)..(348): Homolog of NCBI NO: 12331400 NR Description: acyl-Coenzyme A thioesterase 3, mitochondrial;
  misc_feature (55)..(348): Homolog of NCBI NO: 6912518 NR Description: Mitochondrial Acyl-CoA Thioesterase [Homo sapiens]
  misc_feature (55)..(345): Homolog of NCBI NO: 40741147 NR Description: hypothetical protein AN4420.2 [Aspergillus
  misc_feature (140)..(378): Homolog of NCBI NO: 27528374 NR Description: acyl-CoA thioester hydrolase [Parasitella
  misc_feature (1)..(154): Homolog of NCBI NO: 27528374 NR Description: acyl-CoA thioester hydrolase [Parasitella
MRKPISLWPGMYHSPVTNALWEARRNMFEIPTGDDASQSKLTAKSPSRSRTNPWNEIRTGKLVEDLDALAGTISFKHCGGDSSARSMILVTASVDRIIMKRPIRVDTDLSIVGAVTWVGRSSMEMQLQVLQIQDTNNSSESVALEANFTFVARDAQTGKSAPINQVVPETEHEKFLWKEAEERNKLRKQKRAQGKEEHEKLKDLERLNELLAEGRVFLDMPALADRNSILIKDTSHENSLICQPQQRNIHGRIFGGFLMRKAFELAFSNAYTFAGVSPRFLEVDRVDFIKPVDVGNFLRFKSRVLYTEATSSAEPLINIEVVAHVTSPELRSSEVSNRFYFTFSVRPEAMKDGLKIRNVVPATEEEARRVIERMDAERPISLP

SEQ ID NO: 70271 - DNA, 2673 bp, Arabidopsis thaliana
  misc_feature (1)..(2673): Ceres Seq. ID no. 2702152
  misc_feature: MA Experiment ID: 20000307 Result: Down-regulated in Transcription
  misc_feature: MA Experiment 20000307 PARAMETER Experiment Name: At_Germinating_Seeds_Sub_P Parameter: Age (hr) Value: 24 vs. 0
  misc_feature: MA Experiment 20000307 PARAMETER Experiment Name: At_Germinating_Seeds_Sub_P Parameter: Organism Value: A. thaliana
  misc_feature: MA Experiment 20000307 PARAMETER Experiment Name: At_Germinating_Seeds_Sub_P Parameter: Plant Line Value: WS
  misc_feature: MA Experiment 20000307 PARAMETER Experiment Name: At_Germinating_Seeds_Sub_P Parameter: Tissue Value: Germinating Seeds
  misc_feature: MA Experiment ID: 20000314 Result: Up-regulated in Transcription
  misc_feature: MA Experiment 20000314 PARAMETER Experiment Name: At_14day_Shoots-Roots_Sub_P Parameter: Age (day) Value: 14
  misc_feature: MA Experiment 20000314 PARAMETER Experiment Name: At_14day_Shoots-Roots_Sub_P Parameter: Organism Value: A. thaliana
  misc_feature: MA Experiment 20000314 PARAMETER Experiment Name: At_14day_Shoots-Roots_Sub_P Parameter: Plant Line Value: WS
  misc_feature: MA Experiment 20000314 PARAMETER Experiment Name: At_14day_Shoots-Roots_Sub_P Parameter: Tissue Value: Roots vs. Whole Plant
atggaagatgatggtggtagtgatggaggcgaaggaaatggtgggttttcacctaattctagctttggggcattcgctgacactgccatggatttggatttcatggatgaactcttgtttgatggatgttggctagagacaacagatagtaagagcttgaagcagacagaacaatctccttcagcttctaccgccatgaatgacaatagccctttcctctgctttggtgagaatccatctcaagataatttctctaatgaagaaacagagagaatgtttcctcaggctgaaaagtttctcctagaagaagctgaggtgggaaaaagttggtggattgctccaagtgcaagtgaaggcccgtcttcatctgtgaaggagaggctactacaagctattagtggtcttaacgaggcggtgcaagataaggacttcttggttcagatatgggtgccaattcagcaggaagggaagagctttcttactacttgggctcagccacatttattcaaccaagaatactccagccttgcagaatacagacatgtttcagagacttataatttcccggctgatgagggtatgaaagattttgtgggtcttcccggtcgtgttttcttgcagaagtttcctgagtggactcctgatgtgcgtttctttagaagagatgaatatccacgcatcaaagaagcacaaaagtgtgatgttcgtggttcacttgcccttcctgttttcgaaagaggtagtgggacttgtttgggtgttgttgagatcgtcacaacaactcagaagatgaattaccggcaagaacttgagaagatgtgtaaagctcttgaggtctatagtgatttctactgtgctgcattacctgaaataaaagatttcctggccacaatctgcagatcatatgattttcctctagctttgtcatgggcgccgtgtgctcggcaagggaaagttggttcccgacattctgatgagaacttctctgagtgtgtttcaacaatcgattctgcttgttctgtccccgacgaacagagcaaaagtttttgggaggcatgctctgaacaccatctgctccagggggaaggcattgttgggaaagcatttgaagccaccaaactcttttttgtgcccgaagtggccacatttagcaagactaactacccccttgcacaccacgccaagatatctggactacatgctgctttagcagttccattaaagagcaaatctggtttggttgagtttgtgttggaatttttctttccgaaagcatgccttgacactgaagcgcaacaggaaatgctcaagtcactatgtgtgacactgcagcaagatttcaggagttcaaatcttttcatcaaagacctagagttagaagtcgtattacctgtaagagagacaatgctcttctcagaaaacctgctatgtggagcagaaaccgtagagtcgttgacagaaattcaaatgcaagaatcctcatggatcgcccacatgataaaggcaaacgagaagggtaaagatgtatcactttcttgggagtaccagaaagaagatcctaaagagctctcatctggccgggagaacagtcagcttgatccagtccccaataatgttcctttagaagctgagcaattacagcaagcatcaactccaggactcagagtcgacatcggtccaagcacagaatcagcttcgactggtgggggaaatatgttaagcagtaggagaccaggggagaaaaaaagagcaaaaacagaaaagaccattggcttggaggttcttcgacaatactttgctggaagcctcaaggatgcagccaagagcattggtgtttgtccaactaccttgaaaaggatatgcaggcaacatggaataatgcgatggccctcccgaaaaatcaagaaggttgggcattcgttgaagaaactccaactagttatggactctgtccaaggtgcgcagggctctatccaactcgattcattctatacaagcttcccagagttgaactccccaaatatgtctagcaatggcccttccttgaagagtaatgaacagccaagtcatttgaatgctcaaaccgataatggtattatggcagaggaaaaccccaggtcaccatcatcttcttgcagcaagagctctggttcaagcaacaataatgagaatactggaaacattctagttgctgaggatgctgatgcggtgttaaagagagctcatagcgaagcacaactgcataatgtgaatcaggaggaaacaaaatgtcttgcaagaacccagagccataaaacattcaaggagcctcttgttcttgataattcatctccattaacaggtagtagcaacacgagtttaagagctagaggtgccatcaaagtgaaagcgacatttggtgaggccagaatacggtttaccttactcccgagttggggcttcgcagagctgaagcaagagattgctaggcgtttcaacatagatgacatttcctggtttgaccttaagtacctggatgatgataaggagtgggttcttctgacatgtgaagcggatctcgtggaatgcattgacatatatagattaacacagacccacacaattaaaataagtctgaacgaagcttctcaagtcaagctaagtggttcttttggcaacactggtctttcctga

SEQ ID NO: 70272 - protein, 890 aa, Arabidopsis thaliana
  peptide (1)..(890): Ceres Seq. ID no. 2702153
  misc_feature (792)..(875): Pfam Name: PB1 domain Pfam Description: PB1 domain
  misc_feature (294)..(611): Homolog of NCBI NO: 7486018 NR Description: hypothetical protein F23E12.170 - Arabidopsis >gi|3080423|emb|CAA18742.1| putative protein [Arabidopsis >gi|7270479|emb|CAB80244.1| putative protein [Arabidopsis
  misc_feature (95)..(278): Homolog of NCBI NO: 7486018 NR Description: hypothetical protein F23E12.170 - Arabidopsis >gi|3080423|emb|CAA18742.1| putative protein [Arabidopsis >gi|7270479|emb|CAB80244.1| putative protein [Arabidopsis
  misc_feature (4)..(94): Homolog of NCBI NO: 7486018 NR Description: hypothetical protein F23E12.170 - Arabidopsis >gi|3080423|emb|CAA18742.1| putative protein [Arabidopsis >gi|7270479|emb|CAB80244.1| putative protein [Arabidopsis
  misc_feature (505)..(882): Homolog of NCBI NO: 7486018 NR Description: hypothetical protein F23E12.170 - Arabidopsis >gi|3080423|emb|CAA18742.1| putative protein [Arabidopsis >gi|7270479|emb|CAB80244.1| putative protein [Arabidopsis
  misc_feature (494)..(727): Homolog of NCBI NO: 23504757 NR Description: nodule inception protein [Pisum sativum]
  misc_feature (725)..(890): Homolog of NCBI NO: 23504757 NR Description: nodule inception protein [Pisum sativum]
  misc_feature (12)..(151): Homolog of NCBI NO: 23504757 NR Description: nodule inception protein [Pisum sativum]
  misc_feature (331)..(454): Homolog of NCBI NO: 23504757 NR Description: nodule inception protein [Pisum sativum]
  misc_feature (210)..(283): Homolog of NCBI NO: 23504757 NR Description: nodule inception protein [Pisum sativum]
  misc_feature (276)..(316): Homolog of NCBI NO: 23504757 NR Description: nodule inception protein [Pisum sativum]
MEDDGGSDGGEGNGGFSPNSSFGAFADTAMDLDFMDELLFDGCWLETTDSKSLKQTEQSPSASTAMNDNSPFLCFGENPSQDNFSNEETERMFPQAEKFLLEEAEVGKSWWIAPSASEGPSSSVKERLLQAISGLNEAVQDKDFLVQIWVPIQQEGKSFLTTWAQPHLFNQEYSSLAEYRHVSETYNFPADEGMKDFVGLPGRVFLQKFPEWTPDVRFFRRDEYPRIKEAQKCDVRGSLALPVFERGSGTCLGVVEIVTTTQKMNYRQELEKMCKALEVYSDFYCAALPEIKDFLATICRSYDFPLALSWAPCARQGKVGSRHSDENFSECVSTIDSACSVPDEQSKSFWEACSEHHLLQGEGIVGKAFEATKLFFVPEVATFSKTNYPLAHHAKISGLHAALAVPLKSKSGLVEFVLEFFFPKACLDTEAQQEMLKSLCVTLQQDFRSSNLFIKDLELEVVLPVRETMLFSENLLCGAETVESLTEIQMQESSWIAHMIKANEKGKDVSLSWEYQKEDPKELSSGRENSQLDPVPNNVPLEAEQLQQASTPGLRVDIGPSTESASTGGGNMLSSRRPGEKKRAKTEKTIGLEVLRQYFAGSLKDAAKSIGVCPTTLKRICRQHGIMRWPSRKIKKVGHSLKKLQLVMDSVQGAQGSIQLDSFYTSFPELNSPNMSSNGPSLKSNEQPSHLNAQTDNGIMAEENPRSPSSSCSKSSGSSNNNENTGNILVAEDADAVLKRAHSEAQLHNVNQEETKCLARTQSHKTFKEPLVLDNSSPLTGSSNTSLRARGAIKVKATFGEARIRFTLLPSWGFAELKQEIARRFNIDDISWFDLKYLDDDKEWVLLTCEADLVECIDIYRLTQTHTIKISLNEASQVKLSGSFGNTGLS

SEQ ID NO: 70273 - protein, 861 aa, Arabidopsis thaliana
  peptide (1)..(861): Ceres Seq. ID no. 2702154
  misc_feature (763)..(846): Pfam Name: PB1 domain Pfam Description: PB1 domain
  misc_feature (265)..(582): Homolog of NCBI NO: 7486018 NR Description: hypothetical protein F23E12.170 - Arabidopsis >gi|3080423|emb|CAA18742.1| putative protein [Arabidopsis >gi|7270479|emb|CAB80244.1| putative protein [Arabidopsis
  misc_feature (66)..(249): Homolog of NCBI NO: 7486018 NR Description: hypothetical protein F23E12.170 - Arabidopsis >gi|3080423|emb|CAA18742.1| putative protein [Arabidopsis >gi|7270479|emb|CAB80244.1| putative protein [Arabidopsis
  misc_feature (1)..(65): Homolog of NCBI NO: 7486018 NR Description: hypothetical protein F23E12.170 - Arabidopsis >gi|3080423|emb|CAA18742.1| putative protein [Arabidopsis >gi|7270479|emb|CAB80244.1| putative protein [Arabidopsis
  misc_feature (476)..(853): Homolog of NCBI NO: 7486018 NR Description: hypothetical protein F23E12.170 - Arabidopsis >gi|3080423|emb|CAA18742.1| putative protein [Arabidopsis >gi|7270479|emb|CAB80244.1| putative protein [Arabidopsis
  misc_feature (465)..(698): Homolog of NCBI NO: 23504757 NR Description: nodule inception protein [Pisum sativum]
  misc_feature (696)..(861): Homolog of NCBI NO: 23504757 NR Description: nodule inception protein [Pisum sativum]
  misc_feature (1)..(122): Homolog of NCBI NO: 23504757 NR Description: nodule inception protein [Pisum sativum]
  misc_feature (302)..(425): Homolog of NCBI NO: 23504757 NR Description: nodule inception protein [Pisum sativum]
  misc_feature (181)..(254): Homolog of NCBI NO: 23504757 NR Description: nodule inception protein [Pisum sativum]
  misc_feature (247)..(287): Homolog of NCBI NO: 23504757 NR Description: nodule inception protein [Pisum sativum]
MDLDFMDELLFDGCWLETTDSKSLKQTEQSPSASTAMNDNSPFLCFGENPSQDNFSNEETERMFPQAEKFLLEEAEVGKSWWIAPSASEGPSSSVKERLLQAISGLNEAVQDKDFLVQIWVPIQQEGKSFLTTWAQPHLFNQEYSSLAEYRHVSETYNFPADEGMKDFVGLPGRVFLQKFPEWTPDVRFFRRDEYPRIKEAQKCDVRGSLALPVFERGSGTCLGVVEIVTTTQKMNYRQELEKMCKALEVYSDFYCAALPEIKDFLATICRSYDFPLALSWAPCARQGKVGSRHSDENFSECVSTIDSACSVPDEQSKSFWEACSEHHLLQGEGIVGKAFEATKLFFVPEVATFSKTNYPLAHHAKISGLHAALAVPLKSKSGLVEFVLEFFFPKACLDTEAQQEMLKSLCVTLQQDFRSSNLFIKDLELEVVLPVRETMLFSENLLCGAETVESLTEIQMQESSWIAHMIKANEKGKDVSLSWEYQKEDPKELSSGRENSQLDPVPNNVPLEAEQLQQASTPGLRVDIGPSTESASTGGGNMLSSRRPGEKKRAKTEKTIGLEVLRQYFAGSLKDAAKSIGVCPTTLKRICRQHGIMRWPSRKIKKVGHSLKKLQLVMDSVQGAQGSIQLDSFYTSFPELNSPNMSSNGPSLKSNEQPSHLNAQTDNGIMAEENPRSPSSSCSKSSGSSNNNENTGNILVAEDADAVLKRAHSEAQLHNVNQEETKCLARTQSHKTFKEPLVLDNSSPLTGSSNTSLRARGAIKVKATFGEARIRFTLLPSWGFAELKQEIARRFNIDDISWFDLKYLDDDKEWVLLTCEADLVECIDIYRLTQTHTIKISLNEASQVKLSGSFGNTGLS

SEQ ID NO: 70274 - protein, 856 aa, Arabidopsis thaliana
  peptide (1)..(856): Ceres Seq. ID no. 2702155
  misc_feature (758)..(841): Pfam Name: PB1 domain Pfam Description: PB1 domain
  misc_feature (260)..(577): Homolog of NCBI NO: 7486018 NR Description: hypothetical protein F23E12.170 - Arabidopsis >gi|3080423|emb|CAA18742.1| putative protein [Arabidopsis >gi|7270479|emb|CAB80244.1| putative protein [Arabidopsis
  misc_feature (61)..(244): Homolog of NCBI NO: 7486018 NR Description: hypothetical protein F23E12.170 - Arabidopsis >gi|3080423|emb|CAA18742.1| putative protein [Arabidopsis >gi|7270479|emb|CAB80244.1| putative protein [Arabidopsis
  misc_feature (1)..(60): Homolog of NCBI NO: 7486018 NR Description: hypothetical protein F23E12.170 - Arabidopsis >gi|3080423|emb|CAA18742.1| putative protein [Arabidopsis >gi|7270479|emb|CAB80244.1| putative protein [Arabidopsis
  misc_feature (471)..(848): Homolog of NCBI NO: 7486018 NR Description: hypothetical protein F23E12.170 - Arabidopsis >gi|3080423|emb|CAA18742.1| putative protein [Arabidopsis >gi|7270479|emb|CAB80244.1| putative protein [Arabidopsis
  misc_feature (460)..(693): Homolog of NCBI NO: 23504757 NR Description: nodule inception protein [Pisum sativum]
  misc_feature (691)..(856): Homolog of NCBI NO: 23504757 NR Description: nodule inception protein [Pisum sativum]
  misc_feature (1)..(117): Homolog of NCBI NO: 23504757 NR Description: nodule inception protein [Pisum sativum]
  misc_feature (297)..(420): Homolog of NCBI NO: 23504757 NR Description: nodule inception protein [Pisum sativum]
  misc_feature (176)..(249): Homolog of NCBI NO: 23504757 NR Description: nodule inception protein [Pisum sativum]
  misc_feature (242)..(282): Homolog of NCBI NO: 23504757 NR Description: nodule inception protein [Pisum sativum]
MDELLFDGCWLETTDSKSLKQTEQSPSASTAMNDNSPFLCFGENPSQDNFSNEETERMFPQAEKFLLEEAEVGKSWWIAPSASEGPSSSVKERLLQAISGLNEAVQDKDFLVQIWVPIQQEGKSFLTTWAQPHLFNQEYSSLAEYRHVSETYNFPADEGMKDFVGLPGRVFLQKFPEWTPDVRFFRRDEYPRIKEAQKCDVRGSLALPVFERGSGTCLGVVEIVTTTQKMNYRQELEKMCKALEVYSDFYCAALPEIKDFLATICRSYDFPLALSWAPCARQGKVGSRHSDENFSECVSTIDSACSVPDEQSKSFWEACSEHHLLQGEGIVGKAFEATKLFFVPEVATFSKTNYPLAHHAKISGLHAALAVPLKSKSGLVEFVLEFFFPKACLDTEAQQEMLKSLCVTLQQDFRSSNLFIKDLELEVVLPVRETMLFSENLLCGAETVESLTEIQMQESSWIAHMIKANEKGKDVSLSWEYQKEDPKELSSGRENSQLDPVPNNVPLEAEQLQQASTPGLRVDIGPSTESASTGGGNMLSSRRPGEKKRAKTEKTIGLEVLRQYFAGSLKDAAKSIGVCPTTLKRICRQHGIMRWPSRKIKKVGHSLKKLQLVMDSVQGAQGSIQLDSFYTSFPELNSPNMSSNGPSLKSNEQPSHLNAQTDNGIMAEENPRSPSSSCSKSSGSSNNNENTGNILVAEDADAVLKRAHSEAQLHNVNQEETKCLARTQSHKTFKEPLVLDNSSPLTGSSNTSLRARGAIKVKATFGEARIRFTLLPSWGFAELKQEIARRFNIDDISWFDLKYLDDDKEWVLLTCEADLVECIDIYRLTQTHTIKISLNEASQVKLSGSFGNTGLS

SEQ ID NO: 70275 - DNA, 1140 bp, Arabidopsis thaliana
  misc_feature (1)..(1140): Ceres Seq. ID no. 2702261
  misc_feature: MA Experiment ID: 20001451 Result: Up-regulated in Transcription
  misc_feature: MA Experiment 20001451 PARAMETER Experiment Name: At_Far-red-induction_P Parameter: Age (day) Value: 7
  misc_feature: MA Experiment 20001451 PARAMETER Experiment Name: At_Far-red-induction_P Parameter: Light Value: Far-red vs. White
  misc_feature: MA Experiment 20001451 PARAMETER Experiment Name: At_Far-red-induction_P Parameter: Organism Value: A. thaliana
  misc_feature: MA Experiment 20001451 PARAMETER Experiment Name: At_Far-red-induction_P Parameter: Plant Line Value: Columbia
  misc_feature: MA Experiment 20001451 PARAMETER Experiment Name: At_Far-red-induction_P Parameter: Timepoint (hr) Value: 24
  misc_feature: MA Experiment 20001451 PARAMETER Experiment Name: At_Far-red-induction_P Parameter: Tissue Value: Whole Plant
atggaaatcgatgaagaagagccaatggtgttcttggaccgtacaacaagagcaacacggggtaaacggatgaccaagttgcttgatgacgaagtagaagaagatgaacagttttggaatcaagaagctcttaaagaggaagaacatgatgatgaatatgaagcagaacgtgaggttgctgatgagtttgacagtgacttcaatgacgatgtatttatgtcttgcttatgtattgagtacttattcatcaaggagcctgagcctgatgcagtcgctgtaaatgaaaaagaattgagggatctgccaaagaagcggctgatttaccctgggaaaactgcttcaaagaaaaagaaaaagaagacgaaggtagtttcacaactagaatatattcctggagatgagaagccaggtgaagaattgggaaacaaggaacaagaagaaaaagaagagaatgaagcacaagaagatatggaaggtgagaaagtcattaggaaatcaacacggacttcagtggttgtacggcaagcagaaagagatgcattgcgtgctgctatacaagcaacaacaaagccaatacaaaggaaaaaagtaggggaggaaaaacggatgacccaagaagaaatgctgctggaagctgctcaaacagaaatcatgaacttgaggaatttagaacgtgtcttggcaagggaagaagaagtaaaaaagaaagcgattgtgcataaagcagtctacaagggtcctcagattcggtatcattcaaaagatggatgtaactatttagaattctgtaatggtgcgtcattcaattcagagttgtcgacgaagtctgttccctatccagaaaaagctgtatgtgtgattacgggattacctgccaagtaccgggatccaaaaacgggtcttccttatgcaactagagacgccttcaaagcaatacgtgaaaggttcatggacgaacatgatggtttgagaaagaaaatggagatgggagatttgtttgatacactagtggcgaaaggttttgcaacaaaacaaaagagaacgaagattccaaagagtaacaaatcattttccctcagaagctcagctcgtttccttagctccgagtctgaagaagagagtgaagaagattcagattaa

SEQ ID NO: 70276 - protein, 379 aa, Arabidopsis thaliana
  peptide (1)..(379): Ceres Seq. ID no. 2702262
  misc_feature (12)..(254): Pfam Name: Caldesmon Pfam Description: Caldesmon
  misc_feature (1)..(379): Homolog of NCBI NO: 15228030 NR Description: hypothetical protein; protein id: At2g36740.1
  misc_feature (4)..(377): Homolog of NCBI NO: 12054305 NR Description: stress responsive gene 6 protein, Srg6 [Hordeum subsp. vulgare] >gi|12054307|emb|CAC20595.1| stress responsive
  misc_feature (2)..(377): Homolog of NCBI NO: 40253658 NR Description: putative stress responsive gene 6 protein, Srg6
  misc_feature (85)..(377): Homolog of NCBI NO: 12054303 NR Description: stress responsive gene 6 protein, Srg6 [Hordeum
  misc_feature (10)..(272): Homolog of NCBI NO: 23479560 NR Description: stress responsive gene 6, Srg6 [Plasmodium yoelii
  misc_feature (44)..(253): Homolog of NCBI NO: 20129451 NR Description: CG4621-PA [Drosophila melanogaster]
  misc_feature (264)..(316): Homolog of NCBI NO: 20129451 NR Description: CG4621-PA [Drosophila melanogaster]
  misc_feature (14)..(314): Homolog of NCBI NO: 19112180 NR Description: hypothetical glutamate-rich coiled-coil protein
  misc_feature (14)..(316): Homolog of NCBI NO: 34858037 NR Description: similar to transcription factor-like 1 [Rattus
  misc_feature (10)..(241): Homolog of NCBI NO: 23509830 NR Description: hypothetical protein [Plasmodium falciparum 3D7]
MEIDEEEPMVFLDRTTRATRGKRMTKLLDDEVEEDEQFWNQEALKEEEHDDEYEAEREVADEFDSDFNDDVFMSCLCIEYLFIKEPEPDAVAVNEKELRDLPKKRLIYPGKTASKKKKKKTKVVSQLEYIPGDEKPGEELGNKEQEEKEENEAQEDMEGEKVIRKSTRTSVVVRQAERDALRAAIQATTKPIQRKKVGEEKRMTQEEMLLEAAQTEIMNLRNLERVLAREEEVKKKAIVHKAVYKGPQIRYHSKDGCNYLEFCNGASFNSELSTKSVPYPEKAVCVITGLPAKYRDPKTGLPYATRDAFKAIRERFMDEHDGLRKKMEMGDLFDTLVAKGFATKQKRTKIPKSNKSFSLRSSARFLSSESEEESEEDSD

SEQ ID NO: 70277 - protein, 371 aa, Arabidopsis thaliana
  peptide (1)..(371): Ceres Seq. ID no. 2702263
  misc_feature (4)..(246): Pfam Name: Caldesmon Pfam Description: Caldesmon
  misc_feature (1)..(371): Homolog of NCBI NO: 15228030 NR Description: hypothetical protein; protein id: At2g36740.1
  misc_feature (1)..(369): Homolog of NCBI NO: 12054305 NR Description: stress responsive gene 6 protein, Srg6 [Hordeum subsp. vulgare] >gi|12054307|emb|CAC20595.1| stress responsive
  misc_feature (1)..(369): Homolog of NCBI NO: 40253658 NR Description: putative stress responsive gene 6 protein, Srg6
  misc_feature (77)..(369): Homolog of NCBI NO: 12054303 NR Description: stress responsive gene 6 protein, Srg6 [Hordeum
  misc_feature (2)..(264): Homolog of NCBI NO: 23479560 NR Description: stress responsive gene 6, Srg6 [Plasmodium yoelii
  misc_feature (36)..(245): Homolog of NCBI NO: 20129451 NR Description: CG4621-PA [Drosophila melanogaster]
  misc_feature (256)..(308): Homolog of NCBI NO: 20129451 NR Description: CG4621-PA [Drosophila melanogaster]
  misc_feature (6)..(306): Homolog of NCBI NO: 19112180 NR Description: hypothetical glutamate-rich coiled-coil protein
  misc_feature (6)..(308): Homolog of NCBI NO: 34858037 NR Description: similar to transcription factor-like 1 [Rattus
  misc_feature (2)..(233): Homolog of NCBI NO: 23509830 NR Description: hypothetical protein [Plasmodium falciparum 3D7]
MVFLDRTTRATRGKRMTKLLDDEVEEDEQFWNQEALKEEEHDDEYEAEREVADEFDSDFNDDVFMSCLCIEYLFIKEPEPDAVAVNEKELRDLPKKRLIYPGKTASKKKKKKTKVVSQLEYIPGDEKPGEELGNKEQEEKEENEAQEDMEGEKVIRKSTRTSVVVRQAERDALRAAIQATTKPIQRKKVGEEKRMTQEEMLLEAAQTEIMNLRNLERVLAREEEVKKKAIVHKAVYKGPQIRYHSKDGCNYLEFCNGASFNSELSTKSVPYPEKAVCVITGLPAKYRDPKTGLPYATRDAFKAIRERFMDEHDGLRKKMEMGDLFDTLVAKGFATKQKRTKIPKSNKSFSLRSSARFLSSESEEESEEDSD

SEQ ID NO: 70278 - protein, 356 aa, Arabidopsis thaliana
  peptide (1)..(356): Ceres Seq. ID no. 2702264
  misc_feature (1)..(231): Pfam Name: Caldesmon Pfam Description: Caldesmon
  misc_feature (1)..(356): Homolog of NCBI NO: 15228030 NR Description: hypothetical protein; protein id: At2g36740.1
  misc_feature (1)..(354): Homolog of NCBI NO: 12054305 NR Description: stress responsive gene 6 protein, Srg6 [Hordeum subsp. vulgare] >gi|12054307|emb|CAC20595.1| stress responsive
  misc_feature (1)..(354): Homolog of NCBI NO: 40253658 NR Description: putative stress responsive gene 6 protein, Srg6
  misc_feature (62)..(354): Homolog of NCBI NO: 12054303 NR Description: stress responsive gene 6 protein, Srg6 [Hordeum
  misc_feature (1)..(249): Homolog of NCBI NO: 23479560 NR Description: stress responsive gene 6, Srg6 [Plasmodium yoelii
  misc_feature (21)..(230): Homolog of NCBI NO: 20129451 NR Description: CG4621-PA [Drosophila melanogaster]
  misc_feature (241)..(293): Homolog of NCBI NO: 20129451 NR Description: CG4621-PA [Drosophila melanogaster]
  misc_feature (1)..(291): Homolog of NCBI NO: 19112180 NR Description: hypothetical glutamate-rich coiled-coil protein
  misc_feature (1)..(293): Homolog of NCBI NO: 34858037 NR Description: similar to transcription factor-like 1 [Rattus
  misc_feature (1)..(218): Homolog of NCBI NO: 23509830 NR Description: hypothetical protein [Plasmodium falciparum 3D7]
MTKLLDDEVEEDEQFWNQEALKEEEHDDEYEAEREVADEFDSDFNDDVFMSCLCIEYLFIKEPEPDAVAVNEKELRDLPKKRLIYPGKTASKKKKKKTKVVSQLEYIPGDEKPGEELGNKEQEEKEENEAQEDMEGEKVIRKSTRTSVVVRQAERDALRAAIQATTKPIQRKKVGEEKRMTQEEMLLEAAQTEIMNLRNLERVLAREEEVKKKAIVHKAVYKGPQIRYHSKDGCNYLEFCNGASFNSELSTKSVPYPEKAVCVITGLPAKYRDPKTGLPYATRDAFKAIRERFMDEHDGLRKKMEMGDLFDTLVAKGFATKQKRTKIPKSNKSFSLRSSARFLSSESEEESEEDSD

SEQ ID NO: 70279 - DNA, 1179 bp, Arabidopsis thaliana
  misc_feature (1)..(1179): Ceres Seq. ID no. 2702287
  misc_feature: MA Experiment ID: 20000185 Result: Up-regulated in Transcription
  misc_feature: MA Experiment 20000185 PARAMETER Experiment Name: At_Roots__P Parameter: Age (day) Value: 7 vs. 21
  misc_feature: MA Experiment 20000185 PARAMETER Experiment Name: At_Roots__P Parameter: Organism Value: A. thaliana
  misc_feature: MA Experiment 20000185 PARAMETER Experiment Name: At_Roots__P Parameter: Tissue Value: Roots vs. Whole Plant
  misc_feature: MA Experiment ID: 20000227 Result: Down-regulated in Transcription
  misc_feature: MA Experiment 20000227 PARAMETER Experiment Name: At_Root-Tips-vs-Tops_P Parameter: Tissue Value: Root Tips vs. Root Tops
  misc_feature: MA Experiment ID: 20000438 Result: Up-regulated in Transcription
  misc_feature: MA Experiment 20000438 PARAMETER Experiment Name: At_Shoots__P Parameter: Age (day) Value: 14
  misc_feature: MA Experiment 20000438 PARAMETER Experiment Name: At_Shoots__P Parameter: Tissue Value: Shoots vs. Whole Plant
  misc_feature: MA Experiment ID: 20000439 Result: Up-regulated in Transcription
  misc_feature: MA Experiment 20000439 PARAMETER Experiment Name: At_Roots__P Parameter: Age (day) Value: 14 vs. 21
  misc_feature: MA Experiment 20000439 PARAMETER Experiment Name: At_Roots__P Parameter: Organism Value: A. thaliana
  misc_feature: MA Experiment 20000439 PARAMETER Experiment Name: At_Roots__P Parameter: Tissue Value: Roots vs. Whole Plant
  misc_feature: MA Experiment ID: 20000452 Result: Up-regulated in Transcription
  misc_feature: MA Experiment 20000452 PARAMETER Experiment Name: At_CS6879_Shoots-Roots_P Parameter: Age (day) Value: 14
  misc_feature: MA Experiment 20000452 PARAMETER Experiment Name: At_CS6879_Shoots-Roots_P Parameter: Organism Value: A. thaliana
  misc_feature: MA Experiment 20000452 PARAMETER Experiment Name: At_CS6879_Shoots-Roots_P Parameter: Plant Line Value: CS6879 vs. WS
  misc_feature: MA Experiment 20000452 PARAMETER Experiment Name: At_CS6879_Shoots-Roots_P Parameter: Tissue Value: Shoots
  misc_feature: MA Experiment ID: 20000709 Result: Down-regulated in Transcription
  misc_feature: MA Experiment 20000709 PARAMETER Experiment Name: At_15mM_NH4NO3_L-to-H_P Parameter: Age (hr) Value: 14
  misc_feature: MA Experiment 20000709 PARAMETER Experiment Name: At_15mM_NH4NO3_L-to-H_P Parameter: Organism Value: A. thaliana
  misc_feature: MA Experiment 20000709 PARAMETER Experiment Name: At_15mM_NH4NO3_L-to-H_P Parameter: Plant Line Value: WS
  misc_feature: MA Experiment 20000709 PARAMETER Experiment Name: At_15mM_NH4NO3_L-to-H_P Parameter: Timepoint (hr) Value: 4
  misc_feature: MA Experiment 20000709 PARAMETER Experiment Name: At_15mM_NH4NO3_L-to-H_P Parameter: Tissue Value: Aerial
  misc_feature: MA Experiment 20000709 PARAMETER Experiment Name: At_15mM_NH4NO3_L-to-H_P Parameter: Treatment Value: 15mM NH4NO3 vs. 30mM Mannitol
  misc_feature: MA Experiment ID: 20001451 Result: Down-regulated in Transcription
  misc_feature: MA Experiment 20001451 PARAMETER Experiment Name: At_Far-red-induction_P Parameter: Age (day) Value: 7
  misc_feature: MA Experiment 20001451 PARAMETER Experiment Name: At_Far-red-induction_P Parameter: Light Value: Far-red vs. White
  misc_feature: MA Experiment 20001451 PARAMETER Experiment Name: At_Far-red-induction_P Parameter: Organism Value: A. thaliana
  misc_feature: MA Experiment 20001451 PARAMETER Experiment Name: At_Far-red-induction_P Parameter: Plant Line Value: Columbia
  misc_feature: MA Experiment 20001451 PARAMETER Experiment Name: At_Far-red-induction_P Parameter: Timepoint (hr) Value: 24
  misc_feature: MA Experiment 20001451 PARAMETER Experiment Name: At_Far-red-induction_P Parameter: Tissue Value: Whole Plant
atgtcgccgtcaatgatagctccggtgatggaagaagagaacaagaaataccaaaaaggcgtgaaacatctttgtgaaaatggtctgaccaaagtaccaaccaagtatatatggcctgaacctgaccgacccatcttgacaaaatcggacaagctcatcaaaccaaacaaaaacctaaagctccccctcatagatttcgctgagctccttggacctaaccggcctcatgttctacgaaccatagccgaggcctgcaaaacctacggcttctttcaggttggttctctaaaccctaaagcacatgcggtgatatctagatttcttgctaaacaagtaagctatggtaatgggcaggttgtgaatcatgggatggaaggagacgtgagcaagaatatgatagacgtgtgtaagagattctttgagcttccgtacgaggagagatccaagtacatgtcgtcggacatgtcggctccagtacgatacggcacgagtttcaaccagatcaaagacaatgtcttttgttggagagacttcttgaaactctatgcacatccactccctgactatcttcctcattggccttcttctccttctgacttcaggagttcggcggctacatacgctaaagagacgaaagagatgttcgaaatgatggtcaaagccatcttagaaagtcttgaaattgatggcagtgatgaggcggctaaggagttggaagagggaagtcaggtggtggtggtgaactgttatccaccgtgtccggagccagagctgacgctagggatgccaccgcactcagactacggcttcttgacgcttctacttcaagacgaagtcgaaggtcttcaaattctgtatcgtgacgagtgggtcaccgttgatcccatccctggctcttttgttgtcaacgtaggcgatcatctcgagatatttagcaatgggaggtataaaagcgtgctacatagggtattggtgaactctacaaaacctaggatatcggtggcgtcgctacacagcttccctttgacttctgtcgtaaagccatcgccgaaactcgtcgataaacataatccatcacagtatatggacactgattttaccacttttcttcagtatataacttctcgtgaacccaaatggaagaattttcttgaatcacgcaagattcaccatgtatga

SEQ ID NO: 70280 - protein, 392 aa, Arabidopsis thaliana
  peptide (1)..(392): Ceres Seq. ID no. 2702288
  misc_feature (241)..(340): Pfam Name: 2OG-Fe(II) oxygenase superfamily Pfam Description: 2OG-Fe(II) oxygenase superfamily
  misc_feature (1)..(392): Homolog of NCBI NO: 15228020 NR Description: putative giberellin beta-hydroxylase; protein id: [Arabidopsis thaliana] >gi|25285698|pir||E84783 probable
  misc_feature (114)..(388): Homolog of NCBI NO: 7433240 NR Description: probable flavonol synthase [imported] - thaliana >gi|20197022|gb|AAM14878.1| putative flavonol synthase
  misc_feature (114)..(388): Homolog of NCBI NO: 30689834 NR Description: flavonol synthase family [Arabidopsis thaliana]
  misc_feature (119)..(354): Homolog of NCBI NO: 38345873 NR Description: OSJNBa0064M23.15 [Oryza sativa (japonica
  misc_feature (31)..(93): Homolog of NCBI NO: 38345873 NR Description: OSJNBa0064M23.15 [Oryza sativa (japonica
  misc_feature (218)..(379): Homolog of NCBI NO: 15225626 NR Description: 1-aminocyclopropane-1-carboxylate oxidase;
  misc_feature (119)..(389): Homolog of NCBI NO: 15240797 NR Description: putative protein; protein id: At5g07480.1
  misc_feature (97)..(385): Homolog of NCBI NO: 37536444 NR Description: unknown protein [Oryza sativa (japonica
  misc_feature (73)..(357): Homolog of NCBI NO: 15235126 NR Description: putative Fe(II)/ascorbate oxidase; protein id:
  misc_feature (97)..(389): Homolog of NCBI NO: 32488371 NR Description: OSJNBa0043A12.1 [Oryza sativa (japonica
MSPSMIAPVMEEENKKYQKGVKHLCENGLTKVPTKYIWPEPDRPILTKSDKLIKPNKNLKLPLIDFAELLGPNRPHVLRTIAEACKTYGFFQVGSLNPKAHAVISRFLAKQVSYGNGQVVNHGMEGDVSKNMIDVCKRFFELPYEERSKYMSSDMSAPVRYGTSFNQIKDNVFCWRDFLKLYAHPLPDYLPHWPSSPSDFRSSAATYAKETKEMFEMMVKAILESLEIDGSDEAAKELEEGSQVVVVNCYPPCPEPELTLGMPPHSDYGFLTLLLQDEVEGLQILYRDEWVTVDPIPGSFVVNVGDHLEIFSNGRYKSVLHRVLVNSTKPRISVASLHSFPLTSVVKPSPKLVDKHNPSQYMDTDFTTFLQYITSREPKWKNFLESRKIHHV

SEQ ID NO: 70281 - protein, 388 aa, Arabidopsis thaliana
  peptide (1)..(388): Ceres Seq. ID no. 2702289
  misc_feature (237)..(336): Pfam Name: 2OG-Fe(II) oxygenase superfamily Pfam Description: 2OG-Fe(II) oxygenase superfamily
  misc_feature (1)..(388): Homolog of NCBI NO: 15228020 NR Description: putative giberellin beta-hydroxylase; protein id: [Arabidopsis thaliana] >gi|25285698|pir||E84783 probable
  misc_feature (110)..(384): Homolog of NCBI NO: 7433240 NR Description: probable flavonol synthase [imported] - thaliana >gi|20197022|gb|AAM14878.1| putative flavonol synthase
  misc_feature (110)..(384): Homolog of NCBI NO: 30689834 NR Description: flavonol synthase family [Arabidopsis thaliana]
  misc_feature (115)..(350): Homolog of NCBI NO: 38345873 NR Description: OSJNBa0064M23.15 [Oryza sativa (japonica
  misc_feature (27)..(89): Homolog of NCBI NO: 38345873 NR Description: OSJNBa0064M23.15 [Oryza sativa (japonica
  misc_feature (214)..(375): Homolog of NCBI NO: 15225626 NR Description: 1-aminocyclopropane-1-carboxylate oxidase;
  misc_feature (115)..(385): Homolog of NCBI NO: 15240797 NR Description: putative protein; protein id: At5g07480.1
  misc_feature (93)..(381): Homolog of NCBI NO: 37536444 NR Description: unknown protein [Oryza sativa (japonica
  misc_feature (69)..(353): Homolog of NCBI NO: 15235126 NR Description: putative Fe(II)/ascorbate oxidase; protein id:
  misc_feature (93)..(385): Homolog of NCBI NO: 32488371 NR Description: OSJNBa0043A12.1 [Oryza sativa (japonica
MIAPVMEEENKKYQKGVKHLCENGLTKVPTKYIWPEPDRPILTKSDKLIKPNKNLKLPLIDFAELLGPNRPHVLRTIAEACKTYGFFQVGSLNPKAHAVISRFLAKQVSYGNGQVVNHGMEGDVSKNMIDVCKRFFELPYEERSKYMSSDMSAPVRYGTSFNQIKDNVFCWRDFLKLYAHPLPDYLPHWPSSPSDFRSSAATYAKETKEMFEMMVKAILESLEIDGSDEAAKELEEGSQVVVVNCYPPCPEPELTLGMPPHSDYGFLTLLLQDEVEGLQILYRDEWVTVDPIPGSFVVNVGDHLEIFSNGRYKSVLHRVLVNSTKPRISVASLHSFPLTSVVKPSPKLVDKHNPSQYMDTDFTTFLQYITSREPKWKNFLESRKIHHV

SEQ ID NO: 70282 - protein, 383 aa, Arabidopsis thaliana
  peptide (1)..(383): Ceres Seq. ID no. 2702290
  misc_feature (232)..(331): Pfam Name: 2OG-Fe(II) oxygenase superfamily Pfam Description: 2OG-Fe(II) oxygenase superfamily
  misc_feature (1)..(383): Homolog of NCBI NO: 15228020 NR Description: putative giberellin beta-hydroxylase; protein id: [Arabidopsis thaliana] >gi|25285698|pir||E84783 probable
  misc_feature (105)..(379): Homolog of NCBI NO: 7433240 NR Description: probable flavonol synthase [imported] - thaliana >gi|20197022|gb|AAM14878.1| putative flavonol synthase
  misc_feature (105)..(379): Homolog of NCBI NO: 30689834 NR Description: flavonol synthase family [Arabidopsis thaliana]
  misc_feature (110)..(345): Homolog of NCBI NO: 38345873 NR Description: OSJNBa0064M23.15 [Oryza sativa (japonica
  misc_feature (22)..(84): Homolog of NCBI NO: 38345873 NR Description: OSJNBa0064M23.15 [Oryza sativa (japonica
  misc_feature (209)..(370): Homolog of NCBI NO: 15225626 NR Description: 1-aminocyclopropane-1-carboxylate oxidase;
  misc_feature (110)..(380): Homolog of NCBI NO: 15240797 NR Description: putative protein; protein id: At5g07480.1
  misc_feature (88)..(376): Homolog of NCBI NO: 37536444 NR Description: unknown protein [Oryza sativa (japonica
  misc_feature (64)..(348): Homolog of NCBI NO: 15235126 NR Description: putative Fe(II)/ascorbate oxidase; protein id:
  misc_feature (88)..(380): Homolog of NCBI NO: 32488371 NR Description: OSJNBa0043A12.1 [Oryza sativa (japonica
MEEENKKYQKGVKHLCENGLTKVPTKYIWPEPDRPILTKSDKLIKPNKNLKLPLIDFAELLGPNRPHVLRTIAEACKTYGFFQVGSLNPKAHAVISRFLAKQVSYGNGQVVNHGMEGDVSKNMIDVCKRFFELPYEERSKYMSSDMSAPVRYGTSFNQIKDNVFCWRDFLKLYAHPLPDYLPHWPSSPSDFRSSAATYAKETKEMFEMMVKAILESLEIDGSDEAAKELEEGSQVVVVNCYPPCPEPELTLGMPPHSDYGFLTLLLQDEVEGLQILYRDEWVTVDPIPGSFVVNVGDHLEIFSNGRYKSVLHRVLVNSTKPRISVASLHSFPLTSVVKPSPKLVDKHNPSQYMDTDFTTFLQYITSREPKWKNFLESRKIHHV

SEQ ID NO: 70283 - DNA, 744 bp, Arabidopsis thaliana
  misc_feature (1)..(744): Ceres Seq. ID no. 2702364
  misc_feature: MA Experiment ID: 20000173 Result: Down-regulated in Transcription
  misc_feature: MA Experiment 20000173 PARAMETER Experiment Name: At_42deg_Heat_P Parameter: Age (day) Value: 14
  misc_feature: MA Experiment 20000173 PARAMETER Experiment Name: At_42deg_Heat_P Parameter: Organism Value: A. thaliana
  misc_feature: MA Experiment 20000173 PARAMETER Experiment Name: At_42deg_Heat_P Parameter: Plant Line Value: WS
  misc_feature: MA Experiment 20000173 PARAMETER Experiment Name: At_42deg_Heat_P Parameter: Temperature (deg C) Value: 42 vs. 22
  misc_feature: MA Experiment 20000173 PARAMETER Experiment Name: At_42deg_Heat_P Parameter: Timepoint (hr) Value: 6
  misc_feature: MA Experiment 20000173 PARAMETER Experiment Name: At_42deg_Heat_P Parameter: Tissue Value: Aerial
  misc_feature: MA Experiment ID: 20000179 Result: Down-regulated in Transcription
  misc_feature: MA Experiment 20000179 PARAMETER Experiment Name: At_Germinating_Seeds_P Parameter: Age (hr) Value: 6 vs. 0
  misc_feature: MA Experiment 20000179 PARAMETER Experiment Name: At_Germinating_Seeds_P Parameter: Tissue Value: Germinating Seeds
  misc_feature: MA Experiment ID: 20000180 Result: Down-regulated in Transcription
  misc_feature: MA Experiment 20000180 PARAMETER Experiment Name: At_Germinating_Seeds_P Parameter: Age (hr) Value: 24 vs. 0
  misc_feature: MA Experiment 20000180 PARAMETER Experiment Name: At_Germinating_Seeds_P Parameter: Tissue Value: Germinating Seeds
  misc_feature: MA Experiment ID: 20000265 Result: Up-regulated in Transcription
  misc_feature: MA Experiment 20000265 PARAMETER Experiment Name: At_Open_Flower_P Parameter: Age (day) Value: 21
  misc_feature: MA Experiment 20000265 PARAMETER Experiment Name: At_Open_Flower_P Parameter: Plant Line Value: WS
  misc_feature: MA Experiment 20000265 PARAMETER Experiment Name: At_Open_Flower_P Parameter: Tissue Value: Closed Flower vs. Whole Plant
atggaaattgcaaccgatacagcaaagcagatgagagacgaagagttgttcaaagcagcggaatggggagattcatcgttgttcatgtcattatctgaagaacagctctctaaatctctcaatttcagaaacgaagatggtcgctctctcctccatgtcgctgcttccttcggccattctcaaatagtgaagttgttatcaagttcagatgaagcaaagactgtaatcaatagcaaggatgatgaaggatgggctcctttgcattccgctgctagcatcggtaatgctgagctcgttgaggtgcttttgaccagaggtgctgatgtcaatgccaaaaataacggtggtcgcactgctcttcactatgctgctagcaaaggccggttggagattgctcagcttttattaacacacggtgcaaagattaacatcacagacaaggttggttgcactccgcttcacagggcagcaagcgtgggaaagttagaagtttgtgaatttcttattgaagaaggagcagagatcgatgctacggataaaatgggtcaaactgcactcatgcattcagttatctgcgatgacaaacagttaaaagtttccatggatcaggttgcgttcctgcttataagacatggtgcagatgtggatgtagaagacaaggaaggctacactgttctaggccgagctaccaatgaattccgacctgcacttatcgatgctgctaaggccatgcttgaaggataa

SEQ ID NO: 70284 - protein, 247 aa, Arabidopsis thaliana
  peptide (1)..(247): Ceres Seq. ID no. 2702365
  misc_feature (181)..(220): Pfam Name: Ankyrin repeat Pfam Description: Ankyrin repeat
  misc_feature (1)..(247): Homolog of NCBI NO: 25295712 NR Description: probable ankyrin [imported] - Arabidopsis >gi|4335756|gb|AAD17433.1| putative ankyrin [Arabidopsis
  misc_feature (1)..(247): Homolog of NCBI NO: 30678058 NR Description: ankyrin -related [Arabidopsis thaliana] putative ankyrin [Arabidopsis thaliana]
  misc_feature (13)..(247): Homolog of NCBI NO: 15341604 NR Description: putative ankyrin [Oryza sativa]
  misc_feature (44)..(226): Homolog of NCBI NO: 37681913 NR Description: proteasome 26S subunit, non-ATPase, 10 [Danio
  misc_feature (31)..(247): Homolog of NCBI NO: 4506217 NR Description: proteasome 26S non-ATPase subunit 10 isoform 1;
  misc_feature (31)..(247): Homolog of NCBI NO: 39654744 NR Description: Chain A, X-Ray Structure Of Human Gankyrin
  misc_feature (31)..(226): Homolog of NCBI NO: 16758980 NR Description: proteasome (prosome, macropain) 26S subunit,
  misc_feature (31)..(226): Homolog of NCBI NO: 12857852 NR Description: unnamed protein product [Mus musculus]
  misc_feature (31)..(226): Homolog of NCBI NO: 20532221 NR Description: 26S proteasome non-ATPase regulatory subunit 10 proteasome regulatory subunit p28) (Gankyrin)
  misc_feature (31)..(226): Homolog of NCBI NO: 31980811 NR Description: proteasome (prosome, macropain) 26S subunit,
MEIATDTAKQMRDEELFKAAEWGDSSLFMSLSEEQLSKSLNFRNEDGRSLLHVAASFGHSQIVKLLSSSDEAKTVINSKDDEGWAPLHSAASIGNAELVEVLLTRGADVNAKNNGGRTALHYAASKGRLEIAQLLLTHGAKINITDKVGCTPLHRAASVGKLEVCEFLIEEGAEIDATDKMGQTALMHSVICDDKQLKVSMDQVAFLLIRHGADVDVEDKEGYTVLGRATNEFRPALIDAAKAMLEG

SEQ ID NO: 70285 - protein, 237 aa, Arabidopsis thaliana
  peptide (1)..(237): Ceres Seq. ID no. 2702366
  misc_feature (171)..(210): Pfam Name: Ankyrin repeat Pfam Description: Ankyrin repeat
  misc_feature (1)..(237): Homolog of NCBI NO: 25295712 NR Description: probable ankyrin [imported] - Arabidopsis >gi|4335756|gb|AAD17433.1| putative ankyrin [Arabidopsis
  misc_feature (1)..(237): Homolog of NCBI NO: 30678058 NR Description: ankyrin -related [Arabidopsis thaliana] putative ankyrin [Arabidopsis thaliana]
  misc_feature (3)..(237): Homolog of NCBI NO: 15341604 NR Description: putative ankyrin [Oryza sativa]
  misc_feature (34)..(216): Homolog of NCBI NO: 37681913 NR Description: proteasome 26S subunit, non-ATPase, 10 [Danio
  misc_feature (21)..(237): Homolog of NCBI NO: 4506217 NR Description: proteasome 26S non-ATPase subunit 10 isoform 1;
  misc_feature (21)..(237): Homolog of NCBI NO: 39654744 NR Description: Chain A, X-Ray Structure Of Human Gankyrin
  misc_feature (21)..(216): Homolog of NCBI NO: 16758980 NR Description: proteasome (prosome, macropain) 26S subunit,
  misc_feature (21)..(216): Homolog of NCBI NO: 12857852 NR Description: unnamed protein product [Mus musculus]
  misc_feature (21)..(216): Homolog of NCBI NO: 20532221 NR Description: 26S proteasome non-ATPase regulatory subunit 10 proteasome regulatory subunit p28) (Gankyrin)
  misc_feature (21)..(216): Homolog of NCBI NO: 31980811 NR Description: proteasome (prosome, macropain) 26S subunit,
MRDEELFKAAEWGDSSLFMSLSEEQLSKSLNFRNEDGRSLLHVAASFGHSQIVKLLSSSDEAKTVINSKDDEGWAPLHSAASIGNAELVEVLLTRGADVNAKNNGGRTALHYAASKGRLEIAQLLLTHGAKINITDKVGCTPLHRAASVGKLEVCEFLIEEGAEIDATDKMGQTALMHSVICDDKQLKVSMDQVAFLLIRHGADVDVEDKEGYTVLGRATNEFRPALIDAAKAMLEG

SEQ ID NO: 70286 - protein, 219 aa, Arabidopsis thaliana
  peptide (1)..(219): Ceres Seq. ID no. 2702367
  misc_feature (153)..(192): Pfam Name: Ankyrin repeat Pfam Description: Ankyrin repeat
  misc_feature (1)..(219): Homolog of NCBI NO: 25295712 NR Description: probable ankyrin [imported] - Arabidopsis >gi|4335756|gb|AAD17433.1| putative ankyrin [Arabidopsis
  misc_feature (1)..(219): Homolog of NCBI NO: 30678058 NR Description: ankyrin -related [Arabidopsis thaliana] putative ankyrin [Arabidopsis thaliana]
  misc_feature (1)..(219): Homolog of NCBI NO: 15341604 NR Description: putative ankyrin [Oryza sativa]
  misc_feature (16)..(198): Homolog of NCBI NO: 37681913 NR Description: proteasome 26S subunit, non-ATPase, 10 [Danio
  misc_feature (3)..(219): Homolog of NCBI NO: 4506217 NR Description: proteasome 26S non-ATPase subunit 10 isoform 1;
  misc_feature (3)..(219): Homolog of NCBI NO: 39654744 NR Description: Chain A, X-Ray Structure Of Human Gankyrin
  misc_feature (3)..(198): Homolog of NCBI NO: 16758980 NR Description: proteasome (prosome, macropain) 26S subunit,
  misc_feature (3)..(198): Homolog of NCBI NO: 12857852 NR Description: unnamed protein product [Mus musculus]
  misc_feature (3)..(198): Homolog of NCBI NO: 20532221 NR Description: 26S proteasome non-ATPase regulatory subunit 10 proteasome regulatory subunit p28) (Gankyrin)
  misc_feature (3)..(198): Homolog of NCBI NO: 31980811 NR Description: proteasome (prosome, macropain) 26S subunit,
MSLSEEQLSKSLNFRNEDGRSLLHVAASFGHSQIVKLLSSSDEAKTVINSKDDEGWAPLHSAASIGNAELVEVLLTRGADVNAKNNGGRTALHYAASKGRLEIAQLLLTHGAKINITDKVGCTPLHRAASVGKLEVCEFLIEEGAEIDATDKMGQTALMHSVICDDKQLKVSMDQVAFLLIRHGADVDVEDKEGYTVLGRATNEFRPALIDAAKAMLEG

SEQ ID NO: 70287 - DNA, 1860 bp, Arabidopsis thaliana
  misc_feature (1)..(1860): Ceres Seq. ID no. 2702375
  misc_feature: MA Experiment ID: 20000306 Result: Up-regulated in Transcription
  misc_feature: MA Experiment 20000306 PARAMETER Experiment Name: At_Germinating_Seeds_Sub_P Parameter: Age (hr) Value: 6 vs. 0
  misc_feature: MA Experiment 20000306 PARAMETER Experiment Name: At_Germinating_Seeds_Sub_P Parameter: Organism Value: A. thaliana
  misc_feature: MA Experiment 20000306 PARAMETER Experiment Name: At_Germinating_Seeds_Sub_P Parameter: Plant Line Value: WS
  misc_feature: MA Experiment 20000306 PARAMETER Experiment Name: At_Germinating_Seeds_Sub_P Parameter: Tissue Value: Germinating Seeds
  misc_feature: MA Experiment ID: 20000307 Result: Up-regulated in Transcription
  misc_feature: MA Experiment 20000307 PARAMETER Experiment Name: At_Germinating_Seeds_Sub_P Parameter: Age (hr) Value: 24 vs. 0
  misc_feature: MA Experiment 20000307 PARAMETER Experiment Name: At_Germinating_Seeds_Sub_P Parameter: Organism Value: A. thaliana
  misc_feature: MA Experiment 20000307 PARAMETER Experiment Name: At_Germinating_Seeds_Sub_P Parameter: Plant Line Value: WS
  misc_feature: MA Experiment 20000307 PARAMETER Experiment Name: At_Germinating_Seeds_Sub_P Parameter: Tissue Value: Germinating Seeds
  misc_feature: MA Experiment ID: 20000314 Result: Up-regulated in Transcription
  misc_feature: MA Experiment 20000314 PARAMETER Experiment Name: At_14day_Shoots-Roots_Sub_P Parameter: Age (day) Value: 14
  misc_feature: MA Experiment 20000314 PARAMETER Experiment Name: At_14day_Shoots-Roots_Sub_P Parameter: Organism Value: A. thaliana
  misc_feature: MA Experiment 20000314 PARAMETER Experiment Name: At_14day_Shoots-Roots_Sub_P Parameter: Plant Line Value: WS
  misc_feature: MA Experiment 20000314 PARAMETER Experiment Name: At_14day_Shoots-Roots_Sub_P Parameter: Tissue Value: Roots vs. Whole Plant
  misc_feature: MA Experiment ID: 20000315 Result: Down-regulated in Transcription
  misc_feature: MA Experiment 20000315 PARAMETER Experiment Name: At_14day_Shoots-Roots_Sub_P Parameter: Age (day) Value: 14
  misc_feature: MA Experiment 20000315 PARAMETER Experiment Name: At_14day_Shoots-Roots_Sub_P Parameter: Organism Value: A. thaliana
  misc_feature: MA Experiment 20000315 PARAMETER Experiment Name: At_14day_Shoots-Roots_Sub_P Parameter: Plant Line Value: WS
  misc_feature: MA Experiment 20000315 PARAMETER Experiment Name: At_14day_Shoots-Roots_Sub_P Parameter: Tissue Value: Shoots vs. Whole Plant
  misc_feature: MA Experiment ID: 20000328 Result: Down-regulated in Transcription
  misc_feature: MA Experiment 20000328 PARAMETER Experiment Name: At_42deg_Heat_Sub_P Parameter: Age (day) Value: 14
  misc_feature: MA Experiment 20000328 PARAMETER Experiment Name: At_42deg_Heat_Sub_P Parameter: Organism Value: A. thaliana
  misc_feature: MA Experiment 20000328 PARAMETER Experiment Name: At_42deg_Heat_Sub_P Parameter: Plant Line Value: WS
  misc_feature: MA Experiment 20000328 PARAMETER Experiment Name: At_42deg_Heat_Sub_P Parameter: Temperature (deg C) Value: 42 vs. 22
  misc_feature: MA Experiment 20000328 PARAMETER Experiment Name: At_42deg_Heat_Sub_P Parameter: Timepoint (hr) Value: 6
  misc_feature: MA Experiment 20000328 PARAMETER Experiment Name: At_42deg_Heat_Sub_P Parameter: Tissue Value: Aerial
  misc_feature: MA Experiment ID: 20000355 Result: Up-regulated in Transcription
  misc_feature: MA Experiment 20000355 PARAMETER Experiment Name: At_Siliques_Sub_P Parameter: Age (day) Value: 21
  misc_feature: MA Experiment 20000355 PARAMETER Experiment Name: At_Siliques_Sub_P Parameter: Organism Value: A. thaliana
  misc_feature: MA Experiment 20000355 PARAMETER Experiment Name: At_Siliques_Sub_P Parameter: Plant Line Value: WS
  misc_feature: MA Experiment 20000355 PARAMETER Experiment Name: At_Siliques_Sub_P Parameter: Tissue Value: Less Than 5mm Siliques vs. Whole Plant
  misc_feature: MA Experiment ID: 20000440 Result: Up-regulated in Transcription
  misc_feature: MA Experiment 20000440 PARAMETER Experiment Name: At_Closed-Flower__Sub_P Parameter: Tissue Value: Closed Flower vs. Whole Plant
atgagaggttcttggtacaagagtgtttcctctgtttttggtctcagaccacggatcagagggttgttattcttcattgttggtgttgtggctctagttactattttagcaccattgacatctaattcgtatgattcttcgtcaagttcgacacttgtgccgaacatttatagtaactataggaggataaaggagcaagctgctgttgattatcttgatctgaggtctctttctttaggggctagtttaaaagagtttcctttttgtggtaaagaaagagaaagttatgtgccttgttataacataactgggaatttgcttgctgggcttcaagagggtgaggagttagatcgacattgcgagtttgaaagagagaaggaaagatgtgtagttcgtcctccgagagattataaaataccacttaggtggccacttggtagagatatcatatggagtgggaacgtgaagattaccaaagaccagtttctttcttcaggaactgtgacaacgaggttaatgttgcttgaagagaatcaaataacctttcactcggaggacggcctggtctttgatggggtcaaagactatgctcgtcaaattgctgagatgataggtttaggaagtgatactgaatttgctcaagcgggtgtacggactgtgttagacattggttgcggatttggtagctttggtgctcatttagtgtctttgaagctgatgcctatatgtattgctgagtatgaggcaactgggagccaagttcagttagctctagagagaggccttcctgcaatgattggcaatttcttttcaaaacagcttccttatccagcactgtcttttgatatggtccattgtgctcaatgtggcactacttgggatatcaaagatgcaatgctacttttggaagtggatcgtgttctgaaacccgggggatactttgttttaacttctcccacaaacaaagcacagggaaacttaccagataccaagaaaacgagcatctcaacacgggtgaatgagttatctaagaaaatctgttggagtctaacagctcagcaggatgagacgtttctttggcagaaaacttctgattcaagttgctattcttctcgttcgcaagcttctatacctctttgcaaagatggagatagcgttccgtattaccacccattggttccatgtataagcggaaccacgagtaaacgctggatttctatacagaacaggtctgctgttgcaggaacaacctctgccgggcttgaaattcatggtttaaaaccggaagaattcttcgaggatacacaaatatggagatcagctctgaaaaactattggtccttgcttacacctctaattttctctgaccatccgaagagacccggtgatgaggatcctctcccgcctttcaacatgatacgcaatgtgatggacatgcatgctcgttttgggaatttaaatgccgctttactcgacgaaggaaaatctgcttgggtaatgaacgtcgtcccagtcaatgcacgtaatactcttcctatcatacttgatcgtggtttcgccggtgttctacatgactggtgtgaaccattcccgacatatcctcgaacatatgacatgcttcatgccaatgaacttctcacacatcttagctcagaacgatgcagcctaatggacttgttcttggagatggaccggattcttcgccctgagggatgggttgttctaagcgacaaagtgggagtaatcgagatggctcgagcacttgcagctcgagtgcgttgggaagcaagagtcattgatcttcaagatggtagtgaccaaagacttctcgtctgtcaaaaaccattcatcaaaaaataa

SEQ ID NO: 70288 - protein, 619 aa, Arabidopsis thaliana
  peptide (1)..(619): Ceres Seq. ID no. 2702376
  misc_feature (95)..(603): Pfam Name: Putative methyltransferase Pfam Description: Putative methyltransferase
  misc_feature (9)..(619): Homolog of NCBI NO: 15222970 NR Description: hypothetical protein; protein id: At1g13860.1
  misc_feature (9)..(619): Homolog of NCBI NO: 26449782 NR Description: unknown protein [Arabidopsis thaliana]
  misc_feature (9)..(603): Homolog of NCBI NO: 25402770 NR Description: protein F16A14.7 [imported] - Arabidopsis >gi|8778408|gb|AAF79416.1|AC068197_26 F16A14.7 [Arabidopsis
  misc_feature (240)..(619): Homolog of NCBI NO: 18395560 NR Description: expressed protein; protein id: At2g03480.1 thaliana] >gi|20197738|gb|AAD17428.2| expressed protein
  misc_feature (240)..(618): Homolog of NCBI NO: 14532450 NR Description: At2g03480/T4M8.9 [Arabidopsis thaliana]
  misc_feature (240)..(618): Homolog of NCBI NO: 24111341 NR Description: At2g03480/T4M8.9 [Arabidopsis thaliana]
  misc_feature (13)..(373): Homolog of NCBI NO: 8052540 NR Description: F3F9.21 [Arabidopsis thaliana]
  misc_feature (379)..(526): Homolog of NCBI NO: 8052540 NR Description: F3F9.21 [Arabidopsis thaliana]
  misc_feature (570)..(619): Homolog of NCBI NO: 8052540 NR Description: F3F9.21 [Arabidopsis thaliana]
  misc_feature (249)..(619): Homolog of NCBI NO: 12324243 NR Description: unknown protein, 5' partial; 69506-67937
MRGSWYKSVSSVFGLRPRIRGLLFFIVGVVALVTILAPLTSNSYDSSSSSTLVPNIYSNYRRIKEQAAVDYLDLRSLSLGASLKEFPFCGKERESYVPCYNITGNLLAGLQEGEELDRHCEFEREKERCVVRPPRDYKIPLRWPLGRDIIWSGNVKITKDQFLSSGTVTTRLMLLEENQITFHSEDGLVFDGVKDYARQIAEMIGLGSDTEFAQAGVRTVLDIGCGFGSFGAHLVSLKLMPICIAEYEATGSQVQLALERGLPAMIGNFFSKQLPYPALSFDMVHCAQCGTTWDIKDAMLLLEVDRVLKPGGYFVLTSPTNKAQGNLPDTKKTSISTRVNELSKKICWSLTAQQDETFLWQKTSDSSCYSSRSQASIPLCKDGDSVPYYHPLVPCISGTTSKRWISIQNRSAVAGTTSAGLEIHGLKPEEFFEDTQIWRSALKNYWSLLTPLIFSDHPKRPGDEDPLPPFNMIRNVMDMHARFGNLNAALLDEGKSAWVMNVVPVNARNTLPIILDRGFAGVLHDWCEPFPTYPRTYDMLHANELLTHLSSERCSLMDLFLEMDRILRPEGWVVLSDKVGVIEMARALAARVRWEARVIDLQDGSDQRLLVCQKPFIKK

SEQ ID NO: 70289 - protein, 447 aa, Arabidopsis thaliana
  peptide (1)..(447): Ceres Seq. ID no. 2702377
  misc_feature (1)..(431): Pfam Name: Putative methyltransferase Pfam Description: Putative methyltransferase
  misc_feature (1)..(447): Homolog of NCBI NO: 15222970 NR Description: hypothetical protein; protein id: At1g13860.1
  misc_feature (1)..(447): Homolog of NCBI NO: 26449782 NR Description: unknown protein [Arabidopsis thaliana]
  misc_feature (1)..(431): Homolog of NCBI NO: 25402770 NR Description: protein F16A14.7 [imported] - Arabidopsis >gi|8778408|gb|AAF79416.1|AC068197_26 F16A14.7 [Arabidopsis
  misc_feature (68)..(447): Homolog of NCBI NO: 18395560 NR Description: expressed protein; protein id: At2g03480.1 thaliana] >gi|20197738|gb|AAD17428.2| expressed protein
  misc_feature (68)..(446): Homolog of NCBI NO: 14532450 NR Description: At2g03480/T4M8.9 [Arabidopsis thaliana]
  misc_feature (68)..(446): Homolog of NCBI NO: 24111341 NR Description: At2g03480/T4M8.9 [Arabidopsis thaliana]
  misc_feature (1)..(201): Homolog of NCBI NO: 8052540 NR Description: F3F9.21 [Arabidopsis thaliana]
  misc_feature (207)..(354): Homolog of NCBI NO: 8052540 NR Description: F3F9.21 [Arabidopsis thaliana]
  misc_feature (398)..(447): Homolog of NCBI NO: 8052540 NR Description: F3F9.21 [Arabidopsis thaliana]
  misc_feature (77)..(447): Homolog of NCBI NO: 12324243 NR Description: unknown protein, 5' partial; 69506-67937
MLLEENQITFHSEDGLVFDGVKDYARQIAEMIGLGSDTEFAQAGVRTVLDIGCGFGSFGAHLVSLKLMPICIAEYEATGSQVQLALERGLPAMIGNFFSKQLPYPALSFDMVHCAQCGTTWDIKDAMLLLEVDRVLKPGGYFVLTSPTNKAQGNLPDTKKTSISTRVNELSKKICWSLTAQQDETFLWQKTSDSSCYSSRSQASIPLCKDGDSVPYYHPLVPCISGTTSKRWISIQNRSAVAGTTSAGLEIHGLKPEEFFEDTQIWRSALKNYWSLLTPLIFSDHPKRPGDEDPLPPFNMIRNVMDMHARFGNLNAALLDEGKSAWVMNVVPVNARNTLPIILDRGFAGVLHDWCEPFPTYPRTYDMLHANELLTHLSSERCSLMDLFLEMDRILRPEGWVVLSDKVGVIEMARALAARVRWEARVIDLQDGSDQRLLVCQKPFIKK

SEQ ID NO: 70290 - protein, 417 aa, Arabidopsis thaliana
  peptide (1)..(417): Ceres Seq. ID no. 2702378
  misc_feature (1)..(401): Pfam Name: Putative methyltransferase Pfam Description: Putative methyltransferase
  misc_feature (1)..(417): Homolog of NCBI NO: 15222970 NR Description: hypothetical protein; protein id: At1g13860.1
  misc_feature (1)..(417): Homolog of NCBI NO: 26449782 NR Description: unknown protein [Arabidopsis thaliana]
  misc_feature (1)..(401): Homolog of NCBI NO: 25402770 NR Description: protein F16A14.7 [imported] - Arabidopsis >gi|8778408|gb|AAF79416.1|AC068197_26 F16A14.7 [Arabidopsis
  misc_feature (38)..(417): Homolog of NCBI NO: 18395560 NR Description: expressed protein; protein id: At2g03480.1 thaliana] >gi|20197738|gb|AAD17428.2| expressed protein
  misc_feature (38)..(416): Homolog of NCBI NO: 14532450 NR Description: At2g03480/T4M8.9 [Arabidopsis thaliana]
  misc_feature (38)..(416): Homolog of NCBI NO: 24111341 NR Description: At2g03480/T4M8.9 [Arabidopsis thaliana]
  misc_feature (1)..(171): Homolog of NCBI NO: 8052540 NR Description: F3F9.21 [Arabidopsis thaliana]
  misc_feature (177)..(324): Homolog of NCBI NO: 8052540 NR Description: F3F9.21 [Arabidopsis thaliana]
  misc_feature (368)..(417): Homolog of NCBI NO: 8052540 NR Description: F3F9.21 [Arabidopsis thaliana]
  misc_feature (47)..(417): Homolog of NCBI NO: 12324243 NR Description: unknown protein, 5' partial; 69506-67937
MIGLGSDTEFAQAGVRTVLDIGCGFGSFGAHLVSLKLMPICIAEYEATGSQVQLALERGLPAMIGNFFSKQLPYPALSFDMVHCAQCGTTWDIKDAMLLLEVDRVLKPGGYFVLTSPTNKAQGNLPDTKKTSISTRVNELSKKICWSLTAQQDETFLWQKTSDSSCYSSRSQASIPLCKDGDSVPYYHPLVPCISGTTSKRWISIQNRSAVAGTTSAGLEIHGLKPEEFFEDTQIWRSALKNYWSLLTPLIFSDHPKRPGDEDPLPPFNMIRNVMDMHARFGNLNAALLDEGKSAWVMNVVPVNARNTLPIILDRGFAGVLHDWCEPFPTYPRTYDMLHANELLTHLSSERCSLMDLFLEMDRILRPEGWVVLSDKVGVIEMARALAARVRWEARVIDLQDGSDQRLLVCQKPFIKK

SEQ ID NO: 70291 - DNA, 1563 bp, Arabidopsis thaliana
  misc_feature (1)..(1563): Ceres Seq. ID no. 2702694
  misc_feature: MA Experiment ID: 20000328 Result: Down-regulated in Transcription
  misc_feature: MA Experiment 20000328 PARAMETER Experiment Name: At_42deg_Heat_Sub_P Parameter: Age (day) Value: 14
  misc_feature: MA Experiment 20000328 PARAMETER Experiment Name: At_42deg_Heat_Sub_P Parameter: Organism Value: A. thaliana
  misc_feature: MA Experiment 20000328 PARAMETER Experiment Name: At_42deg_Heat_Sub_P Parameter: Plant Line Value: WS
  misc_feature: MA Experiment 20000328 PARAMETER Experiment Name: At_42deg_Heat_Sub_P Parameter: Temperature (deg C) Value: 42 vs. 22
  misc_feature: MA Experiment 20000328 PARAMETER Experiment Name: At_42deg_Heat_Sub_P Parameter: Timepoint (hr) Value: 6
  misc_feature: MA Experiment 20000328 PARAMETER Experiment Name: At_42deg_Heat_Sub_P Parameter: Tissue Value: Aerial
  misc_feature: MA Experiment ID: 20000346 Result: Up-regulated in Transcription
  misc_feature: MA Experiment 20000346 PARAMETER Experiment Name: At_2mM_SA_Sub_P Parameter: Age (day) Value: 14
  misc_feature: MA Experiment 20000346 PARAMETER Experiment Name: At_2mM_SA_Sub_P Parameter: Organism Value: A. thaliana
  misc_feature: MA Experiment 20000346 PARAMETER Experiment Name: At_2mM_SA_Sub_P Parameter: Plant Line Value: WS
  misc_feature: MA Experiment 20000346 PARAMETER Experiment Name: At_2mM_SA_Sub_P Parameter: Timepoint (hr) Value: 1
  misc_feature: MA Experiment 20000346 PARAMETER Experiment Name: At_2mM_SA_Sub_P Parameter: Tissue Value: Aerial
  misc_feature: MA Experiment 20000346 PARAMETER Experiment Name: At_2mM_SA_Sub_P Parameter: Treatment Value: 2mM SA vs. No Treatment
  misc_feature: MA Experiment ID: 20000347 Result: Up-regulated in Transcription
  misc_feature: MA Experiment 20000347 PARAMETER Experiment Name: At_2mM_SA_Sub_P Parameter: Age (day) Value: 14
  misc_feature: MA Experiment 20000347 PARAMETER Experiment Name: At_2mM_SA_Sub_P Parameter: Organism Value: A. thaliana
  misc_feature: MA Experiment 20000347 PARAMETER Experiment Name: At_2mM_SA_Sub_P Parameter: Plant Line Value: WS
  misc_feature: MA Experiment 20000347 PARAMETER Experiment Name: At_2mM_SA_Sub_P Parameter: Timepoint (hr) Value: 6
  misc_feature: MA Experiment 20000347 PARAMETER Experiment Name: At_2mM_SA_Sub_P Parameter: Tissue Value: Aerial
  misc_feature: MA Experiment 20000347 PARAMETER Experiment Name: At_2mM_SA_Sub_P Parameter: Treatment Value: 2mM SA vs. No Treatment
  misc_feature: MA Experiment ID: 20000355 Result: Down-regulated in Transcription
  misc_feature: MA Experiment 20000355 PARAMETER Experiment Name: At_Siliques_Sub_P Parameter: Age (day) Value: 21
  misc_feature: MA Experiment 20000355 PARAMETER Experiment Name: At_Siliques_Sub_P Parameter: Organism Value: A. thaliana
  misc_feature: MA Experiment 20000355 PARAMETER Experiment Name: At_Siliques_Sub_P Parameter: Plant Line Value: WS
  misc_feature: MA Experiment 20000355 PARAMETER Experiment Name: At_Siliques_Sub_P Parameter: Tissue Value: Less Than 5mm Siliques vs. Whole Plant
  misc_feature: MA Experiment ID: 20000440 Result: Down-regulated in Transcription
  misc_feature: MA Experiment 20000440 PARAMETER Experiment Name: At_Closed-Flower__Sub_P Parameter: Tissue Value: Closed Flower vs. Whole Plant
atgacaggtttgcttaatgacagggagctttatagcaataacattacaggggagatacctgaggagcttggcgacttggtggaactagtaagcttggatctttacgcaaacagcataagcggtcccatcccttcgtctcttggcaaactaggaaaactccggttcttgcgtcttaacaacaatagcttatcaggggaaattccaatgactttgacttctgtgcagctgcaagttctggatatctcaaacaatcggctcagtggagatattcctgttaatggttctttttcgctcttcactcctatcagttttgcgaataatagcttaacggatcttcccgaacctccgcctacttctacctctcctacgccaccaccaccttcaggttttcacttccattttcttcttagtgtttcttgtcggggggcaaatgactgcagcaatagcagggggagttgctgcaggtgcagcacttctatttgctgttccagccattgcgtttctgaagaagacccagaggttcatttaggacaactcaaaaggtttaccttgcgtgaactgttagttgctactgataactttagcaataaaaatgtattgggtagaggtggttttggtaaagtgtataaaggacgtttagccgatggcaatctagtggctgtcaaaaggctaaaagaagaacgtaccaagggtggggaactgcagtttcaaaccgaagttgagatgatcagtatggccgttcataggaacttgcttcggcttcgtggcttttgcatgactccaactgaaagattacttgtttatccctacatggctaatggaagtgttgcttcttgtttaagagagcgtcctgaaggcaatccagcacttgattggccaaaaagaaagcatattgctctgggatcagcaagggggcttgcgtatttacatgatcattgcgaccaaaaaatcattcaccgggatgttaaagctgctaatatattgttagatgaagagtttgaagctgttgttggagattttgggctcgcaaaattaatgaattataatgactcccatgtgacaactgctgtacgcggtacaattggccatatagcgcccgagtacctctcgacaggaaaatcttctgagaagactgatgtttttgggtacggggtcatgcttctcgagctcatcactggacaaaaggctttcgatcttgctcggcttgcaaatgatgatgatatcatgttactcgactgggtgaaagaggttttgaaagagaagaagttggaaagccttgtggatgcagaactcgaaggaaagtacgtggaaacagaagtggagcagctgatacaaatggctctgctctgcactcaaagttctgcaatggaacgtccaaagatgtcagaagtagtgagaatgctggaaggagatggtttagctgagagatgggaagaatggcaaaaggaggagatgccaatacatgattttaactatcaagcctatcctcatgctggcactgactggctcatcccctattccaattcccttatcgaaaacgattacccctcgggtccaagataa

SEQ ID NO: 70292 - protein, 520 aa, Arabidopsis thaliana
  peptide (1)..(520): Ceres Seq. ID no. 2702695
  misc_feature (168)..(520): Homolog of NCBI NO: 24935324 NR Description: somatic embryogenesis receptor kinase 1 [Medicago >gi|24935326|gb|AAN64294.1| somatic embryogenesis receptor kinase
  misc_feature (9)..(127): Homolog of NCBI NO: 24935324 NR Description: somatic embryogenesis receptor kinase 1 [Medicago >gi|24935326|gb|AAN64294.1| somatic embryogenesis receptor kinase
  misc_feature (168)..(520): Homolog of NCBI NO: 15217584 NR Description: protein kinase, putative; protein id:
  misc_feature (9)..(130): Homolog of NCBI NO: 15217584 NR Description: protein kinase, putative; protein id:
  misc_feature (168)..(520): Homolog of NCBI NO: 15081616 NR Description: At1g71830/F14O23_24 [Arabidopsis thaliana]
  misc_feature (9)..(130): Homolog of NCBI NO: 15081616 NR Description: At1g71830/F14O23_24 [Arabidopsis thaliana]
  misc_feature (1)..(520): Homolog of NCBI NO: 25411516 NR Description: probable receptor-like protein kinase [imported] -
  misc_feature (168)..(520): Homolog of NCBI NO: 30678986 NR Description: leucine-rich repeat protein kinase family thaliana] >gi|15810409|gb|AAL07092.1| unknown protein
  misc_feature (9)..(113): Homolog of NCBI NO: 30678986 NR Description: leucine-rich repeat protein kinase family thaliana] >gi|15810409|gb|AAL07092.1| unknown protein
  misc_feature (28)..(121): Homolog of NCBI NO: 30678986 NR Description: leucine-rich repeat protein kinase family thaliana] >gi|15810409|gb|AAL07092.1| unknown protein
MTGLLNDRELYSNNITGEIPEELGDLVELVSLDLYANSISGPIPSSLGKLGKLRFLRLNNNSLSGEIPMTLTSVQLQVLDISNNRLSGDIPVNGSFSLFTPISFANNSLTDLPEPPPTSTSPTPPPPSGFHFHFLLSVSCRGANDCSNSRGSCCRCSTSICCSSHCVSEEDPEVHLGQLKRFTLRELLVATDNFSNKNVLGRGGFGKVYKGRLADGNLVAVKRLKEERTKGGELQFQTEVEMISMAVHRNLLRLRGFCMTPTERLLVYPYMANGSVASCLRERPEGNPALDWPKRKHIALGSARGLAYLHDHCDQKIIHRDVKAANILLDEEFEAVVGDFGLAKLMNYNDSHVTTAVRGTIGHIAPEYLSTGKSSEKTDVFGYGVMLLELITGQKAFDLARLANDDDIMLLDWVKEVLKEKKLESLVDAELEGKYVETEVEQLIQMALLCTQSSAMERPKMSEVVRMLEGDGLAERWEEWQKEEMPIHDFNYQAYPHAGTDWLIPYSNSLIENDYPSGPR

SEQ ID NO: 70293 - protein, 452 aa, Arabidopsis thaliana
  peptide (1)..(452): Ceres Seq. ID no. 2702696
  misc_feature (1)..(452): Homolog of NCBI NO: 25411516 NR Description: probable receptor-like protein kinase [imported] -
  misc_feature (100)..(452): Homolog of NCBI NO: 30678986 NR Description: leucine-rich repeat protein kinase family thaliana] >gi|15810409|gb|AAL07092.1| unknown protein
  misc_feature (1)..(45): Homolog of NCBI NO: 30678986 NR Description: leucine-rich repeat protein kinase family thaliana] >gi|15810409|gb|AAL07092.1| unknown protein
  misc_feature (1)..(53): Homolog of NCBI NO: 30678986 NR Description: leucine-rich repeat protein kinase family thaliana] >gi|15810409|gb|AAL07092.1| unknown protein
  misc_feature (100)..(452): Homolog of NCBI NO: 24935324 NR Description: somatic embryogenesis receptor kinase 1 [Medicago >gi|24935326|gb|AAN64294.1| somatic embryogenesis receptor kinase
  misc_feature (1)..(59): Homolog of NCBI NO: 24935324 NR Description: somatic embryogenesis receptor kinase 1 [Medicago >gi|24935326|gb|AAN64294.1| somatic embryogenesis receptor kinase
  misc_feature (100)..(452): Homolog of NCBI NO: 15217584 NR Description: protein kinase, putative; protein id:
  misc_feature (1)..(62): Homolog of NCBI NO: 15217584 NR Description: protein kinase, putative; protein id:
  misc_feature (100)..(452): Homolog of NCBI NO: 15081616 NR Description: At1g71830/F14O23_24 [Arabidopsis thaliana]
  misc_feature (1)..(62): Homolog of NCBI NO: 15081616 NR Description: At1g71830/F14O23_24 [Arabidopsis thaliana]
MTLTSVQLQVLDISNNRLSGDIPVNGSFSLFTPISFANNSLTDLPEPPPTSTSPTPPPPSGFHFHFLLSVSCRGANDCSNSRGSCCRCSTSICCSSHCVSEEDPEVHLGQLKRFTLRELLVATDNFSNKNVLGRGGFGKVYKGRLADGNLVAVKRLKEERTKGGELQFQTEVEMISMAVHRNLLRLRGFCMTPTERLLVYPYMANGSVASCLRERPEGNPALDWPKRKHIALGSARGLAYLHDHCDQKIIHRDVKAANILLDEEFEAVVGDFGLAKLMNYNDSHVTTAVRGTIGHIAPEYLSTGKSSEKTDVFGYGVMLLELITGQKAFDLARLANDDDIMLLDWVKEVLKEKKLESLVDAELEGKYVETEVEQLIQMALLCTQSSAMERPKMSEVVRMLEGDGLAERWEEWQKEEMPIHDFNYQAYPHAGTDWLIPYSNSLIENDYPSGPR

SEQ ID NO: 70294 - protein, 279 aa, Arabidopsis thaliana
  peptide (1)..(279): Ceres Seq. ID no. 2702697
  misc_feature (1)..(279): Homolog of NCBI NO: 25411516 NR Description: probable receptor-like protein kinase [imported] -
  misc_feature (1)..(279): Homolog of NCBI NO: 30678986 NR Description: leucine-rich repeat protein kinase family thaliana] >gi|15810409|gb|AAL07092.1| unknown protein
  misc_feature (1)..(279): Homolog of NCBI NO: 24935324 NR Description: somatic embryogenesis receptor kinase 1 [Medicago >gi|24935326|gb|AAN64294.1| somatic embryogenesis receptor kinase
  misc_feature (1)..(279): Homolog of NCBI NO: 15217584 NR Description: protein kinase, putative; protein id:
  misc_feature (1)..(279): Homolog of NCBI NO: 15081616 NR Description: At1g71830/F14O23_24 [Arabidopsis thaliana]
  misc_feature (1)..(279): Homolog of NCBI NO: 14573457 NR Description: somatic embryogenesis receptor-like kinase 2
  misc_feature (1)..(279): Homolog of NCBI NO: 7488932 NR Description: probable somatic embryogenesis receptor-like
  misc_feature (1)..(279): Homolog of NCBI NO: 15218543 NR Description: somatic embryogenesis receptor-like kinase, protein id: At1g34210.1, supported by cDNA: gi_14573456
  misc_feature (1)..(279): Homolog of NCBI NO: 40253600 NR Description: putative somatic embryogenesis receptor kinase 1
  misc_feature (1)..(279): Homolog of NCBI NO: 22325667 NR Description: putative receptor-like protein kinase; protein At2g13800.1, supported by cDNA: gi_20453087 [Arabidopsis >gi|20453088|gb|AAM19787.1| At2g13800/F13J11.15 [Arabidopsis
MISMAVHRNLLRLRGFCMTPTERLLVYPYMANGSVASCLRERPEGNPALDWPKRKHIALGSARGLAYLHDHCDQKIIHRDVKAANILLDEEFEAVVGDFGLAKLMNYNDSHVTTAVRGTIGHIAPEYLSTGKSSEKTDVFGYGVMLLELITGQKAFDLARLANDDDIMLLDWVKEVLKEKKLESLVDAELEGKYVETEVEQLIQMALLCTQSSAMERPKMSEVVRMLEGDGLAERWEEWQKEEMPIHDFNYQAYPHAGTDWLIPYSNSLIENDYPSGPR

SEQ ID NO: 70295 - DNA, 1638 bp, Arabidopsis thaliana
  misc_feature (1)..(1638): Ceres Seq. ID no. 2702830
  misc_feature: MA Experiment ID: 20000180 Result: Up-regulated in Transcription
  misc_feature: MA Experiment 20000180 PARAMETER Experiment Name: At_Germinating_Seeds_P Parameter: Age (hr) Value: 24 vs. 0
  misc_feature: MA Experiment 20000180 PARAMETER Experiment Name: At_Germinating_Seeds_P Parameter: Tissue Value: Germinating Seeds
  misc_feature: MA Experiment ID: 20000794 Result: Up-regulated in Transcription
  misc_feature: MA Experiment 20000794 PARAMETER Experiment Name: At_Petals_P Parameter: Age (day) Value: 23-25 days
  misc_feature: MA Experiment 20000794 PARAMETER Experiment Name: At_Petals_P Parameter: Plant Line Value: WS
  misc_feature: MA Experiment 20000794 PARAMETER Experiment Name: At_Petals_P Parameter: Tissue Value: Petals vs. Whole plant
atggcttccattgatgaagaaaggtcacttcttgaagttgaagaatctcttatacaggaagaagtaaaattatatgctgaagatggttcaatagatattcatggaaacccaccattgaagcagacaacaggaaactggaaagcttgtccattcatttttgcaaacgaatgctgcgaacggttggcttattatggaattgccaagaatctcatcacgtacttcacaaatgaattgcatgagactaatgtttctgctgctagacacgtcatgacatggcaaggaacatgttacatcactcctcttattggagctttaatagctgatgcttactggggaagatattggactattgcttgtttctctgccatttatttcaccggaatggttgcattgacactctcagcttcagttccgggtcttaagccagcggaatgcattggctctctatgtccaccagcaacaatggttcagtctacggttttattttcagggctttaccttatcgctcttggcactggaggaatcaaaccatgtgtctcatcctttggtgctgatcagtttgataagaccgatccaagcgaacgagtcagaaaagcttctttctttaactggttttacttcactatcaacattggtgcttttgtttcatctactgttctagtttggattcaagagaattatggatgggaattaggattcttgatacctaccgtgttcatgggacttgctactatgagtttcttctttggcacgccgctttatagatttcagaaaccgagaggtagcccgattactagcgtctgccaagttcttgtagccgcataccgtaaatcgaatctcaaggtccctgaagactccacggacgaaggagatgcaaacactaacccgtggaagctatgtaccgtgactcaagtcgaagaagttaagattctgttacgtttggtccccatttgggcctcaggaatcatcttctcagttctccattcacagatttacactctctttgttcaacaaggacggtgcatgaaacgaaccatcggcttattcgaaatccctcccgcaactctcgggatgttcgacactgcaagtgttctcatatctgtcccaatctatgaccgcgtcatcgttcccttagtgagacggttcacaggcttagctaaaggattcaccgagctacaaagaatggggattggtctttttgtctctgttttgagcttgacatttgcagctatcgttgagacggttcggttacagttagctagagatcttgatctagtggaaagtggagacattgttccattaaacatcttttggcaaatccctcagtactttttaatgggcactgctggagttttcttctttgttgggaggattgagtttttctatgagcaatctccagattcaatgagaagcttgtgtagtgcttgggctcttctcactactacactaggaaactacttgagctcgttgatcattacccttgtggcgtatttgagcggaaaagattgttggattccttcagacaacattaacaatggacatcttgattacttcttctggcttttggtcagtcttggatctgttaacatacctgtttttgtcttcttctctgtgaaatatactcatatgaaggtttga

SEQ ID NO: 70296 - protein, 545 aa, Arabidopsis thaliana
  peptide (1)..(545): Ceres Seq. ID no. 2702831
  misc_feature (114)..(481): Pfam Name: POT family Pfam Description: POT family
  misc_feature (1)..(545): Homolog of NCBI NO: 15226856 NR Description: putative peptide/amino acid transporter; protein At2g02020.1 [Arabidopsis thaliana] >gi|25410951|pir||A84432
  misc_feature (1)..(287): Homolog of NCBI NO: 15226861 NR Description: histidine transport protein (PTR2-B); protein id: supported by cDNA: gi_13937184, supported by cDNA: gi_633939
  misc_feature (282)..(544): Homolog of NCBI NO: 15226861 NR Description: histidine transport protein (PTR2-B); protein id: supported by cDNA: gi_13937184, supported by cDNA: gi_633939
  misc_feature (5)..(285): Homolog of NCBI NO: 30696666 NR Description: oligopeptide transporter -related [Arabidopsis >gi|16604436|gb|AAL24224.1| At1g62200/F19K23_13 [Arabidopsis
  misc_feature (282)..(544): Homolog of NCBI NO: 30696666 NR Description: oligopeptide transporter -related [Arabidopsis >gi|16604436|gb|AAL24224.1| At1g62200/F19K23_13 [Arabidopsis
  misc_feature (1)..(287): Homolog of NCBI NO: 1076331 NR Description: histidine transport protein - Arabidopsis thaliana
  misc_feature (282)..(544): Homolog of NCBI NO: 1076331 NR Description: histidine transport protein - Arabidopsis thaliana
  misc_feature (271)..(544): Homolog of NCBI NO: 25404366 NR Description: hypothetical protein F19K23.13 [imported] - thaliana >gi|2160144|gb|AAB60766.1| Strong similarity to
  misc_feature (27)..(285): Homolog of NCBI NO: 25404366 NR Description: hypothetical protein F19K23.13 [imported] - thaliana >gi|2160144|gb|AAB60766.1| Strong similarity to
  misc_feature (17)..(287): Homolog of NCBI NO: 4102839 NR Description: LeOPT1 [Lycopersicon esculentum]
MASIDEERSLLEVEESLIQEEVKLYAEDGSIDIHGNPPLKQTTGNWKACPFIFANECCERLAYYGIAKNLITYFTNELHETNVSAARHVMTWQGTCYITPLIGALIADAYWGRYWTIACFSAIYFTGMVALTLSASVPGLKPAECIGSLCPPATMVQSTVLFSGLYLIALGTGGIKPCVSSFGADQFDKTDPSERVRKASFFNWFYFTINIGAFVSSTVLVWIQENYGWELGFLIPTVFMGLATMSFFFGTPLYRFQKPRGSPITSVCQVLVAAYRKSNLKVPEDSTDEGDANTNPWKLCTVTQVEEVKILLRLVPIWASGIIFSVLHSQIYTLFVQQGRCMKRTIGLFEIPPATLGMFDTASVLISVPIYDRVIVPLVRRFTGLAKGFTELQRMGIGLFVSVLSLTFAAIVETVRLQLARDLDLVESGDIVPLNIFWQIPQYFLMGTAGVFFFVGRIEFFYEQSPDSMRSLCSAWALLTTTLGNYLSSLIITLVAYLSGKDCWIPSDNINNGHLDYFFWLLVSLGSVNIPVFVFFSVKYTHMKV

SEQ ID NO: 70297 - protein, 456 aa, Arabidopsis thaliana
  peptide (1)..(456): Ceres Seq. ID no. 2702832
  misc_feature (25)..(392): Pfam Name: POT family Pfam Description: POT family
  misc_feature (1)..(456): Homolog of NCBI NO: 15226856 NR Description: putative peptide/amino acid transporter; protein At2g02020.1 [Arabidopsis thaliana] >gi|25410951|pir||A84432
  misc_feature (1)..(198): Homolog of NCBI NO: 15226861 NR Description: histidine transport protein (PTR2-B); protein id: supported by cDNA: gi_13937184, supported by cDNA: gi_633939
  misc_feature (193)..(455): Homolog of NCBI NO: 15226861 NR Description: histidine transport protein (PTR2-B); protein id: supported by cDNA: gi_13937184, supported by cDNA: gi_633939
  misc_feature (1)..(196): Homolog of NCBI NO: 30696666 NR Description: oligopeptide transporter -related [Arabidopsis >gi|16604436|gb|AAL24224.1| At1g62200/F19K23_13 [Arabidopsis
  misc_feature (193)..(455): Homolog of NCBI NO: 30696666 NR Description: oligopeptide transporter -related [Arabidopsis >gi|16604436|gb|AAL24224.1| At1g62200/F19K23_13 [Arabidopsis
  misc_feature (1)..(198): Homolog of NCBI NO: 1076331 NR Description: histidine transport protein - Arabidopsis thaliana
  misc_feature (193)..(455): Homolog of NCBI NO: 1076331 NR Description: histidine transport protein - Arabidopsis thaliana
  misc_feature (182)..(455): Homolog of NCBI NO: 25404366 NR Description: hypothetical protein F19K23.13 [imported] - thaliana >gi|2160144|gb|AAB60766.1| Strong similarity to
  misc_feature (1)..(196): Homolog of NCBI NO: 25404366 NR Description: hypothetical protein F19K23.13 [imported] - thaliana >gi|2160144|gb|AAB60766.1| Strong similarity to
  misc_feature (1)..(198): Homolog of NCBI NO: 4102839 NR Description: LeOPT1 [Lycopersicon esculentum]
MTWQGTCYITPLIGALIADAYWGRYWTIACFSAIYFTGMVALTLSASVPGLKPAECIGSLCPPATMVQSTVLFSGLYLIALGTGGIKPCVSSFGADQFDKTDPSERVRKASFFNWFYFTINIGAFVSSTVLVWIQENYGWELGFLIPTVFMGLATMSFFFGTPLYRFQKPRGSPITSVCQVLVAAYRKSNLKVPEDSTDEGDANTNPWKLCTVTQVEEVKILLRLVPIWASGIIFSVLHSQIYTLFVQQGRCMKRTIGLFEIPPATLGMFDTASVLISVPIYDRVIVPLVRRFTGLAKGFTELQRMGIGLFVSVLSLTFAAIVETVRLQLARDLDLVESGDIVPLNIFWQIPQYFLMGTAGVFFFVGRIEFFYEQSPDSMRSLCSAWALLTTTLGNYLSSLIITLVAYLSGKDCWIPSDNINNGHLDYFFWLLVSLGSVNIPVFVFFSVKYTHMKV

SEQ ID NO: 70298 - protein, 418 aa, Arabidopsis thaliana
  peptide (1)..(418): Ceres Seq. ID no. 2702833
  misc_feature (1)..(354): Pfam Name: POT family Pfam Description: POT family
  misc_feature (1)..(418): Homolog of NCBI NO: 15226856 NR Description: putative peptide/amino acid transporter; protein At2g02020.1 [Arabidopsis thaliana] >gi|25410951|pir||A84432
  misc_feature (1)..(160): Homolog of NCBI NO: 15226861 NR Description: histidine transport protein (PTR2-B); protein id: supported by cDNA: gi_13937184, supported by cDNA: gi_633939
  misc_feature (155)..(417): Homolog of NCBI NO: 15226861 NR Description: histidine transport protein (PTR2-B); protein id: supported by cDNA: gi_13937184, supported by cDNA: gi_633939
  misc_feature (1)..(158): Homolog of NCBI NO: 30696666 NR Description: oligopeptide transporter -related [Arabidopsis >gi|16604436|gb|AAL24224.1| At1g62200/F19K23_13 [Arabidopsis
  misc_feature (155)..(417): Homolog of NCBI NO: 30696666 NR Description: oligopeptide transporter -related [Arabidopsis >gi|16604436|gb|AAL24224.1| At1g62200/F19K23_13 [Arabidopsis
  misc_feature (1)..(160): Homolog of NCBI NO: 1076331 NR Description: histidine transport protein - Arabidopsis thaliana
  misc_feature (155)..(417): Homolog of NCBI NO: 1076331 NR Description: histidine transport protein - Arabidopsis thaliana
  misc_feature (144)..(417): Homolog of NCBI NO: 25404366 NR Description: hypothetical protein F19K23.13 [imported] - thaliana >gi|2160144|gb|AAB60766.1| Strong similarity to
  misc_feature (1)..(158): Homolog of NCBI NO: 25404366 NR Description: hypothetical protein F19K23.13 [imported] - thaliana >gi|2160144|gb|AAB60766.1| Strong similarity to
  misc_feature (1)..(160): Homolog of NCBI NO: 4102839 NR Description: LeOPT1 [Lycopersicon esculentum]
MVALTLSASVPGLKPAECIGSLCPPATMVQSTVLFSGLYLIALGTGGIKPCVSSFGADQFDKTDPSERVRKASFFNWFYFTINIGAFVSSTVLVWIQENYGWELGFLIPTVFMGLATMSFFFGTPLYRFQKPRGSPITSVCQVLVAAYRKSNLKVPEDSTDEGDANTNPWKLCTVTQVEEVKILLRLVPIWASGIIFSVLHSQIYTLFVQQGRCMKRTIGLFEIPPATLGMFDTASVLISVPIYDRVIVPLVRRFTGLAKGFTELQRMGIGLFVSVLSLTFAAIVETVRLQLARDLDLVESGDIVPLNIFWQIPQYFLMGTAGVFFFVGRIEFFYEQSPDSMRSLCSAWALLTTTLGNYLSSLIITLVAYLSGKDCWIPSDNINNGHLDYFFWLLVSLGSVNIPVFVFFSVKYTHMKV

SEQ ID NO: 70299 - DNA, 1989 bp, Arabidopsis thaliana
  misc_feature (1)..(1989): Ceres Seq. ID no. 2702881
  misc_feature: MA Experiment ID: 20000184 Result: Down-regulated in Transcription
  misc_feature: MA Experiment 20000184 PARAMETER Experiment Name: At_Shoots__P Parameter: Age (day) Value: 7
  misc_feature: MA Experiment 20000184 PARAMETER Experiment Name: At_Shoots__P Parameter: Tissue Value: Shoots vs. Whole Plant
  misc_feature: MA Experiment ID: 20000235 Result: Down-regulated in Transcription
  misc_feature: MA Experiment 20000235 PARAMETER Experiment Name: At_Siliques_P Parameter: Age (day) Value: 21
  misc_feature: MA Experiment 20000235 PARAMETER Experiment Name: At_Siliques_P Parameter: Organism Value: A. thaliana
  misc_feature: MA Experiment 20000235 PARAMETER Experiment Name: At_Siliques_P Parameter: Plant Line Value: WS
  misc_feature: MA Experiment 20000235 PARAMETER Experiment Name: At_Siliques_P Parameter: Tissue Value: 5-10mm Siliques vs. Whole Plant
atgactataatggaggagaagcagaacaacagtcctgtgggagagaagcaacagagctttaatggtataataataaaccaaacacaagagaatcagacaaaatcaatggagaaacaacagagtttccgatgtgtggtggagaatcaaccgagaaaggcgagagctttagagaaacaagtgagtttccaaggtgtgaatgtagagaactatcagcaaagcagactcggaagatcaatggagaagcaacagagttttcgaggtgtcaacgttgagaatcataaacgtggagttatggagaagctaccgagttttggtagagcaacaatggagaggcagaagagtttccgtggtgggtttttggagaagcagaagagcttccgtgtggtgatggagaggcaattgagttttataggtgagaggaggaagaagaatgaatcaccagggaaaagaggagactcttctcttcatatcgctgcgagaaccgggaacttaagtaaggttaaagaactgattcgaggttgtggtgatgagttgaaagagttgttgtcaaagcaaaatcttgaaggagagactcctctttatactgcagcagagaatgggcattcaattgttgttgaggagatgttgaagcatatggaccttgaaactgcttccatcgctgctagaaacgggtttgatccatttcatgtcgccgccaaacaaggccatctcgaggtgttgaagatactgttggagacattccctaatttggcaatgacaacggatttatcgtgtacaactgcgttacacactgctgcaacacagggacatattgatgtggtgaatcttcttttggagacagactctaatttggctaagattgctaagaacaacggtaaaactgcgcttcactctgcagcaaggatgggtcatgtggaagttgttaaatctctgataggtaaggatccaagcattgggtttagaaccgataaaaaagggcaaactgctcttcacatggctgtaaaaggtcaaaatgatgggattgttgttgagttggtgaaacctgatgttgctgttttgagcgttgaggataataaaggaaatacaccattgcacattgccacaaacaaggggcgtattaagatagtacggtgtttggtatcttttgaaggcataaacctcaacccaataaacaaagctggagatacgccactcgatgtctctgagaagataggaaacgcagagcttgtgtcagttctgaaggaagcaggagctgctacagctaaagatctcggaaagcctcagaacccagctaagcaactgaagcaaacagtcagcgacatcaaacatgaagtacaatctcagcttcagcaatccagacaaacaggtgtaagagtccagaagatagcaaaaagactcaagaagctacacattagtggtctaaacaacgctataaactcagcaactgttgtggcagtgcttattgccacagtggctttcgcagcaatcttcacaatacccggtcagtacgaagaggaccggtcgaaaggagagttgctaggacaagctcatatagcaaacaaagcaccgtttctggtcttcttcatctttgacagcttggcactgtttatatccttagctgttgttgtggtgcagacttcagttgttgtgattgagcagaaggcgaaaaagaagcttgtgtttgtaatcaacaagctcatgtggtgtgcttgtctgttcatatccattgcctttgtttctctctcttatattgttgttggcaaagaggagatgtggttggctgtttgcgcgactgttatcggcggcacgattatgttgactacgattggtgcgatgtgctattgtgtggtcatgcataggatggaagaatctaaattgaggagcataaggaaagaaagaagcaagtctcagtctttctctatgtctcgtatgccgtctgattcagatattctaaatggtgaatacaataagagaatgtatgccctctga

SEQ ID NO: 70300 - protein, 662 aa, Arabidopsis thaliana
  peptide (1)..(662): Ceres Seq. ID no. 2702882
  misc_feature (359)..(392): Pfam Name: Ankyrin repeat Pfam Description: Ankyrin repeat
  misc_feature (45)..(662): Homolog of NCBI NO: 15220595 NR Description: unknown protein; protein id: At1g05640.1
  misc_feature (135)..(662): Homolog of NCBI NO: 15222993 NR Description: hypothetical protein; protein id: At1g07710.1
  misc_feature (148)..(662): Homolog of NCBI NO: 15238604 NR Description: ankyrin-like protein; protein id: At5g60070.1
  misc_feature (140)..(662): Homolog of NCBI NO: 24796797 NR Description: putative ankyrin repeat containing protein [Oryza
  misc_feature (149)..(662): Homolog of NCBI NO: 11357168 NR Description: ankyrin-like protein - Arabidopsis thaliana
  misc_feature (149)..(662): Homolog of NCBI NO: 30679697 NR Description: ankyrin repeat protein family [Arabidopsis
  misc_feature (181)..(654): Homolog of NCBI NO: 15230470 NR Description: ankyrin-like protein; protein id: At3g12360.1
  misc_feature (132)..(190): Homolog of NCBI NO: 15230470 NR Description: ankyrin-like protein; protein id: At3g12360.1
  misc_feature (181)..(654): Homolog of NCBI NO: 21553618 NR Description: ankyrin-like protein [Arabidopsis thaliana]
  misc_feature (138)..(190): Homolog of NCBI NO: 21553618 NR Description: ankyrin-like protein [Arabidopsis thaliana]
MTIMEEKQNNSPVGEKQQSFNGIIINQTQENQTKSMEKQQSFRCVVENQPRKARALEKQVSFQGVNVENYQQSRLGRSMEKQQSFRGVNVENHKRGVMEKLPSFGRATMERQKSFRGGFLEKQKSFRVVMERQLSFIGERRKKNESPGKRGDSSLHIAARTGNLSKVKELIRGCGDELKELLSKQNLEGETPLYTAAENGHSIVVEEMLKHMDLETASIAARNGFDPFHVAAKQGHLEVLKILLETFPNLAMTTDLSCTTALHTAATQGHIDVVNLLLETDSNLAKIAKNNGKTALHSAARMGHVEVVKSLIGKDPSIGFRTDKKGQTALHMAVKGQNDGIVVELVKPDVAVLSVEDNKGNTPLHIATNKGRIKIVRCLVSFEGINLNPINKAGDTPLDVSEKIGNAELVSVLKEAGAATAKDLGKPQNPAKQLKQTVSDIKHEVQSQLQQSRQTGVRVQKIAKRLKKLHISGLNNAINSATVVAVLIATVAFAAIFTIPGQYEEDRSKGELLGQAHIANKAPFLVFFIFDSLALFISLAVVVVQTSVVVIEQKAKKKLVFVINKLMWCACLFISIAFVSLSYIVVGKEEMWLAVCATVIGGTIMLTTIGAMCYCVVMHRMEESKLRSIRKERSKSQSFSMSRMPSDSDILNGEYNKRMYAL

SEQ ID NO: 70301 - protein, 659 aa, Arabidopsis thaliana
  peptide (1)..(659): Ceres Seq. ID no. 2702883
  misc_feature (356)..(389): Pfam Name: Ankyrin repeat Pfam Description: Ankyrin repeat
  misc_feature (42)..(659): Homolog of NCBI NO: 15220595 NR Description: unknown protein; protein id: At1g05640.1
  misc_feature (132)..(659): Homolog of NCBI NO: 15222993 NR Description: hypothetical protein; protein id: At1g07710.1
  misc_feature (145)..(659): Homolog of NCBI NO: 15238604 NR Description: ankyrin-like protein; protein id: At5g60070.1
  misc_feature (137)..(659): Homolog of NCBI NO: 24796797 NR Description: putative ankyrin repeat containing protein [Oryza
  misc_feature (146)..(659): Homolog of NCBI NO: 11357168 NR Description: ankyrin-like protein - Arabidopsis thaliana
  misc_feature (146)..(659): Homolog of NCBI NO: 30679697 NR Description: ankyrin repeat protein family [Arabidopsis
  misc_feature (178)..(651): Homolog of NCBI NO: 15230470 NR Description: ankyrin-like protein; protein id: At3g12360.1
  misc_feature (129)..(187): Homolog of NCBI NO: 15230470 NR Description: ankyrin-like protein; protein id: At3g12360.1
  misc_feature (178)..(651): Homolog of NCBI NO: 21553618 NR Description: ankyrin-like protein [Arabidopsis thaliana]
  misc_feature (135)..(187): Homolog of NCBI NO: 21553618 NR Description: ankyrin-like protein [Arabidopsis thaliana]
MEEKQNNSPVGEKQQSFNGIIINQTQENQTKSMEKQQSFRCVVENQPRKARALEKQVSFQGVNVENYQQSRLGRSMEKQQSFRGVNVENHKRGVMEKLPSFGRATMERQKSFRGGFLEKQKSFRVVMERQLSFIGERRKKNESPGKRGDSSLHIAARTGNLSKVKELIRGCGDELKELLSKQNLEGETPLYTAAENGHSIVVEEMLKHMDLETASIAARNGFDPFHVAAKQGHLEVLKILLETFPNLAMTTDLSCTTALHTAATQGHIDVVNLLLETDSNLAKIAKNNGKTALHSAARMGHVEVVKSLIGKDPSIGFRTDKKGQTALHMAVKGQNDGIVVELVKPDVAVLSVEDNKGNTPLHIATNKGRIKIVRCLVSFEGINLNPINKAGDTPLDVSEKIGNAELVSVLKEAGAATAKDLGKPQNPAKQLKQTVSDIKHEVQSQLQQSRQTGVRVQKIAKRLKKLHISGLNNAINSATVVAVLIATVAFAAIFTIPGQYEEDRSKGELLGQAHIANKAPFLVFFIFDSLALFISLAVVVVQTSVVVIEQKAKKKLVFVINKLMWCACLFISIAFVSLSYIVVGKEEMWLAVCATVIGGTIMLTTIGAMCYCVVMHRMEESKLRSIRKERSKSQSFSMSRMPSDSDILNGEYNKRMYAL

SEQ ID NO: 70302 - protein, 627 aa, Arabidopsis thaliana
  peptide (1)..(627): Ceres Seq. ID no. 2702884
  misc_feature (324)..(357): Pfam Name: Ankyrin repeat Pfam Description: Ankyrin repeat
  misc_feature (10)..(627): Homolog of NCBI NO: 15220595 NR Description: unknown protein; protein id: At1g05640.1
  misc_feature (100)..(627): Homolog of NCBI NO: 15222993 NR Description: hypothetical protein; protein id: At1g07710.1
  misc_feature (113)..(627): Homolog of NCBI NO: 15238604 NR Description: ankyrin-like protein; protein id: At5g60070.1
  misc_feature (105)..(627): Homolog of NCBI NO: 24796797 NR Description: putative ankyrin repeat containing protein [Oryza
  misc_feature (114)..(627): Homolog of NCBI NO: 11357168 NR Description: ankyrin-like protein - Arabidopsis thaliana
  misc_feature (114)..(627): Homolog of NCBI NO: 30679697 NR Description: ankyrin repeat protein family [Arabidopsis
  misc_feature (146)..(619): Homolog of NCBI NO: 15230470 NR Description: ankyrin-like protein; protein id: At3g12360.1
  misc_feature (97)..(155): Homolog of NCBI NO: 15230470 NR Description: ankyrin-like protein; protein id: At3g12360.1
  misc_feature (146)..(619): Homolog of NCBI NO: 21553618 NR Description: ankyrin-like protein [Arabidopsis thaliana]
  misc_feature (103)..(155): Homolog of NCBI NO: 21553618 NR Description: ankyrin-like protein [Arabidopsis thaliana]
MEKQQSFRCVVENQPRKARALEKQVSFQGVNVENYQQSRLGRSMEKQQSFRGVNVENHKRGVMEKLPSFGRATMERQKSFRGGFLEKQKSFRVVMERQLSFIGERRKKNESPGKRGDSSLHIAARTGNLSKVKELIRGCGDELKELLSKQNLEGETPLYTAAENGHSIVVEEMLKHMDLETASIAARNGFDPFHVAAKQGHLEVLKILLETFPNLAMTTDLSCTTALHTAATQGHIDVVNLLLETDSNLAKIAKNNGKTALHSAARMGHVEVVKSLIGKDPSIGFRTDKKGQTALHMAVKGQNDGIVVELVKPDVAVLSVEDNKGNTPLHIATNKGRIKIVRCLVSFEGINLNPINKAGDTPLDVSEKIGNAELVSVLKEAGAATAKDLGKPQNPAKQLKQTVSDIKHEVQSQLQQSRQTGVRVQKIAKRLKKLHISGLNNAINSATVVAVLIATVAFAAIFTIPGQYEEDRSKGELLGQAHIANKAPFLVFFIFDSLALFISLAVVVVQTSVVVIEQKAKKKLVFVINKLMWCACLFISIAFVSLSYIVVGKEEMWLAVCATVIGGTIMLTTIGAMCYCVVMHRMEESKLRSIRKERSKSQSFSMSRMPSDSDILNGEYNKRMYAL

SEQ ID NO: 70303 - DNA, 1701 bp, Arabidopsis thaliana
  misc_feature (1)..(1701): Ceres Seq. ID no. 2703078
  misc_feature: MA Experiment ID: 20000180 Result: Up-regulated in Transcription
  misc_feature: MA Experiment 20000180 PARAMETER Experiment Name: At_Germinating_Seeds_P Parameter: Age (hr) Value: 24 vs. 0
  misc_feature: MA Experiment 20000180 PARAMETER Experiment Name: At_Germinating_Seeds_P Parameter: Tissue Value: Germinating Seeds
  misc_feature: MA Experiment ID: 20000211 Result: Up-regulated in Transcription
  misc_feature: MA Experiment 20000211 PARAMETER Experiment Name: At_0.001percent_MeJA__P Parameter: Age (day) Value: 14
  misc_feature: MA Experiment 20000211 PARAMETER Experiment Name: At_0.001percent_MeJA__P Parameter: Organism Value: A. thaliana
  misc_feature: MA Experiment 20000211 PARAMETER Experiment Name: At_0.001percent_MeJA__P Parameter: Plant Line Value: WS
  misc_feature: MA Experiment 20000211 PARAMETER Experiment Name: At_0.001percent_MeJA__P Parameter: Timepoint (hr) Value: 1
  misc_feature: MA Experiment 20000211 PARAMETER Experiment Name: At_0.001percent_MeJA__P Parameter: Tissue Value: Aerial
  misc_feature: MA Experiment 20000211 PARAMETER Experiment Name: At_0.001percent_MeJA__P Parameter: Treatment Value: 0.001percent MeJA vs. No Treatment
  misc_feature: MA Experiment ID: 20000227 Result: Down-regulated in Transcription
  misc_feature: MA Experiment 20000227 PARAMETER Experiment Name: At_Root-Tips-vs-Tops_P Parameter: Tissue Value: Root Tips vs. Root Tops
  misc_feature: MA Experiment ID: 20000234 Result: Down-regulated in Transcription
  misc_feature: MA Experiment 20000234 PARAMETER Experiment Name: At_Siliques_P Parameter: Age (day) Value: 21
  misc_feature: MA Experiment 20000234 PARAMETER Experiment Name: At_Siliques_P Parameter: Organism Value: A. thaliana
  misc_feature: MA Experiment 20000234 PARAMETER Experiment Name: At_Siliques_P Parameter: Plant Line Value: WS
  misc_feature: MA Experiment 20000234 PARAMETER Experiment Name: At_Siliques_P Parameter: Tissue Value: Less Than 5mm Siliques vs. Whole Plant
  misc_feature: MA Experiment ID: 20000235 Result: Down-regulated in Transcription
  misc_feature: MA Experiment 20000235 PARAMETER Experiment Name: At_Siliques_P Parameter: Age (day) Value: 21
  misc_feature: MA Experiment 20000235 PARAMETER Experiment Name: At_Siliques_P Parameter: Organism Value: A. thaliana
  misc_feature: MA Experiment 20000235 PARAMETER Experiment Name: At_Siliques_P Parameter: Plant Line Value: WS
  misc_feature: MA Experiment 20000235 PARAMETER Experiment Name: At_Siliques_P Parameter: Tissue Value: 5-10mm Siliques vs. Whole Plant
  misc_feature: MA Experiment ID: 20000264 Result: Down-regulated in Transcription
  misc_feature: MA Experiment 20000264 PARAMETER Experiment Name: At_Open_Flower_P Parameter: Age (day) Value: 21
  misc_feature: MA Experiment 20000264 PARAMETER Experiment Name: At_Open_Flower_P Parameter: Plant Line Value: WS
  misc_feature: MA Experiment 20000264 PARAMETER Experiment Name: At_Open_Flower_P Parameter: Tissue Value: Open Flower vs. Whole Plant
  misc_feature: MA Experiment ID: 20000265 Result: Down-regulated in Transcription
  misc_feature: MA Experiment 20000265 PARAMETER Experiment Name: At_Open_Flower_P Parameter: Age (day) Value: 21
  misc_feature: MA Experiment 20000265 PARAMETER Experiment Name: At_Open_Flower_P Parameter: Plant Line Value: WS
  misc_feature: MA Experiment 20000265 PARAMETER Experiment Name: At_Open_Flower_P Parameter: Tissue Value: Closed Flower vs. Whole Plant
  misc_feature: MA Experiment ID: 20000286 Result: Down-regulated in Transcription
  misc_feature: MA Experiment 20000286 PARAMETER Experiment Name: At_Open_Flower_P Parameter: Age (day) Value: 21
  misc_feature: MA Experiment 20000286 PARAMETER Experiment Name: At_Open_Flower_P Parameter: Plant Line Value: WS
  misc_feature: MA Experiment 20000286 PARAMETER Experiment Name: At_Open_Flower_P Parameter: Tissue Value: Half Open vs. Whole Plant
  misc_feature: MA Experiment ID: 20000439 Result: Up-regulated in Transcription
  misc_feature: MA Experiment 20000439 PARAMETER Experiment Name: At_Roots__P Parameter: Age (day) Value: 14 vs. 21
  misc_feature: MA Experiment 20000439 PARAMETER Experiment Name: At_Roots__P Parameter: Organism Value: A. thaliana
  misc_feature: MA Experiment 20000439 PARAMETER Experiment Name: At_Roots__P Parameter: Tissue Value: Roots vs. Whole Plant
  misc_feature: MA Experiment ID: 20000445 Result: Down-regulated in Transcription
  misc_feature: MA Experiment 20000445 PARAMETER Experiment Name: At_100uM_NAA__P Parameter: Age (day) Value: 14
  misc_feature: MA Experiment 20000445 PARAMETER Experiment Name: At_100uM_NAA__P Parameter: Organism Value: A. thaliana
  misc_feature: MA Experiment 20000445 PARAMETER Experiment Name: At_100uM_NAA__P Parameter: Plant Line Value: WS
  misc_feature: MA Experiment 20000445 PARAMETER Experiment Name: At_100uM_NAA__P Parameter: Timepoint (hr) Value: 6
  misc_feature: MA Experiment 20000445 PARAMETER Experiment Name: At_100uM_NAA__P Parameter: Tissue Value: Aerial
  misc_feature: MA Experiment 20000445 PARAMETER Experiment Name: At_100uM_NAA__P Parameter: Treatment Value: 100uM NAA vs. No Treatment
  misc_feature: MA Experiment ID: 20000451 Result: Down-regulated in Transcription
  misc_feature: MA Experiment 20000451 PARAMETER Experiment Name: At_CS6879_Shoots-Roots_P Parameter: Age (day) Value: 14
  misc_feature: MA Experiment 20000451 PARAMETER Experiment Name: At_CS6879_Shoots-Roots_P Parameter: Organism Value: A. thaliana
  misc_feature: MA Experiment 20000451 PARAMETER Experiment Name: At_CS6879_Shoots-Roots_P Parameter: Plant Line Value: CS6879 vs. WS
  misc_feature: MA Experiment 20000451 PARAMETER Experiment Name: At_CS6879_Shoots-Roots_P Parameter: Tissue Value: Roots
  misc_feature: MA Experiment ID: 20000794 Result: Down-regulated in Transcription
  misc_feature: MA Experiment 20000794 PARAMETER Experiment Name: At_Petals_P Parameter: Age (day) Value: 23-25 days
  misc_feature: MA Experiment 20000794 PARAMETER Experiment Name: At_Petals_P Parameter: Plant Line Value: WS
  misc_feature: MA Experiment 20000794 PARAMETER Experiment Name: At_Petals_P Parameter: Tissue Value: Petals vs. Whole plant
  misc_feature: MA Experiment ID: 20001555 Result: Down-regulated in Transcription
  misc_feature: MA Experiment 20001555 PARAMETER Experiment Name: At_Drought_Soil_Dry_P Parameter: Age (day) Value: 24
  misc_feature: MA Experiment 20001555 PARAMETER Experiment Name: At_Drought_Soil_Dry_P Parameter: Organism Value: A. thaliana
  misc_feature: MA Experiment 20001555 PARAMETER Experiment Name: At_Drought_Soil_Dry_P Parameter: Plant Line Value: WS
  misc_feature: MA Experiment 20001555 PARAMETER Experiment Name: At_Drought_Soil_Dry_P Parameter: Post Timepoint (hr) Value: None
  misc_feature: MA Experiment 20001555 PARAMETER Experiment Name: At_Drought_Soil_Dry_P Parameter: Post-Treatment Value: None
  misc_feature: MA Experiment 20001555 PARAMETER Experiment Name: At_Drought_Soil_Dry_P Parameter: Timepoint (day) Value: 10
  misc_feature: MA Experiment 20001555 PARAMETER Experiment Name: At_Drought_Soil_Dry_P Parameter: Treatment Value: Drought vs. No Drought
  misc_feature: MA Experiment ID: 20001556 Result: Down-regulated in Transcription
  misc_feature: MA Experiment 20001556 PARAMETER Experiment Name: At_Drought_Soil_Dry_P Parameter: Age (day) Value: 26
  misc_feature: MA Experiment 20001556 PARAMETER Experiment Name: At_Drought_Soil_Dry_P Parameter: Organism Value: A. thaliana
  misc_feature: MA Experiment 20001556 PARAMETER Experiment Name: At_Drought_Soil_Dry_P Parameter: Plant Line Value: WS
  misc_feature: MA Experiment 20001556 PARAMETER Experiment Name: At_Drought_Soil_Dry_P Parameter: Post Timepoint (hr) Value: None
  misc_feature: MA Experiment 20001556 PARAMETER Experiment Name: At_Drought_Soil_Dry_P Parameter: Post-Treatment Value: None
  misc_feature: MA Experiment 20001556 PARAMETER Experiment Name: At_Drought_Soil_Dry_P Parameter: Timepoint (day) Value: 12
  misc_feature: MA Experiment 20001556 PARAMETER Experiment Name: At_Drought_Soil_Dry_P Parameter: Treatment Value: Drought vs. No Drought
  misc_feature: MA Experiment ID: 20001757 Result: Up-regulated in Transcription
  misc_feature: MA Experiment 20001757 PARAMETER Experiment Name: At_50mM_NH4NO3_L-to-H_P Parameter: Timepoint (hr) Value: 6
  misc_feature: MA Experiment 20001757 PARAMETER Experiment Name: At_50mM_NH4NO3_L-to-H_P Parameter: Tissue Value: Leaf
  misc_feature: MA Experiment 20001757 PARAMETER Experiment Name: At_50mM_NH4NO3_L-to-H_P Parameter: Treatment Value: 50mM NH4NO3 vs 100mM Mannitol
  misc_feature: MA Experiment ID: 20001904 Result: Down-regulated in Transcription
  misc_feature: MA Experiment 20001904 PARAMETER Experiment Name: At_Drought_Reproduction_P Parameter: Age (day) Value: 37
  misc_feature: MA Experiment 20001904 PARAMETER Experiment Name: At_Drought_Reproduction_P Parameter: Organism Value: A. thaliana
  misc_feature: MA Experiment 20001904 PARAMETER Experiment Name: At_Drought_Reproduction_P Parameter: Plant Line Value: WS
  misc_feature: MA Experiment 20001904 PARAMETER Experiment Name: At_Drought_Reproduction_P Parameter: Timepoint (day) Value: 7
  misc_feature: MA Experiment 20001904 PARAMETER Experiment Name: At_Drought_Reproduction_P Parameter: Tissue Value: Rosettes
  misc_feature: MA Experiment 20001904 PARAMETER Experiment Name: At_Drought_Reproduction_P Parameter: Treatment Value: Drought vs. No Drought
  misc_feature: MA Experiment ID: 20001905 Result: Down-regulated in Transcription
  misc_feature: MA Experiment 20001905 PARAMETER Experiment Name: At_Drought_Reproduction_P Parameter: Age (day) Value: 40
  misc_feature: MA Experiment 20001905 PARAMETER Experiment Name: At_Drought_Reproduction_P Parameter: Organism Value: A. thaliana
  misc_feature: MA Experiment 20001905 PARAMETER Experiment Name: At_Drought_Reproduction_P Parameter: Plant Line Value: WS
  misc_feature: MA Experiment 20001905 PARAMETER Experiment Name: At_Drought_Reproduction_P Parameter: Timepoint (day) Value: 10
  misc_feature: MA Experiment 20001905 PARAMETER Experiment Name: At_Drought_Reproduction_P Parameter: Tissue Value: Rosettes
  misc_feature: MA Experiment 20001905 PARAMETER Experiment Name: At_Drought_Reproduction_P Parameter: Treatment Value: Drought vs. No Drought
atgcagaaacaattagcatatattacaaaacacatactaattgtttctccttctccttcttccttgcaaatggatactttagcttcaaactcttcggatctcacgaccaagtcaagtctcggaatgtcgtcgtttaccaacatgtatctcctcacaacgcttcaagcccttgcggccctttgcttcttgatgattctcaacaaaataaagtcatcttcacgaaacaagaagttgcatcctctcccgccaggacccaccggttttccaattgttggaatgattccggcgatgcttaaaaaccgtccagttttccggtggctccacagcctcatgaaggagcttaacacggagatagcttgtgtgcgtctaggaaacactcacgtgatccctgtgacatgtcctaagattgcacgtgagatcttcaagcaacaagacgcactctttgcgtcaagaccactcacttatgctcaaaagattctctctaacggctacaaaacctgcgtgatcacaccgtttggcgaacaattcaagaagatgaggaaagtgatcatgacagagattgtttgtccagcgagacaccgttggctacacgacaatagagctgaggaaaccgatcacttgaccgcttggctctacaacatggttaagaactctgaaccagtcgatctccgttttgttacgaggcattattgtggaaatgcaatcaagaggcttatgttcgggacgaggacgttctcggagaaaaccgaagccgatggtggaccgactttggaagatatcgagcatatggatgctatgttcgaggggttagggtttacgtttgcgttttgtatatcggattatctaccgatgcttacgggattggatctaaacggacatgaaaagattatgagagaatccagtgcaattatggataaatatcacgatcctataattgatgagaggattaagatgtggagagaaggtaagagaactcagatcgaagattttctagacattttcatctctatcaaggacgaagctggccagcctttgcttaccgctgatgaaatcaaaccaaccattaaggaacttgtaatggcggcgccagacaacccatcaaacgccgtggaatgggccattgcggagatgataaacaaaccggagatcctccacaaagctatggaagagatcgatagagtcgtcggaaaagaaagattcgtccaagaatccgatataccaaaacttaactatgttaaagctattatccgagaagctttccgtcttcatcccgtcgccgccttcaacctcccacacgtggcactctctgatacgaccgtcgcaggttaccatattcctaaaggaagtcaagttttacttagccgttacggtcttggtcgtaaccccaaggtttggtctgatccacttagcttcaaaccagaaaggcatctcaatgagtgttcggaagtgactttgacggagaatgatctccgttttatctcgtttagtaccggaaagagaggatgtgctgctccggcgttaggtacggcgataacgaccatgatgctagcgaggcttttgcaagggtttaagtggaaactagcaggaagtgagacacgtgtcgagcttatggaatcgagtcatgatatgtttctttcgaagcctttggtgttggtcggagaattgagattgtcggaggacctttacccaatggtgaagtga

SEQ ID NO: 70304 - protein, 566 aa, Arabidopsis thaliana
  peptide (1)..(566): Ceres Seq. ID no. 2703079
  misc_feature (82)..(555): Pfam Name: Cytochrome P450 Pfam Description: Cytochrome P450
  misc_feature (1)..(566): Homolog of NCBI NO: 15227187 NR Description: putative cytochrome P450; protein id: At2g22330.1
  misc_feature (24)..(566): Homolog of NCBI NO: 25991347 NR Description: cytochrome P450 [Brassica napus]
  misc_feature (24)..(566): Homolog of NCBI NO: 15236088 NR Description: cytochrome P450 - like protein; protein id: supported by cDNA: gi_15028134, supported by cDNA: gi_20259280
  misc_feature (24)..(566): Homolog of NCBI NO: 5915824 NR Description: Cytochrome P450 79B1 >gi|3283433|gb|AAD03415.1|
  misc_feature (185)..(566): Homolog of NCBI NO: 11357242 NR Description: cytochrome P450 [imported] - Arabidopsis thaliana
  misc_feature (80)..(565): Homolog of NCBI NO: 5915822 NR Description: CYTOCHROME P450 79A1 (CYTOCHROME P450TYR)
  misc_feature (27)..(563): Homolog of NCBI NO: 6739527 NR Description: N-hydroxylating cytochrome P450 [Manihot
  misc_feature (27)..(563): Homolog of NCBI NO: 6739530 NR Description: N-hydroxylating cytochrome P450 [Manihot
  misc_feature (54)..(563): Homolog of NCBI NO: 13878375 NR Description: Cytochrome P450 79A2 >gi|10176738|dbj|BAB09969.1|
  misc_feature (54)..(563): Homolog of NCBI NO: 18414836 NR Description: cytochrome P450 CYP79A2; protein id: At5g05260.1, by cDNA: gi_7839382 [Arabidopsis thaliana]
MQKQLAYITKHILIVSPSPSSLQMDTLASNSSDLTTKSSLGMSSFTNMYLLTTLQALAALCFLMILNKIKSSSRNKKLHPLPPGPTGFPIVGMIPAMLKNRPVFRWLHSLMKELNTEIACVRLGNTHVIPVTCPKIAREIFKQQDALFASRPLTYAQKILSNGYKTCVITPFGEQFKKMRKVIMTEIVCPARHRWLHDNRAEETDHLTAWLYNMVKNSEPVDLRFVTRHYCGNAIKRLMFGTRTFSEKTEADGGPTLEDIEHMDAMFEGLGFTFAFCISDYLPMLTGLDLNGHEKIMRESSAIMDKYHDPIIDERIKMWREGKRTQIEDFLDIFISIKDEAGQPLLTADEIKPTIKELVMAAPDNPSNAVEWAIAEMINKPEILHKAMEEIDRVVGKERFVQESDIPKLNYVKAIIREAFRLHPVAAFNLPHVALSDTTVAGYHIPKGSQVLLSRYGLGRNPKVWSDPLSFKPERHLNECSEVTLTENDLRFISFSTGKRGCAAPALGTAITTMMLARLLQGFKWKLAGSETRVELMESSHDMFLSKPLVLVGELRLSEDLYPMVK

SEQ ID NO: 70305 - protein, 543 aa, Arabidopsis thaliana
  peptide (1)..(543): Ceres Seq. ID no. 2703080
  misc_feature (59)..(532): Pfam Name: Cytochrome P450 Pfam Description: Cytochrome P450
  misc_feature (31)..(540): Homolog of NCBI NO: 18414836 NR Description: cytochrome P450 CYP79A2; protein id: At5g05260.1, by cDNA: gi_7839382 [Arabidopsis thaliana]
  misc_feature (1)..(543): Homolog of NCBI NO: 15227187 NR Description: putative cytochrome P450; protein id: At2g22330.1
  misc_feature (1)..(543): Homolog of NCBI NO: 25991347 NR Description: cytochrome P450 [Brassica napus]
  misc_feature (1)..(543): Homolog of NCBI NO: 15236088 NR Description: cytochrome P450 - like protein; protein id: supported by cDNA: gi_15028134, supported by cDNA: gi_20259280
  misc_feature (1)..(543): Homolog of NCBI NO: 5915824 NR Description: Cytochrome P450 79B1 >gi|3283433|gb|AAD03415.1|
  misc_feature (162)..(543): Homolog of NCBI NO: 11357242 NR Description: cytochrome P450 [imported] - Arabidopsis thaliana
  misc_feature (57)..(542): Homolog of NCBI NO: 5915822 NR Description: CYTOCHROME P450 79A1 (CYTOCHROME P450TYR)
  misc_feature (4)..(540): Homolog of NCBI NO: 6739527 NR Description: N-hydroxylating cytochrome P450 [Manihot
  misc_feature (4)..(540): Homolog of NCBI NO: 6739530 NR Description: N-hydroxylating cytochrome P450 [Manihot
  misc_feature (31)..(540): Homolog of NCBI NO: 13878375 NR Description: Cytochrome P450 79A2 >gi|10176738|dbj|BAB09969.1|
MDTLASNSSDLTTKSSLGMSSFTNMYLLTTLQALAALCFLMILNKIKSSSRNKKLHPLPPGPTGFPIVGMIPAMLKNRPVFRWLHSLMKELNTEIACVRLGNTHVIPVTCPKIAREIFKQQDALFASRPLTYAQKILSNGYKTCVITPFGEQFKKMRKVIMTEIVCPARHRWLHDNRAEETDHLTAWLYNMVKNSEPVDLRFVTRHYCGNAIKRLMFGTRTFSEKTEADGGPTLEDIEHMDAMFEGLGFTFAFCISDYLPMLTGLDLNGHEKIMRESSAIMDKYHDPIIDERIKMWREGKRTQIEDFLDIFISIKDEAGQPLLTADEIKPTIKELVMAAPDNPSNAVEWAIAEMINKPEILHKAMEEIDRVVGKERFVQESDIPKLNYVKAIIREAFRLHPVAAFNLPHVALSDTTVAGYHIPKGSQVLLSRYGLGRNPKVWSDPLSFKPERHLNECSEVTLTENDLRFISFSTGKRGCAAPALGTAITTMMLARLLQGFKWKLAGSETRVELMESSHDMFLSKPLVLVGELRLSEDLYPMVK

SEQ ID NO: 70306 - protein, 525 aa, Arabidopsis thaliana
  peptide (1)..(525): Ceres Seq. ID no. 2703081
  misc_feature (41)..(514): Pfam Name: Cytochrome P450 Pfam Description: Cytochrome P450
  misc_feature (1)..(525): Homolog of NCBI NO: 15227187 NR Description: putative cytochrome P450; protein id: At2g22330.1
  misc_feature (1)..(525): Homolog of NCBI NO: 25991347 NR Description: cytochrome P450 [Brassica napus]
  misc_feature (1)..(525): Homolog of NCBI NO: 15236088 NR Description: cytochrome P450 - like protein; protein id: supported by cDNA: gi_15028134, supported by cDNA: gi_20259280
  misc_feature (1)..(525): Homolog of NCBI NO: 5915824 NR Description: Cytochrome P450 79B1 >gi|3283433|gb|AAD03415.1|
  misc_feature (144)..(525): Homolog of NCBI NO: 11357242 NR Description: cytochrome P450 [imported] - Arabidopsis thaliana
  misc_feature (39)..(524): Homolog of NCBI NO: 5915822 NR Description: CYTOCHROME P450 79A1 (CYTOCHROME P450TYR)
  misc_feature (1)..(522): Homolog of NCBI NO: 6739527 NR Description: N-hydroxylating cytochrome P450 [Manihot
  misc_feature (1)..(522): Homolog of NCBI NO: 6739530 NR Description: N-hydroxylating cytochrome P450 [Manihot
  misc_feature (13)..(522): Homolog of NCBI NO: 13878375 NR Description: Cytochrome P450 79A2 >gi|10176738|dbj|BAB09969.1|
  misc_feature (13)..(522): Homolog of NCBI NO: 18414836 NR Description: cytochrome P450 CYP79A2; protein id: At5g05260.1, by cDNA: gi_7839382 [Arabidopsis thaliana]
MSSFTNMYLLTTLQALAALCFLMILNKIKSSSRNKKLHPLPPGPTGFPIVGMIPAMLKNRPVFRWLHSLMKELNTEIACVRLGNTHVIPVTCPKIAREIFKQQDALFASRPLTYAQKILSNGYKTCVITPFGEQFKKMRKVIMTEIVCPARHRWLHDNRAEETDHLTAWLYNMVKNSEPVDLRFVTRHYCGNAIKRLMFGTRTFSEKTEADGGPTLEDIEHMDAMFEGLGFTFAFCISDYLPMLTGLDLNGHEKIMRESSAIMDKYHDPIIDERIKMWREGKRTQIEDFLDIFISIKDEAGQPLLTADEIKPTIKELVMAAPDNPSNAVEWAIAEMINKPEILHKAMEEIDRVVGKERFVQESDIPKLNYVKAIIREAFRLHPVAAFNLPHVALSDTTVAGYHIPKGSQVLLSRYGLGRNPKVWSDPLSFKPERHLNECSEVTLTENDLRFISFSTGKRGCAAPALGTAITTMMLARLLQGFKWKLAGSETRVELMESSHDMFLSKPLVLVGELRLSEDLYPMVK

SEQ ID NO: 70307 - DNA, 2796 bp, Arabidopsis thaliana
  misc_feature (1)..(2796): Ceres Seq. ID no. 2703558
  misc_feature: MA Experiment ID: 20000307 Result: Down-regulated in Transcription
  misc_feature: MA Experiment 20000307 PARAMETER Experiment Name: At_Germinating_Seeds_Sub_P Parameter: Age (hr) Value: 24 vs. 0
  misc_feature: MA Experiment 20000307 PARAMETER Experiment Name: At_Germinating_Seeds_Sub_P Parameter: Organism Value: A. thaliana
  misc_feature: MA Experiment 20000307 PARAMETER Experiment Name: At_Germinating_Seeds_Sub_P Parameter: Plant Line Value: WS
  misc_feature: MA Experiment 20000307 PARAMETER Experiment Name: At_Germinating_Seeds_Sub_P Parameter: Tissue Value: Germinating Seeds
  misc_feature: MA Experiment ID: 20000328 Result: Down-regulated in Transcription
  misc_feature: MA Experiment 20000328 PARAMETER Experiment Name: At_42deg_Heat_Sub_P Parameter: Age (day) Value: 14
  misc_feature: MA Experiment 20000328 PARAMETER Experiment Name: At_42deg_Heat_Sub_P Parameter: Organism Value: A. thaliana
  misc_feature: MA Experiment 20000328 PARAMETER Experiment Name: At_42deg_Heat_Sub_P Parameter: Plant Line Value: WS
  misc_feature: MA Experiment 20000328 PARAMETER Experiment Name: At_42deg_Heat_Sub_P Parameter: Temperature (deg C) Value: 42 vs. 22
  misc_feature: MA Experiment 20000328 PARAMETER Experiment Name: At_42deg_Heat_Sub_P Parameter: Timepoint (hr) Value: 6
  misc_feature: MA Experiment 20000328 PARAMETER Experiment Name: At_42deg_Heat_Sub_P Parameter: Tissue Value: Aerial
atggaggaagtgttcgaggagctgaaatgtacaaaacaaggtcttacggcaaatgaagcttctcaccgtcttgacgtttttggtcctaacaagcttgaagagaagaaggaaagcaagttacttaagtttttagggttcatgtggaacccattgtcgtgggtgatggaggtggctgcactaatggcaatcgctttggccaacggaggaggacggccaccggattggcaagactttgtggggatagtgtgtttactattaatcaactcaaccattagtttcattgaggaaaataacgccggtaatgctgcagccgctctcatggccggtctagcccctaagacaaaggttctcagagataatcaatggagcgagcaagaagcatcgattctcgtccccggagatgtaatcagcatcaagctcggcgatatcattcccgccgatgcacgtttactcgacggcgatcctctcaaaatcgatcaatcatcactcaccggtgaatcaatccccgtcacaaaaaaccccagcgatgaagtcttctccggctcaatatgcaaacaaggcgaaatcgaagcaatcgtcatcgccactggagtccacacattcttcggcaaagcagctcatctcgtcgacaacacaaaccaaatcggccatttccagaaagttctcacttcgattggtaacttctgtatctgttcgattgctttaggaatcatcgttgagcttttagtaatgtatccgattcaacgccggagatatcgagacggaatcgataatttacttgttttgttgatcggagggattcctatagctatgcctagtgtgttatctgttacaatggcgactggttctcatagattgtttcaacaaggagctattactaagagaatgactgctattgaggaaatggctggtatggatgtattgtgttgtgataagactggtactcttacgcttaataagcttacggttgataagaacttagtcgaggttttcgctaaaggagttggtaaagaacatgttttccttttggctgcgagagcttcgaggattgagaatcaagatgcgattgatgctgctattgttggaatgcttgctgatcctaaagaggctagagctggtgttagagaggttcattttttcccttttaatccggttgataagagaactgctttgacttatgttgactctgatggaaactggcatagagctagtaaaggagctccagagcagatactgaacctctgtaattgcaaggaagatgttaggaggaaagttcatggagtgattgataagtttgctgagcgtggacttcgctctttggctgttgcaagacaggaagttctcgagaagaagaaagatgctcctggtggcccatggcaacttgtaggtcttttacctctttttgatcctccgaggcatgacagtgccgagacaatcaggagggctttaaacctcggtgttaatgttaagatgataaccggggaccagcttgcaattgggaaagagaccggtcgaaggcttggaatgggtacgaacatgtatccttcttctgcgctgctcggacaagtcaaagattcttccttgggtgcacttcctgtggatgaactgatagagaaggctgatgggtttgcaggagtctttccagaacataagtatgagattgttcataggctgcaacaaaggaatcacatatgtggcatgactggagatggtgtgaatgatgccccggctctcaagaaggcggatattggtatagctgttgttgatgctactgatgctgcgagaggcgcttctgatatcgttctcacagaacccggattgagtgttatcattagtgctgtactcaccagtagagccatattccaaagaatgaaaaattacactatttatgcggtttcaatcacgatacgaattgtgtttggcttcatgttcattgccctcatatggcagttcgatttttcgcctttcatggttctgatcatagcaatcttaaacgacggaacaatcatgacaatatcaaaagacagaatgaagccatctccacagccagatagctggaaactcagagatatattctcgaccggcgtcgtgcttggaggttaccaggccttgatgacagtcgttttcttctgggtgatgaaagacagtgattttttctcgaactattttggtgtgagaccactgagccaacgtcctgaacaaatgatggctgctctgtatctacaagttagcatcataagccaggctctcatcttcgtcaccagatcccgtagctggtcctacgccgaatgccctggccttctcttacttggtgcatttgtcatagctcagctggtggcgacatttatagcagtttatgcaaactggagttttgcccggatagaaggagccggttggggatgggctggagtgatctggctatacagtttcctaacgtacatccctcttgacttactcaagtttggaatccgctatgttttgagtggaaaagcttggttaaatcttcttgagaacaagactgccttcacgacgaagaaagactatgggaaagaggaaagagaagctcaatgggctgcagctcaaagaaccctccacggacttcaaccagcagagaaaaacaacatctttaacgaaaagaatagttacagtgaactctctcagattgctgaacaggctaaacgccgagctgaggttgtcaggctgagagagataaatacattaaaagggcatgtagagtcagtggtgaagcttaaaggacttgacattgacacgattcagcaacattacaccgtttaa

SEQ ID NO: 70308 - protein, 931 aa, Arabidopsis thaliana
  peptide (1)..(931): Ceres Seq. ID no. 2703559
  misc_feature (305)..(591): Pfam Name: haloacid dehalogenase-like hydrolase Pfam Description: haloacid dehalogenase-like hydrolase
  misc_feature (1)..(821): Homolog of NCBI NO: 3348073 NR Description: plasma membrane H(+)-ATPase 1 [Filobasidiella
  misc_feature (1)..(821): Homolog of NCBI NO: 6691153 NR Description: plasma membrane H(+)-ATPase [Filobasidiella
  misc_feature (1)..(827): Homolog of NCBI NO: 2652922 NR Description: plasma membrane (H+) ATPase [Uromyces fabae]
  misc_feature (1)..(861): Homolog of NCBI NO: 1709664 NR Description: Probable plasma membrane ATPase (Proton pump)
  misc_feature (1)..(721): Homolog of NCBI NO: 1709666 NR Description: Plasma membrane ATPase (Proton pump)
  misc_feature (739)..(793): Homolog of NCBI NO: 1709666 NR Description: Plasma membrane ATPase (Proton pump)
  misc_feature (1)..(719): Homolog of NCBI NO: 1709665 NR Description: Plasma membrane ATPase (Proton pump)
  misc_feature (737)..(786): Homolog of NCBI NO: 1709665 NR Description: Plasma membrane ATPase (Proton pump)
  misc_feature (1)..(731): Homolog of NCBI NO: 16751320 NR Description: putative plasma membrane-type proton ATPase
  misc_feature (731)..(786): Homolog of NCBI NO: 16751320 NR Description: putative plasma membrane-type proton ATPase
MEEVFEELKCTKQGLTANEASHRLDVFGPNKLEEKKESKLLKFLGFMWNPLSWVMEVAALMAIALANGGGRPPDWQDFVGIVCLLLINSTISFIEENNAGNAAAALMAGLAPKTKVLRDNQWSEQEASILVPGDVISIKLGDIIPADARLLDGDPLKIDQSSLTGESIPVTKNPSDEVFSGSICKQGEIEAIVIATGVHTFFGKAAHLVDNTNQIGHFQKVLTSIGNFCICSIALGIIVELLVMYPIQRRRYRDGIDNLLVLLIGGIPIAMPSVLSVTMATGSHRLFQQGAITKRMTAIEEMAGMDVLCCDKTGTLTLNKLTVDKNLVEVFAKGVGKEHVFLLAARASRIENQDAIDAAIVGMLADPKEARAGVREVHFFPFNPVDKRTALTYVDSDGNWHRASKGAPEQILNLCNCKEDVRRKVHGVIDKFAERGLRSLAVARQEVLEKKKDAPGGPWQLVGLLPLFDPPRHDSAETIRRALNLGVNVKMITGDQLAIGKETGRRLGMGTNMYPSSALLGQVKDSSLGALPVDELIEKADGFAGVFPEHKYEIVHRLQQRNHICGMTGDGVNDAPALKKADIGIAVVDATDAARGASDIVLTEPGLSVIISAVLTSRAIFQRMKNYTIYAVSITIRIVFGFMFIALIWQFDFSPFMVLIIAILNDGTIMTISKDRMKPSPQPDSWKLRDIFSTGVVLGGYQALMTVVFFWVMKDSDFFSNYFGVRPLSQRPEQMMAALYLQVSIISQALIFVTRSRSWSYAECPGLLLLGAFVIAQLVATFIAVYANWSFARIEGAGWGWAGVIWLYSFLTYIPLDLLKFGIRYVLSGKAWLNLLENKTAFTTKKDYGKEEREAQWAAAQRTLHGLQPAEKNNIFNEKNSYSELSQIAEQAKRRAEVVRLREINTLKGHVESVVKLKGLDIDTIQQHYTV

SEQ ID NO: 70309 - protein, 885 aa, Arabidopsis thaliana
  peptide (1)..(885): Ceres Seq. ID no. 2703560
  misc_feature (259)..(545): Pfam Name: haloacid dehalogenase-like hydrolase Pfam Description: haloacid dehalogenase-like hydrolase
  misc_feature (1)..(775): Homolog of NCBI NO: 3348073 NR Description: plasma membrane H(+)-ATPase 1 [Filobasidiella
  misc_feature (1)..(775): Homolog of NCBI NO: 6691153 NR Description: plasma membrane H(+)-ATPase [Filobasidiella
  misc_feature (1)..(781): Homolog of NCBI NO: 2652922 NR Description: plasma membrane (H+) ATPase [Uromyces fabae]
  misc_feature (1)..(815): Homolog of NCBI NO: 1709664 NR Description: Probable plasma membrane ATPase (Proton pump)
  misc_feature (1)..(675): Homolog of NCBI NO: 1709666 NR Description: Plasma membrane ATPase (Proton pump)
  misc_feature (693)..(747): Homolog of NCBI NO: 1709666 NR Description: Plasma membrane ATPase (Proton pump)
  misc_feature (1)..(673): Homolog of NCBI NO: 1709665 NR Description: Plasma membrane ATPase (Proton pump)
  misc_feature (691)..(740): Homolog of NCBI NO: 1709665 NR Description: Plasma membrane ATPase (Proton pump)
  misc_feature (1)..(685): Homolog of NCBI NO: 16751320 NR Description: putative plasma membrane-type proton ATPase
  misc_feature (685)..(740): Homolog of NCBI NO: 16751320 NR Description: putative plasma membrane-type proton ATPase
MWNPLSWVMEVAALMAIALANGGGRPPDWQDFVGIVCLLLINSTISFIEENNAGNAAAALMAGLAPKTKVLRDNQWSEQEASILVPGDVISIKLGDIIPADARLLDGDPLKIDQSSLTGESIPVTKNPSDEVFSGSICKQGEIEAIVIATGVHTFFGKAAHLVDNTNQIGHFQKVLTSIGNFCICSIALGIIVELLVMYPIQRRRYRDGIDNLLVLLIGGIPIAMPSVLSVTMATGSHRLFQQGAITKRMTAIEEMAGMDVLCCDKTGTLTLNKLTVDKNLVEVFAKGVGKEHVFLLAARASRIENQDAIDAAIVGMLADPKEARAGVREVHFFPFNPVDKRTALTYVDSDGNWHRASKGAPEQILNLCNCKEDVRRKVHGVIDKFAERGLRSLAVARQEVLEKKKDAPGGPWQLVGLLPLFDPPRHDSAETIRRALNLGVNVKMITGDQLAIGKETGRRLGMGTNMYPSSALLGQVKDSSLGALPVDELIEKADGFAGVFPEHKYEIVHRLQQRNHICGMTGDGVNDAPALKKADIGIAVVDATDAARGASDIVLTEPGLSVIISAVLTSRAIFQRMKNYTIYAVSITIRIVFGFMFIALIWQFDFSPFMVLIIAILNDGTIMTISKDRMKPSPQPDSWKLRDIFSTGVVLGGYQALMTVVFFWVMKDSDFFSNYFGVRPLSQRPEQMMAALYLQVSIISQALIFVTRSRSWSYAECPGLLLLGAFVIAQLVATFIAVYANWSFARIEGAGWGWAGVIWLYSFLTYIPLDLLKFGIRYVLSGKAWLNLLENKTAFTTKKDYGKEEREAQWAAAQRTLHGLQPAEKNNIFNEKNSYSELSQIAEQAKRRAEVVRLREINTLKGHVESVVKLKGLDIDTIQQHYTV

SEQ ID NO: 70310 - protein, 877 aa, Arabidopsis thaliana
  peptide (1)..(877): Ceres Seq. ID no. 2703561
  misc_feature (251)..(537): Pfam Name: haloacid dehalogenase-like hydrolase Pfam Description: haloacid dehalogenase-like hydrolase
  misc_feature (1)..(767): Homolog of NCBI NO: 3348073 NR Description: plasma membrane H(+)-ATPase 1 [Filobasidiella
  misc_feature (1)..(767): Homolog of NCBI NO: 6691153 NR Description: plasma membrane H(+)-ATPase [Filobasidiella
  misc_feature (1)..(773): Homolog of NCBI NO: 2652922 NR Description: plasma membrane (H+) ATPase [Uromyces fabae]
  misc_feature (1)..(807): Homolog of NCBI NO: 1709664 NR Description: Probable plasma membrane ATPase (Proton pump)
  misc_feature (1)..(667): Homolog of NCBI NO: 1709666 NR Description: Plasma membrane ATPase (Proton pump)
  misc_feature (685)..(739): Homolog of NCBI NO: 1709666 NR Description: Plasma membrane ATPase (Proton pump)
  misc_feature (1)..(665): Homolog of NCBI NO: 1709665 NR Description: Plasma membrane ATPase (Proton pump)
  misc_feature (683)..(732): Homolog of NCBI NO: 1709665 NR Description: Plasma membrane ATPase (Proton pump)
  misc_feature (1)..(677): Homolog of NCBI NO: 16751320 NR Description: putative plasma membrane-type proton ATPase
  misc_feature (677)..(732): Homolog of NCBI NO: 16751320 NR Description: putative plasma membrane-type proton ATPase
MEVAALMAIALANGGGRPPDWQDFVGIVCLLLINSTISFIEENNAGNAAAALMAGLAPKTKVLRDNQWSEQEASILVPGDVISIKLGDIIPADARLLDGDPLKIDQSSLTGESIPVTKNPSDEVFSGSICKQGEIEAIVIATGVHTFFGKAAHLVDNTNQIGHFQKVLTSIGNFCICSIALGIIVELLVMYPIQRRRYRDGIDNLLVLLIGGIPIAMPSVLSVTMATGSHRLFQQGAITKRMTAIEEMAGMDVLCCDKTGTLTLNKLTVDKNLVEVFAKGVGKEHVFLLAARASRIENQDAIDAAIVGMLADPKEARAGVREVHFFPFNPVDKRTALTYVDSDGNWHRASKGAPEQILNLCNCKEDVRRKVHGVIDKFAERGLRSLAVARQEVLEKKKDAPGGPWQLVGLLPLFDPPRHDSAETIRRALNLGVNVKMITGDQLAIGKETGRRLGMGTNMYPSSALLGQVKDSSLGALPVDELIEKADGFAGVFPEHKYEIVHRLQQRNHICGMTGDGVNDAPALKKADIGIAVVDATDAARGASDIVLTEPGLSVIISAVLTSRAIFQRMKNYTIYAVSITIRIVFGFMFIALIWQFDFSPFMVLIIAILNDGTIMTISKDRMKPSPQPDSWKLRDIFSTGVVLGGYQALMTVVFFWVMKDSDFFSNYFGVRPLSQRPEQMMAALYLQVSIISQALIFVTRSRSWSYAECPGLLLLGAFVIAQLVATFIAVYANWSFARIEGAGWGWAGVIWLYSFLTYIPLDLLKFGIRYVLSGKAWLNLLENKTAFTTKKDYGKEEREAQWAAAQRTLHGLQPAEKNNIFNEKNSYSELSQIAEQAKRRAEVVRLREINTLKGHVESVVKLKGLDIDTIQQHYTV

SEQ ID NO: 70311 - DNA, 4323 bp, Arabidopsis thaliana
  misc_feature (1)..(4323): Ceres Seq. ID no. 2703588
  misc_feature: MA Experiment ID: 20000314 Result: Down-regulated in Transcription
  misc_feature: MA Experiment 20000314 PARAMETER Experiment Name: At_14day_Shoots-Roots_Sub_P Parameter: Age (day) Value: 14
  misc_feature: MA Experiment 20000314 PARAMETER Experiment Name: At_14day_Shoots-Roots_Sub_P Parameter: Organism Value: A. thaliana
  misc_feature: MA Experiment 20000314 PARAMETER Experiment Name: At_14day_Shoots-Roots_Sub_P Parameter: Plant Line Value: WS
  misc_feature: MA Experiment 20000314 PARAMETER Experiment Name: At_14day_Shoots-Roots_Sub_P Parameter: Tissue Value: Roots vs. Whole Plant
  misc_feature: MA Experiment ID: 20000315 Result: Down-regulated in Transcription
  misc_feature: MA Experiment 20000315 PARAMETER Experiment Name: At_14day_Shoots-Roots_Sub_P Parameter: Age (day) Value: 14
  misc_feature: MA Experiment 20000315 PARAMETER Experiment Name: At_14day_Shoots-Roots_Sub_P Parameter: Organism Value: A. thaliana
  misc_feature: MA Experiment 20000315 PARAMETER Experiment Name: At_14day_Shoots-Roots_Sub_P Parameter: Plant Line Value: WS
  misc_feature: MA Experiment 20000315 PARAMETER Experiment Name: At_14day_Shoots-Roots_Sub_P Parameter: Tissue Value: Shoots vs. Whole Plant
  misc_feature: MA Experiment ID: 20000328 Result: Down-regulated in Transcription
  misc_feature: MA Experiment 20000328 PARAMETER Experiment Name: At_42deg_Heat_Sub_P Parameter: Age (day) Value: 14
  misc_feature: MA Experiment 20000328 PARAMETER Experiment Name: At_42deg_Heat_Sub_P Parameter: Organism Value: A. thaliana
  misc_feature: MA Experiment 20000328 PARAMETER Experiment Name: At_42deg_Heat_Sub_P Parameter: Plant Line Value: WS
  misc_feature: MA Experiment 20000328 PARAMETER Experiment Name: At_42deg_Heat_Sub_P Parameter: Temperature (deg C) Value: 42 vs. 22
  misc_feature: MA Experiment 20000328 PARAMETER Experiment Name: At_42deg_Heat_Sub_P Parameter: Timepoint (hr) Value: 6
  misc_feature: MA Experiment 20000328 PARAMETER Experiment Name: At_42deg_Heat_Sub_P Parameter: Tissue Value: Aerial
  misc_feature: MA Experiment ID: 20000440 Result: Up-regulated in Transcription
  misc_feature: MA Experiment 20000440 PARAMETER Experiment Name: At_Closed-Flower__Sub_P Parameter: Tissue Value: Closed Flower vs. Whole Plant
  misc_feature: Pfam Name: B3 Pfam Description: B3 DNA binding domain
atggcgaattcaaggatttatccgcaattcttccacacacttgttcctagcttccacactcacttgatgattcctgaagacttcttctcagagtatatcgaaggaagaagcgtcgcagagctgaaattggacttttcagacaaatcttgggaagtgaagttgtctgatcggagaatcactgacggctgggaagagtttgtggtggctaatgattttcgtatcggcgatgttgtcgcttttagatatgttggaaatttggtgttccatgtttctaatttaggacctaattactatgagattgaacacaatgatgagcttcccaaagagaagaaagcgaagacgaacagtgaagaagcagatgcagtttcttcttcttcatcagcagacaagtcatgttttatggccattatcacagctttagatctaacgacagatacactgtatcttccactacattttacaagcgcaaatggtcttacacgaaaaaaccgggagattattttaacagatggaggggaaagatcaagggtattggatctgaggttcgacgaatcatctggtactttttatatcagccggggttggagaaatttctgtgatgaaaatggacaaaaagcaggaggtttctttctgtttaaactagtgggaaaaggtgaaacgctggtgctcagtttctgtcctacagaatctatcaatggggaagagaacataacaagggaggacagtaaagacgagtgcagctcgttggactcattgatgaatatagtagaaaaaaagaagtatattccgaaaccaagaggttcaccatattcatcatattcaccaagtcataaacaattcgtaacatttacgcttccaccggattatgctagaattggaaaattgagtctttcggcgcctttcgttagggaaaatggcatcaacaagcctggggagatatgtcttttggataaacatggtagaaagtggttgacaagtcttctgctggacagtaaaggaacaatgtctttgggaaagggttggaaagagtttgttaaagcaaacagcttagagacgggcttcacactcaagttgatatgggaagaaacaactcctgtgcttagtttgtgtagtccagaatctaacagtgacagagagcaggaagagatttcaaaagctatcgagaaacattctcttttcatagatcctagcaacagggacaaaatcagcaacaatgacaaagaggagaacatgtcatgggagagaaagaaggatcatctgaaaagtagagattcaactctatcaagccaaaaacaatttgtaacaataacaattacaccttccagtgatagattggtaagtttatcaaatgactcttgtttagtggttgttagtttattgtactttgatatgcgtctcccaaaggtattcacgagggagaatggcatcaacaagccggggaggattactctgttgggaaaagacggtataaagcagcagacgaatttgttattcgacaaagcaaatggtgccatgtctttgggacacggctggaaagattttgttaaagataatggcttaaagacaggtgactccttcacgctaaagttgatttgggaagaccaaactcctgttcttagcttgtgtcctgcagactgtagcattgacagagaagcaggaggagggcgatctgaaacaaaccagaaaaagtctcttccaatagaacctagcacatgtaaaaaaatcaggaaagacgtgaacatcaaagatgacaacagcaaagagaaaaatgacaaagaagagagcaaatcagtggatggagagaggaaatatctgagagggacatatttaactccatcaagccaaaaacactttgtgacattaacaattacaccttcctctataaaaaaagatagacttattctttccccacaatttgcaaggaagaacaatattgacaagcctggaatgatatatctgctggatacagatggtacaaagtggctgataagccttcaacgagataagaaaggaacaatgagtttgggaaaaggttggaaagaatttgctgaagcaaatgactttaagttaggcgaatcctttacgatggagttagtatgggaagacacaactcctatgctcagtttgttacgtaccgagtttaggagttcaaaagctaacgagaaagagtcaatttcctcagaacataaaaccagagaatcatccccaacaatcaaaaaccgaatcgtgactccagcactcacacctgaagatgttaaagcctgtaaattggtaacttcatcaaactactcttgtttttcagagattctttcagcgcaatttgcaagggagaacaatattaaccagcctggaacgatatatctattggatacagatggtaggaagtggctgacaacggttaaacgggacaagaaaggaacaatgagtttgggaaagggttggaaagagtttgctgatacaaaagacttaaagtcaggcgactcctttacgatggagttaatatgggaagacacaaatcctgtgctcagtttgttacgtacaaagtttagcagttctaaatctaacaaggaagagtccatttttttagaaccaaaaagtagagattcatcctccccaacaatcgtaaacagattcgtgacattagcacttacaccagaagatgttacagcctgtaaactgattcttccaagtcagttcatgaaggctaatggcatcaacaacaaacttgggaagataactcttttgggtgaaaacggagtcgaatggccgggatatatgttgtcgctagatggaactctcgctttaggaaatggttgggaaggcttttgtgaggctaatggcgtgaagttaggacagacttttactttggagtttgttaatgaacaagatacaacaacaactccgagaatacctgtagccttcttcttgaagaatatagaaggaagatatgagcagaagacggcggagctgagatcagatgcgtcaaagataacttgggaagtgaagatagatggacagagactcactgacggttggaaagagtttgctctctcacatgatcttcgaatcggtgacattgttgttttcagacaagagagagatatgtctttccacgttacaatgttgggacctagttgttgtgagatccaatatggttcgtgttcagacgaggagagaaacctcgagaagaagaagaatccaaatggagaagcaaagtcttcttcactagatccttcttgtttttcggctaatgtggcgccttcgagtctacgttatgacttaatgctttttccaatgggttttgtgagggaaaatggtgtagtcggatctggaaagattgttctgatgaatgaaaagggcagatcatggaattttaacttgagacaaaagccatcatgcggaacagtttatgttagaggagggtgggtgagtttttgtgatgccaatggacttcaagctggagatatctacactttcaaactgatcaaaagaggaggaactcttgttctacgtttgttacccaaaggggcagagtcttgttcactagatccctcttgttttgtggctaatgttgcgccttcgactctacgctatgacacactgtatcttccaaagcgttttatgagggaaaatggtgtagacaaaagacgtggagagatgattctgatgaatgaaaagggcaaatcatggactttagatttgaaactaaagaaatcatgcggaacttccctcatcagacgaggatggagaagtttctgtagtgccaatggactaagagctggaagtatcattactttcaaactgattaagaaaagtggaactcttgttctatgtttgctctccaacgagccagaagaagaagtgtgctcagaagctaatgaagtagagtctctttcgacagatcaagaaagccatgaagagagtagccacaacgagaaaatctcaagaagaaaggaaaagaagggtagaatgatatggaaagcttcgtcttcaccatccgaaaaccgatttgtgacattaaatcttacaccttataacatcctacgttctgcactgcgtcttccgatacccttcacgaggatgaatggtatcaatgaagaaactaaaatgactctgttggataaacatggtatgaagtggttaacgactctgcggttggtggactacaaaagaaaaagactgggaatggtaggaggctggaaaggattcatccaagctaacggtgtgaaggcaaacgaatccatcatgttggaactgatttgggaagaagaaacaagttgcgtccttaagttctgctccaaggtgaagctagcaatcaaatga

SEQ ID NO: 70312 - protein, 1440 aa, Arabidopsis thaliana
  peptide (1)..(1440): Ceres Seq. ID no. 2703589
  misc_feature: Pfam Name: B3 Pfam Description: B3 DNA binding domain
  misc_feature (969)..(1440): Homolog of NCBI NO: 26450115 NR Description: unknown protein [Arabidopsis thaliana]
  misc_feature (1169)..(1440): Homolog of NCBI NO: 18411270 NR Description: hypothetical protein; protein id: At4g00260.1
  misc_feature (970)..(1061): Homolog of NCBI NO: 18411270 NR Description: hypothetical protein; protein id: At4g00260.1
  misc_feature (24)..(126): Homolog of NCBI NO: 18411270 NR Description: hypothetical protein; protein id: At4g00260.1
  misc_feature (774)..(866): Homolog of NCBI NO: 18411270 NR Description: hypothetical protein; protein id: At4g00260.1
  misc_feature (163)..(472): Homolog of NCBI NO: 15224602 NR Description: unknown protein; protein id: At2g24680.1
  misc_feature (580)..(877): Homolog of NCBI NO: 15224602 NR Description: unknown protein; protein id: At2g24680.1
  misc_feature (459)..(590): Homolog of NCBI NO: 15224602 NR Description: unknown protein; protein id: At2g24680.1
  misc_feature (852)..(965): Homolog of NCBI NO: 15224602 NR Description: unknown protein; protein id: At2g24680.1
  misc_feature (290)..(597): Homolog of NCBI NO: 15224603 NR Description: unknown protein; protein id: At2g24690.1
MANSRIYPQFFHTLVPSFHTHLMIPEDFFSEYIEGRSVAELKLDFSDKSWEVKLSDRRITDGWEEFVVANDFRIGDVVAFRYVGNLVFHVSNLGPNYYEIEHNDELPKEKKAKTNSEEADAVSSSSSADKSCFMAIITALDLTTDTLYLPLHFTSANGLTRKNREIILTDGGERSRVLDLRFDESSGTFYISRGWRNFCDENGQKAGGFFLFKLVGKGETLVLSFCPTESINGEENITREDSKDECSSLDSLMNIVEKKKYIPKPRGSPYSSYSPSHKQFVTFTLPPDYARIGKLSLSAPFVRENGINKPGEICLLDKHGRKWLTSLLLDSKGTMSLGKGWKEFVKANSLETGFTLKLIWEETTPVLSLCSPESNSDREQEEISKAIEKHSLFIDPSNRDKISNNDKEENMSWERKKDHLKSRDSTLSSQKQFVTITITPSSDRLVSLSNDSCLVVVSLLYFDMRLPKVFTRENGINKPGRITLLGKDGIKQQTNLLFDKANGAMSLGHGWKDFVKDNGLKTGDSFTLKLIWEDQTPVLSLCPADCSIDREAGGGRSETNQKKSLPIEPSTCKKIRKDVNIKDDNSKEKNDKEESKSVDGERKYLRGTYLTPSSQKHFVTLTITPSSIKKDRLILSPQFARKNNIDKPGMIYLLDTDGTKWLISLQRDKKGTMSLGKGWKEFAEANDFKLGESFTMELVWEDTTPMLSLLRTEFRSSKANEKESISSEHKTRESSPTIKNRIVTPALTPEDVKACKLVTSSNYSCFSEILSAQFARENNINQPGTIYLLDTDGRKWLTTVKRDKKGTMSLGKGWKEFADTKDLKSGDSFTMELIWEDTNPVLSLLRTKFSSSKSNKEESIFLEPKSRDSSSPTIVNRFVTLALTPEDVTACKLILPSQFMKANGINNKLGKITLLGENGVEWPGYMLSLDGTLALGNGWEGFCEANGVKLGQTFTLEFVNEQDTTTTPRIPVAFFLKNIEGRYEQKTAELRSDASKITWEVKIDGQRLTDGWKEFALSHDLRIGDIVVFRQERDMSFHVTMLGPSCCEIQYGSCSDEERNLEKKKNPNGEAKSSSLDPSCFSANVAPSSLRYDLMLFPMGFVRENGVVGSGKIVLMNEKGRSWNFNLRQKPSCGTVYVRGGWVSFCDANGLQAGDIYTFKLIKRGGTLVLRLLPKGAESCSLDPSCFVANVAPSTLRYDTLYLPKRFMRENGVDKRRGEMILMNEKGKSWTLDLKLKKSCGTSLIRRGWRSFCSANGLRAGSIITFKLIKKSGTLVLCLLSNEPEEEVCSEANEVESLSTDQESHEESSHNEKISRRKEKKGRMIWKASSSPSENRFVTLNLTPYNILRSALRLPIPFTRMNGINEETKMTLLDKHGMKWLTTLRLVDYKRKRLGMVGGWKGFIQANGVKANESIMLELIWEEETSCVLKFCSKVKLAIK

SEQ ID NO: 70313 - protein, 1418 aa, Arabidopsis thaliana
  peptide (1)..(1418): Ceres Seq. ID no. 2703590
  misc_feature: Pfam Name: B3 Pfam Description: B3 DNA binding domain
  misc_feature (947)..(1418): Homolog of NCBI NO: 26450115 NR Description: unknown protein [Arabidopsis thaliana]
  misc_feature (1147)..(1418): Homolog of NCBI NO: 18411270 NR Description: hypothetical protein; protein id: At4g00260.1
  misc_feature (948)..(1039): Homolog of NCBI NO: 18411270 NR Description: hypothetical protein; protein id: At4g00260.1
  misc_feature (2)..(104): Homolog of NCBI NO: 18411270 NR Description: hypothetical protein; protein id: At4g00260.1
  misc_feature (752)..(844): Homolog of NCBI NO: 18411270 NR Description: hypothetical protein; protein id: At4g00260.1
  misc_feature (141)..(450): Homolog of NCBI NO: 15224602 NR Description: unknown protein; protein id: At2g24680.1
  misc_feature (558)..(855): Homolog of NCBI NO: 15224602 NR Description: unknown protein; protein id: At2g24680.1
  misc_feature (437)..(568): Homolog of NCBI NO: 15224602 NR Description: unknown protein; protein id: At2g24680.1
  misc_feature (830)..(943): Homolog of NCBI NO: 15224602 NR Description: unknown protein; protein id: At2g24680.1
  misc_feature (268)..(575): Homolog of NCBI NO: 15224603 NR Description: unknown protein; protein id: At2g24690.1
MIPEDFFSEYIEGRSVAELKLDFSDKSWEVKLSDRRITDGWEEFVVANDFRIGDVVAFRYVGNLVFHVSNLGPNYYEIEHNDELPKEKKAKTNSEEADAVSSSSSADKSCFMAIITALDLTTDTLYLPLHFTSANGLTRKNREIILTDGGERSRVLDLRFDESSGTFYISRGWRNFCDENGQKAGGFFLFKLVGKGETLVLSFCPTESINGEENITREDSKDECSSLDSLMNIVEKKKYIPKPRGSPYSSYSPSHKQFVTFTLPPDYARIGKLSLSAPFVRENGINKPGEICLLDKHGRKWLTSLLLDSKGTMSLGKGWKEFVKANSLETGFTLKLIWEETTPVLSLCSPESNSDREQEEISKAIEKHSLFIDPSNRDKISNNDKEENMSWERKKDHLKSRDSTLSSQKQFVTITITPSSDRLVSLSNDSCLVVVSLLYFDMRLPKVFTRENGINKPGRITLLGKDGIKQQTNLLFDKANGAMSLGHGWKDFVKDNGLKTGDSFTLKLIWEDQTPVLSLCPADCSIDREAGGGRSETNQKKSLPIEPSTCKKIRKDVNIKDDNSKEKNDKEESKSVDGERKYLRGTYLTPSSQKHFVTLTITPSSIKKDRLILSPQFARKNNIDKPGMIYLLDTDGTKWLISLQRDKKGTMSLGKGWKEFAEANDFKLGESFTMELVWEDTTPMLSLLRTEFRSSKANEKESISSEHKTRESSPTIKNRIVTPALTPEDVKACKLVTSSNYSCFSEILSAQFARENNINQPGTIYLLDTDGRKWLTTVKRDKKGTMSLGKGWKEFADTKDLKSGDSFTMELIWEDTNPVLSLLRTKFSSSKSNKEESIFLEPKSRDSSSPTIVNRFVTLALTPEDVTACKLILPSQFMKANGINNKLGKITLLGENGVEWPGYMLSLDGTLALGNGWEGFCEANGVKLGQTFTLEFVNEQDTTTTPRIPVAFFLKNIEGRYEQKTAELRSDASKITWEVKIDGQRLTDGWKEFALSHDLRIGDIVVFRQERDMSFHVTMLGPSCCEIQYGSCSDEERNLEKKKNPNGEAKSSSLDPSCFSANVAPSSLRYDLMLFPMGFVRENGVVGSGKIVLMNEKGRSWNFNLRQKPSCGTVYVRGGWVSFCDANGLQAGDIYTFKLIKRGGTLVLRLLPKGAESCSLDPSCFVANVAPSTLRYDTLYLPKRFMRENGVDKRRGEMILMNEKGKSWTLDLKLKKSCGTSLIRRGWRSFCSANGLRAGSIITFKLIKKSGTLVLCLLSNEPEEEVCSEANEVESLSTDQESHEESSHNEKISRRKEKKGRMIWKASSSPSENRFVTLNLTPYNILRSALRLPIPFTRMNGINEETKMTLLDKHGMKWLTTLRLVDYKRKRLGMVGGWKGFIQANGVKANESIMLELIWEEETSCVLKFCSKVKLAIK

SEQ ID NO: 70314 - protein, 1307 aa, Arabidopsis thaliana
  peptide (1)..(1307): Ceres Seq. ID no. 2703591
  misc_feature: Pfam Name: B3 Pfam Description: B3 DNA binding domain
  misc_feature (836)..(1307): Homolog of NCBI NO: 26450115 NR Description: unknown protein [Arabidopsis thaliana]
  misc_feature (1036)..(1307): Homolog of NCBI NO: 18411270 NR Description: hypothetical protein; protein id: At4g00260.1
  misc_feature (837)..(928): Homolog of NCBI NO: 18411270 NR Description: hypothetical protein; protein id: At4g00260.1
  misc_feature (641)..(733): Homolog of NCBI NO: 18411270 NR Description: hypothetical protein; protein id: At4g00260.1
  misc_feature (30)..(339): Homolog of NCBI NO: 15224602 NR Description: unknown protein; protein id: At2g24680.1
  misc_feature (447)..(744): Homolog of NCBI NO: 15224602 NR Description: unknown protein; protein id: At2g24680.1
  misc_feature (326)..(457): Homolog of NCBI NO: 15224602 NR Description: unknown protein; protein id: At2g24680.1
  misc_feature (719)..(832): Homolog of NCBI NO: 15224602 NR Description: unknown protein; protein id: At2g24680.1
  misc_feature (157)..(464): Homolog of NCBI NO: 15224603 NR Description: unknown protein; protein id: At2g24690.1
  misc_feature (429)..(565): Homolog of NCBI NO: 15224603 NR Description: unknown protein; protein id: At2g24690.1
MAIITALDLTTDTLYLPLHFTSANGLTRKNREIILTDGGERSRVLDLRFDESSGTFYISRGWRNFCDENGQKAGGFFLFKLVGKGETLVLSFCPTESINGEENITREDSKDECSSLDSLMNIVEKKKYIPKPRGSPYSSYSPSHKQFVTFTLPPDYARIGKLSLSAPFVRENGINKPGEICLLDKHGRKWLTSLLLDSKGTMSLGKGWKEFVKANSLETGFTLKLIWEETTPVLSLCSPESNSDREQEEISKAIEKHSLFIDPSNRDKISNNDKEENMSWERKKDHLKSRDSTLSSQKQFVTITITPSSDRLVSLSNDSCLVVVSLLYFDMRLPKVFTRENGINKPGRITLLGKDGIKQQTNLLFDKANGAMSLGHGWKDFVKDNGLKTGDSFTLKLIWEDQTPVLSLCPADCSIDREAGGGRSETNQKKSLPIEPSTCKKIRKDVNIKDDNSKEKNDKEESKSVDGERKYLRGTYLTPSSQKHFVTLTITPSSIKKDRLILSPQFARKNNIDKPGMIYLLDTDGTKWLISLQRDKKGTMSLGKGWKEFAEANDFKLGESFTMELVWEDTTPMLSLLRTEFRSSKANEKESISSEHKTRESSPTIKNRIVTPALTPEDVKACKLVTSSNYSCFSEILSAQFARENNINQPGTIYLLDTDGRKWLTTVKRDKKGTMSLGKGWKEFADTKDLKSGDSFTMELIWEDTNPVLSLLRTKFSSSKSNKEESIFLEPKSRDSSSPTIVNRFVTLALTPEDVTACKLILPSQFMKANGINNKLGKITLLGENGVEWPGYMLSLDGTLALGNGWEGFCEANGVKLGQTFTLEFVNEQDTTTTPRIPVAFFLKNIEGRYEQKTAELRSDASKITWEVKIDGQRLTDGWKEFALSHDLRIGDIVVFRQERDMSFHVTMLGPSCCEIQYGSCSDEERNLEKKKNPNGEAKSSSLDPSCFSANVAPSSLRYDLMLFPMGFVRENGVVGSGKIVLMNEKGRSWNFNLRQKPSCGTVYVRGGWVSFCDANGLQAGDIYTFKLIKRGGTLVLRLLPKGAESCSLDPSCFVANVAPSTLRYDTLYLPKRFMRENGVDKRRGEMILMNEKGKSWTLDLKLKKSCGTSLIRRGWRSFCSANGLRAGSIITFKLIKKSGTLVLCLLSNEPEEEVCSEANEVESLSTDQESHEESSHNEKISRRKEKKGRMIWKASSSPSENRFVTLNLTPYNILRSALRLPIPFTRMNGINEETKMTLLDKHGMKWLTTLRLVDYKRKRLGMVGGWKGFIQANGVKANESIMLELIWEEETSCVLKFCSKVKLAIK

SEQ ID NO: 70315 - DNA, 2556 bp, Arabidopsis thaliana
  misc_feature (1)..(2556): Ceres Seq. ID no. 2703596
  misc_feature: MA Experiment ID: 20000171 Result: Up-regulated in Transcription
  misc_feature: MA Experiment 20000171 PARAMETER Experiment Name: At_42deg_Heat_P Parameter: Age (day) Value: 14
  misc_feature: MA Experiment 20000171 PARAMETER Experiment Name: At_42deg_Heat_P Parameter: Organism Value: A. thaliana
  misc_feature: MA Experiment 20000171 PARAMETER Experiment Name: At_42deg_Heat_P Parameter: Plant Line Value: WS
  misc_feature: MA Experiment 20000171 PARAMETER Experiment Name: At_42deg_Heat_P Parameter: Temperature (deg C) Value: 42 vs. 22
  misc_feature: MA Experiment 20000171 PARAMETER Experiment Name: At_42deg_Heat_P Parameter: Timepoint (hr) Value: 1
  misc_feature: MA Experiment 20000171 PARAMETER Experiment Name: At_42deg_Heat_P Parameter: Tissue Value: Aerial
atggcttggaacctggcgataataactttggttggcaaagatggtacaaagttggaggcaactcttcgacgggaaaacagaggattgatgtgtctcggaaatggctggaaagatttatctatatccaacggcttgaagagtggcaagtcgttcacgctggagctaattttggagaatggaactcctatgctcagtttggtgagtacacagtccacaagtcataaaagccagaaaagagagtgctcaaaacatagcgagaaagagtcgatctctgcagtacctagcaaaggaaaaaagaacaggaaagccaggagcaacagagaggagaggagagactcgtcttcagcaatccaaaatcgatttgtgacattcacaccagaagatatcagagactgtatactaattcttccaagccaattcatcaaagctaatggcatcaacaacctcggggagataactttgttgggtcaaaacagaatgaagtggtttgcatatctactgtcaatgtcaaaagatggaagtttggctctgggatctggttggaagggcatctgtgaggctaatggcgttaatacaggggaggcattcacgttggaatacattgatgaacaagaaacagctcataagacctcccagtgtgttggagaagatgacgctctgtggaaagtgggattagagatggtgctaaattcgtcagatttaggacctagccgctgtgatattcgagatttaccagctccgagcagcaccaatgatcagggcaagaccgaacttgcgaggaagaagaaagtgaagaggagcaatacagaaatagaagctgatgcttcttcctccgacaactcttgttttgtggcccttgtcacggcttcgaatctacgcaaagatgctctggtaactgtatgtattttctcaaatttatactctaactttagtttggttttcatttcgattctgtttggtgaaagtgttttctcacgtttgctatacttatgtttatatcttccacaagatttaacaagttcagttggtcttgaaaggaaataccgtgagattgttgtaacagatgaaagggaaagaagatcatgggcgttggatctgaggttcaacaaatcatctgatactttctacataagccgaggttggaggagtttctgtgatgaaaacggtaaaaagccaggaggtgtctttgttttcaaactagttggaaacagggaaactccggtgcttagtttctgttccactgaatctatcaacgatggaacacaaggacataagaacaacaaatacaattgtatggagctgaagagcaagaagaagcgtatgagatgtagagattcaacttcaccaagccaaaaccggtttatgacattaacacttactcatgacaacctcataaaaagtagacggcaacttcctttgccatttatgagagaaaatggcttggtcaaacctgggattataaatttgttgggtaaagatggtacaaagtgggaggtaaatcttcgacgggaagccaacggaaccatgtatttgggaaaaggctggaaagatttcactatagctaacggcttaaagaccggcgaatctttcacgttggaggcagttttggagaatggaactcgtatgctcagtttggtcagtacacagtccacaagtgatagaaaccagcaaggagagtgtttaaaagatagcgagaaagagtcaaattctacagaacctagcagtggaaaaaggaaagccatgataaacagaggcgtgagaagaaagtcatttccagcaagccaaaaccggtgtgtgacattaaaacttactcatgacaacctcatcaaaagtagacggtatcttccgttgtcattcacaagagataatggcttggacaaacctgggatgatttttctgttgggcaaaactggtagaaagtgggaggcaaatcttctaagggaagcctcaggaagaattgttttgacgggaaagggctggaaagagttcgccatggcaaacggcttaaaaagcggtgaattgttcacgttggaggcaattttggagaagggaactcctatgctcagtttggtcaatacacagtccacaaattatagaagccaacaaggagaatgttcaagagatagcgagaaggagtcgtcgatttgtgctgaacctagtagaggaaacaagaagtggaaagctactaacaacagaaaggagaggagagactcgtcgtcagcaatccaaaatcgatatgtgacattaacactcacaccagaagatgtcagagcctgtacactaattcttccgagtcaattcatgaaagctaatggcatcaacaagcttgggaagaaaactttgttgggtcaaaacagaaagaagtggtttgcatatctactgtcaaaaagtggatttgtggcactgggatctggttggaaaggtttctgtgaagctaatggcgttaagacaggagaatcattcaatttggaatatattgatgaacaagacacaactcctgtgtttaagttctgttccaactccgtagagtatgtaaagttcacaagccttccttaa

SEQ ID NO: 70316 - protein, 851 aa, Arabidopsis thaliana
  peptide (1)..(851): Ceres Seq. ID no. 2703597
  misc_feature (317)..(418): Pfam Name: B3 DNA binding domain Pfam Description: B3 DNA binding domain
  misc_feature (4)..(326): Homolog of NCBI NO: 15224180 NR Description: hypothetical protein; protein id: At2g24650.1
  misc_feature (416)..(724): Homolog of NCBI NO: 15224180 NR Description: hypothetical protein; protein id: At2g24650.1
  misc_feature (327)..(452): Homolog of NCBI NO: 15224180 NR Description: hypothetical protein; protein id: At2g24650.1
  misc_feature (720)..(832): Homolog of NCBI NO: 15224180 NR Description: hypothetical protein; protein id: At2g24650.1
  misc_feature (214)..(297): Homolog of NCBI NO: 15224180 NR Description: hypothetical protein; protein id: At2g24650.1
  misc_feature (8)..(116): Homolog of NCBI NO: 15224180 NR Description: hypothetical protein; protein id: At2g24650.1
  misc_feature (332)..(620): Homolog of NCBI NO: 15224180 NR Description: hypothetical protein; protein id: At2g24650.1
  misc_feature (598)..(839): Homolog of NCBI NO: 15224180 NR Description: hypothetical protein; protein id: At2g24650.1
  misc_feature (720)..(834): Homolog of NCBI NO: 15224180 NR Description: hypothetical protein; protein id: At2g24650.1
  misc_feature (356)..(540): Homolog of NCBI NO: 15224180 NR Description: hypothetical protein; protein id: At2g24650.1
MAWNLAIITLVGKDGTKLEATLRRENRGLMCLGNGWKDLSISNGLKSGKSFTLELILENGTPMLSLVSTQSTSHKSQKRECSKHSEKESISAVPSKGKKNRKARSNREERRDSSSAIQNRFVTFTPEDIRDCILILPSQFIKANGINNLGEITLLGQNRMKWFAYLLSMSKDGSLALGSGWKGICEANGVNTGEAFTLEYIDEQETAHKTSQCVGEDDALWKVGLEMVLNSSDLGPSRCDIRDLPAPSSTNDQGKTELARKKKVKRSNTEIEADASSSDNSCFVALVTASNLRKDALVTVCIFSNLYSNFSLVFISILFGESVFSRLLYLCLYLPQDLTSSVGLERKYREIVVTDERERRSWALDLRFNKSSDTFYISRGWRSFCDENGKKPGGVFVFKLVGNRETPVLSFCSTESINDGTQGHKNNKYNCMELKSKKKRMRCRDSTSPSQNRFMTLTLTHDNLIKSRRQLPLPFMRENGLVKPGIINLLGKDGTKWEVNLRREANGTMYLGKGWKDFTIANGLKTGESFTLEAVLENGTRMLSLVSTQSTSDRNQQGECLKDSEKESNSTEPSSGKRKAMINRGVRRKSFPASQNRCVTLKLTHDNLIKSRRYLPLSFTRDNGLDKPGMIFLLGKTGRKWEANLLREASGRIVLTGKGWKEFAMANGLKSGELFTLEAILEKGTPMLSLVNTQSTNYRSQQGECSRDSEKESSICAEPSRGNKKWKATNNRKERRDSSSAIQNRYVTLTLTPEDVRACTLILPSQFMKANGINKLGKKTLLGQNRKKWFAYLLSKSGFVALGSGWKGFCEANGVKTGESFNLEYIDEQDTTPVFKFCSNSVEYVKFTSLP

SEQ ID NO: 70317 - protein, 822 aa, Arabidopsis thaliana
  peptide (1)..(822): Ceres Seq. ID no. 2703598
  misc_feature (288)..(389): Pfam Name: B3 DNA binding domain Pfam Description: B3 DNA binding domain
  misc_feature (1)..(297): Homolog of NCBI NO: 15224180 NR Description: hypothetical protein; protein id: At2g24650.1
  misc_feature (387)..(695): Homolog of NCBI NO: 15224180 NR Description: hypothetical protein; protein id: At2g24650.1
  misc_feature (298)..(423): Homolog of NCBI NO: 15224180 NR Description: hypothetical protein; protein id: At2g24650.1
  misc_feature (691)..(803): Homolog of NCBI NO: 15224180 NR Description: hypothetical protein; protein id: At2g24650.1
  misc_feature (185)..(268): Homolog of NCBI NO: 15224180 NR Description: hypothetical protein; protein id: At2g24650.1
  misc_feature (1)..(87): Homolog of NCBI NO: 15224180 NR Description: hypothetical protein; protein id: At2g24650.1
  misc_feature (303)..(591): Homolog of NCBI NO: 15224180 NR Description: hypothetical protein; protein id: At2g24650.1
  misc_feature (569)..(810): Homolog of NCBI NO: 15224180 NR Description: hypothetical protein; protein id: At2g24650.1
  misc_feature (691)..(805): Homolog of NCBI NO: 15224180 NR Description: hypothetical protein; protein id: At2g24650.1
  misc_feature (327)..(511): Homolog of NCBI NO: 15224180 NR Description: hypothetical protein; protein id: At2g24650.1
MCLGNGWKDLSISNGLKSGKSFTLELILENGTPMLSLVSTQSTSHKSQKRECSKHSEKESISAVPSKGKKNRKARSNREERRDSSSAIQNRFVTFTPEDIRDCILILPSQFIKANGINNLGEITLLGQNRMKWFAYLLSMSKDGSLALGSGWKGICEANGVNTGEAFTLEYIDEQETAHKTSQCVGEDDALWKVGLEMVLNSSDLGPSRCDIRDLPAPSSTNDQGKTELARKKKVKRSNTEIEADASSSDNSCFVALVTASNLRKDALVTVCIFSNLYSNFSLVFISILFGESVFSRLLYLCLYLPQDLTSSVGLERKYREIVVTDERERRSWALDLRFNKSSDTFYISRGWRSFCDENGKKPGGVFVFKLVGNRETPVLSFCSTESINDGTQGHKNNKYNCMELKSKKKRMRCRDSTSPSQNRFMTLTLTHDNLIKSRRQLPLPFMRENGLVKPGIINLLGKDGTKWEVNLRREANGTMYLGKGWKDFTIANGLKTGESFTLEAVLENGTRMLSLVSTQSTSDRNQQGECLKDSEKESNSTEPSSGKRKAMINRGVRRKSFPASQNRCVTLKLTHDNLIKSRRYLPLSFTRDNGLDKPGMIFLLGKTGRKWEANLLREASGRIVLTGKGWKEFAMANGLKSGELFTLEAILEKGTPMLSLVNTQSTNYRSQQGECSRDSEKESSICAEPSRGNKKWKATNNRKERRDSSSAIQNRYVTLTLTPEDVRACTLILPSQFMKANGINKLGKKTLLGQNRKKWFAYLLSKSGFVALGSGWKGFCEANGVKTGESFNLEYIDEQDTTPVFKFCSNSVEYVKFTSLP

SEQ ID NO: 70318 - protein, 789 aa, Arabidopsis thaliana
  peptide (1)..(789): Ceres Seq. ID no. 2703599
  misc_feature (255)..(356): Pfam Name: B3 DNA binding domain Pfam Description: B3 DNA binding domain
  misc_feature (1)..(264): Homolog of NCBI NO: 15224180 NR Description: hypothetical protein; protein id: At2g24650.1
  misc_feature (354)..(662): Homolog of NCBI NO: 15224180 NR Description: hypothetical protein; protein id: At2g24650.1
  misc_feature (265)..(390): Homolog of NCBI NO: 15224180 NR Description: hypothetical protein; protein id: At2g24650.1
  misc_feature (658)..(770): Homolog of NCBI NO: 15224180 NR Description: hypothetical protein; protein id: At2g24650.1
  misc_feature (152)..(235): Homolog of NCBI NO: 15224180 NR Description: hypothetical protein; protein id: At2g24650.1
  misc_feature (1)..(54): Homolog of NCBI NO: 15224180 NR Description: hypothetical protein; protein id: At2g24650.1
  misc_feature (270)..(558): Homolog of NCBI NO: 15224180 NR Description: hypothetical protein; protein id: At2g24650.1
  misc_feature (536)..(777): Homolog of NCBI NO: 15224180 NR Description: hypothetical protein; protein id: At2g24650.1
  misc_feature (658)..(772): Homolog of NCBI NO: 15224180 NR Description: hypothetical protein; protein id: At2g24650.1
  misc_feature (294)..(478): Homolog of NCBI NO: 15224180 NR Description: hypothetical protein; protein id: At2g24650.1
MLSLVSTQSTSHKSQKRECSKHSEKESISAVPSKGKKNRKARSNREERRDSSSAIQNRFVTFTPEDIRDCILILPSQFIKANGINNLGEITLLGQNRMKWFAYLLSMSKDGSLALGSGWKGICEANGVNTGEAFTLEYIDEQETAHKTSQCVGEDDALWKVGLEMVLNSSDLGPSRCDIRDLPAPSSTNDQGKTELARKKKVKRSNTEIEADASSSDNSCFVALVTASNLRKDALVTVCIFSNLYSNFSLVFISILFGESVFSRLLYLCLYLPQDLTSSVGLERKYREIVVTDERERRSWALDLRFNKSSDTFYISRGWRSFCDENGKKPGGVFVFKLVGNRETPVLSFCSTESINDGTQGHKNNKYNCMELKSKKKRMRCRDSTSPSQNRFMTLTLTHDNLIKSRRQLPLPFMRENGLVKPGIINLLGKDGTKWEVNLRREANGTMYLGKGWKDFTIANGLKTGESFTLEAVLENGTRMLSLVSTQSTSDRNQQGECLKDSEKESNSTEPSSGKRKAMINRGVRRKSFPASQNRCVTLKLTHDNLIKSRRYLPLSFTRDNGLDKPGMIFLLGKTGRKWEANLLREASGRIVLTGKGWKEFAMANGLKSGELFTLEAILEKGTPMLSLVNTQSTNYRSQQGECSRDSEKESSICAEPSRGNKKWKATNNRKERRDSSSAIQNRYVTLTLTPEDVRACTLILPSQFMKANGINKLGKKTLLGQNRKKWFAYLLSKSGFVALGSGWKGFCEANGVKTGESFNLEYIDEQDTTPVFKFCSNSVEYVKFTSLP

SEQ ID NO: 70319 - DNA, 3267 bp, Arabidopsis thaliana
  misc_feature (1)..(3267): Ceres Seq. ID no. 2703833
  misc_feature: MA Experiment ID: 20000307 Result: Up-regulated in Transcription
  misc_feature: MA Experiment 20000307 PARAMETER Experiment Name: At_Germinating_Seeds_Sub_P Parameter: Age (hr) Value: 24 vs. 0
  misc_feature: MA Experiment 20000307 PARAMETER Experiment Name: At_Germinating_Seeds_Sub_P Parameter: Organism Value: A. thaliana
  misc_feature: MA Experiment 20000307 PARAMETER Experiment Name: At_Germinating_Seeds_Sub_P Parameter: Plant Line Value: WS
  misc_feature: MA Experiment 20000307 PARAMETER Experiment Name: At_Germinating_Seeds_Sub_P Parameter: Tissue Value: Germinating Seeds
  misc_feature: Pfam Name: Cellulose_synt Pfam Description: Cellulose synthase
atgaacactggagggagactcattgctgggtctcacaacaggaatgaattcgttctcattaacgccgacgacactgccagaatacgatcagcagaagaactgagtgggcaaacttgtaaaatctgtagagatgagattgagttaacagataatggtgagccatttatcgcttgcaacgaatgtgctttccctacgtgtagaccgtgctatgagtatgaaagaagagaaggaaaccaagcttgtcctcagtgcggaacccgatacaagcgtattaaaggtagtccaagggtcgaaggggatgaagaagatgatgacattgatgatctggagcatgagttttatggaatggatcctgaacatgttactgaagctgcgctctattatatgcgtcttaacactggtcgtggtactgatgaagtgtcacacttgtattcagcttcaccaggctctgaggttcctcttttgacgtattgtgatgaggattctgatatgtattcggatagacatgctcttatcgtgcccccatctacgggtttggggaacagagtccatcatgtgccatttacagattcttttgcatctatacacacaagacccatggttcctcagaaggatcttacagtttatggatatggaagtgttgcatggaaagaccgtatggaagtatggaagaaacaacaaatagaaaagctacaagtcgttaagaatgaaagagtaaatgatggtgatggcgatggattcattgttgacgagctcgatgatcccgggctaccaatgatggatgaaggaagacaacctctgtcacgaaagctacccattcgttcgagcagaataaacccttataggatgttgattttctgtcggctcgccattcttggcttgttcttccattataggattctccatccggtgaatgatgcattcggcttgtggttaacatcggttatatgcgaaatatggttcgctgtgtcttggattcttgatcagttcccaaaatggtatcccatcgaaagagaaacatatctcgacaggctttctctaaggtatgagaaggaagggaagccatcagagttagcgcctgtcgatgtctttgttagtactgtggatccattgaaagagcctccactgattacagcaaatacggttctgtctattctcgctgttgattatccggttgagaaggttgcatgttatgtatcagatgatggtgctgcaatgcttacatttgaagctctctcttacacagccgagtttgcaagaaaatgggttcctttctgtaagaagttcagcatcgagccacgcgctcctgaatggtatttttcacagaagatggattacttgaagcataaagtcgatcccgcttttgttatggaacgccgtgccatgaagagagactatgaggaattcaaagtaaagataaatgcattggtttctgtatcacagaaagttcctgaagatggttggactatgcaagatggaactccttggcctggaaacaatgtccgggaccatccaggaatgattcaggttttcctgggacacagcggagtttgtgatatggatggaaatgagttacctcgtttggtgtatgtttctcgtgagaagcgaccgggatttgatcaccataagaaggctggagctatgaattccttgatccgggtatctgctgttctctcaaatgctccttaccttcttaatgtggactgtgatcattacatcaacaacagcaaggcaattagagaagctatgtgtttcatgatggacccgcagtccggaaagaaaatatgttatgttcagtttcctcagaggtttgatgggattgatagacacgatcgatactcaaatcgcaatgtggttttcttcgatatcaacatgaaaggtttagatggcatacaaggaccgatatatgtggggaccgggtgtgtcttcagaaggcaagcactttatggatttgatgcaccaaagaagaagcaaccaccaggcagaacctgcaactgttggccaaaatggtgctgtttgtgttgcggtatgagaaagaagaagacaggtaaggtcaaagataatcagagaaagaagcctaaagagacttcaaagcagatacatgcccttgagcacatagaagaaggccttcaagtgacaaatgctgagaataactctgagactgcccaactgaagctggagaagaaatttggtcaatcaccggttttagtagcttctactcttctgctaaatggtggagtgcctagcaatgtgaacccagcgtctttattgagggaatccattcaggttattagctgtggctacgaagagaaaaccgaatggggaaaagagattgggtggatttatggctcggtcactgaggatatcttaacgggtttcaagatgcattgccatggatggagatctgtatattgtatgccaaagcgagcggctttcaaaggttctgctcccattaacttgtcggatcgtcttcatcaagttctacgttgggcacttggctctgtcgagattttcttgagtaggcattgccctatttggtacggttatggtggtggtttaaaatggttggaaagattctcttacattaactctgttgtctatccttggacatcccttcctttgcttgtctactgctcacttcccgccatttgtctactcaccggaaaattcatcgtccctgagataagtaactacgcgggtatactcttcctgctaatgtttatgtccattgcggtaacgggtatactagaaatgcaatggggcaaaataggaatcgatgattggtggagaaacgagcagttttgggtcattggaggagtctcttcgcatctatttgctctgtttcaaggtttactcaaagttcttgcaggagtcagcacgaacttcacagtcacatctaaagcagcagatgatggagaattctcagagctttacattttcaaatggacatctttgttgattcctccgactactctgctgatcattaacatcgttggagtcattgtcggagtttcggatgcgataaataacgggtatgactcttggggaccgctttttgggagattgttctttgcgctttgggtgattgttcatttgtatccgttcctcaaagggttacttgggaaacaagatagagtaccaaccattatattggtttggtcgattcttcttgcttccatcttgactctcttgtgggtcagagtcaatccgtttgtgtccaaagatggaccggtcttggagatctgtggtcttgactgtttaaagtga

SEQ ID NO: 70320 - protein, 1088 aa, Arabidopsis thaliana
  peptide (1)..(1088): Ceres Seq. ID no. 2703834
  misc_feature: Pfam Name: Cellulose_synt Pfam Description: Cellulose synthase
  misc_feature (519)..(1070): Homolog of NCBI NO: 15217853 NR Description: hypothetical protein; protein id: At1g02730.1
  misc_feature (261)..(476): Homolog of NCBI NO: 15217853 NR Description: hypothetical protein; protein id: At1g02730.1
  misc_feature (32)..(109): Homolog of NCBI NO: 15217853 NR Description: hypothetical protein; protein id: At1g02730.1
  misc_feature (480)..(1070): Homolog of NCBI NO: 27372782 NR Description: cellulose synthase-like protein D4 [Populus
  misc_feature (482)..(1070): Homolog of NCBI NO: 15228448 NR Description: putative cellulose synthase catalytic subunit; id: At3g03050.1, supported by cDNA: gi_12619787, supported by gi_13430535 [Arabidopsis thaliana]
  misc_feature (240)..(476): Homolog of NCBI NO: 15228448 NR Description: putative cellulose synthase catalytic subunit; id: At3g03050.1, supported by cDNA: gi_12619787, supported by gi_13430535 [Arabidopsis thaliana]
  misc_feature (243)..(476): Homolog of NCBI NO: 27372782 NR Description: cellulose synthase-like protein D4 [Populus
  misc_feature (482)..(1070): Homolog of NCBI NO: 15237873 NR Description: cellulose synthase catalytic subunit -like protein id: At5g16910.1 [Arabidopsis thaliana]
  misc_feature (241)..(476): Homolog of NCBI NO: 15237873 NR Description: cellulose synthase catalytic subunit -like protein id: At5g16910.1 [Arabidopsis thaliana]
  misc_feature (754)..(1083): Homolog of NCBI NO: 13925884 NR Description: cellulose synthase D-like protein [Nicotiana
MNTGGRLIAGSHNRNEFVLINADDTARIRSAEELSGQTCKICRDEIELTDNGEPFIACNECAFPTCRPCYEYERREGNQACPQCGTRYKRIKGSPRVEGDEEDDDIDDLEHEFYGMDPEHVTEAALYYMRLNTGRGTDEVSHLYSASPGSEVPLLTYCDEDSDMYSDRHALIVPPSTGLGNRVHHVPFTDSFASIHTRPMVPQKDLTVYGYGSVAWKDRMEVWKKQQIEKLQVVKNERVNDGDGDGFIVDELDDPGLPMMDEGRQPLSRKLPIRSSRINPYRMLIFCRLAILGLFFHYRILHPVNDAFGLWLTSVICEIWFAVSWILDQFPKWYPIERETYLDRLSLRYEKEGKPSELAPVDVFVSTVDPLKEPPLITANTVLSILAVDYPVEKVACYVSDDGAAMLTFEALSYTAEFARKWVPFCKKFSIEPRAPEWYFSQKMDYLKHKVDPAFVMERRAMKRDYEEFKVKINALVSVSQKVPEDGWTMQDGTPWPGNNVRDHPGMIQVFLGHSGVCDMDGNELPRLVYVSREKRPGFDHHKKAGAMNSLIRVSAVLSNAPYLLNVDCDHYINNSKAIREAMCFMMDPQSGKKICYVQFPQRFDGIDRHDRYSNRNVVFFDINMKGLDGIQGPIYVGTGCVFRRQALYGFDAPKKKQPPGRTCNCWPKWCCLCCGMRKKKTGKVKDNQRKKPKETSKQIHALEHIEEGLQVTNAENNSETAQLKLEKKFGQSPVLVASTLLLNGGVPSNVNPASLLRESIQVISCGYEEKTEWGKEIGWIYGSVTEDILTGFKMHCHGWRSVYCMPKRAAFKGSAPINLSDRLHQVLRWALGSVEIFLSRHCPIWYGYGGGLKWLERFSYINSVVYPWTSLPLLVYCSLPAICLLTGKFIVPEISNYAGILFLLMFMSIAVTGILEMQWGKIGIDDWWRNEQFWVIGGVSSHLFALFQGLLKVLAGVSTNFTVTSKAADDGEFSELYIFKWTSLLIPPTTLLIINIVGVIVGVSDAINNGYDSWGPLFGRLFFALWVIVHLYPFLKGLLGKQDRVPTIILVWSILLASILTLLWVRVNPFVSKDGPVLEICGLDCLK

SEQ ID NO: 70321 - protein, 973 aa, Arabidopsis thaliana
  peptide (1)..(973): Ceres Seq. ID no. 2703835
  misc_feature: Pfam Name: Cellulose_synt Pfam Description: Cellulose synthase
  misc_feature (404)..(955): Homolog of NCBI NO: 15217853 NR Description: hypothetical protein; protein id: At1g02730.1
  misc_feature (146)..(361): Homolog of NCBI NO: 15217853 NR Description: hypothetical protein; protein id: At1g02730.1
  misc_feature (365)..(955): Homolog of NCBI NO: 27372782 NR Description: cellulose synthase-like protein D4 [Populus
  misc_feature (367)..(955): Homolog of NCBI NO: 15228448 NR Description: putative cellulose synthase catalytic subunit; id: At3g03050.1, supported by cDNA: gi_12619787, supported by gi_13430535 [Arabidopsis thaliana]
  misc_feature (125)..(361): Homolog of NCBI NO: 15228448 NR Description: putative cellulose synthase catalytic subunit; id: At3g03050.1, supported by cDNA: gi_12619787, supported by gi_13430535 [Arabidopsis thaliana]
  misc_feature (128)..(361): Homolog of NCBI NO: 27372782 NR Description: cellulose synthase-like protein D4 [Populus
  misc_feature (367)..(955): Homolog of NCBI NO: 15237873 NR Description: cellulose synthase catalytic subunit -like protein id: At5g16910.1 [Arabidopsis thaliana]
  misc_feature (126)..(361): Homolog of NCBI NO: 15237873 NR Description: cellulose synthase catalytic subunit -like protein id: At5g16910.1 [Arabidopsis thaliana]
  misc_feature (639)..(968): Homolog of NCBI NO: 13925884 NR Description: cellulose synthase D-like protein [Nicotiana
  misc_feature (121)..(361): Homolog of NCBI NO: 13925884 NR Description: cellulose synthase D-like protein [Nicotiana
MDPEHVTEAALYYMRLNTGRGTDEVSHLYSASPGSEVPLLTYCDEDSDMYSDRHALIVPPSTGLGNRVHHVPFTDSFASIHTRPMVPQKDLTVYGYGSVAWKDRMEVWKKQQIEKLQVVKNERVNDGDGDGFIVDELDDPGLPMMDEGRQPLSRKLPIRSSRINPYRMLIFCRLAILGLFFHYRILHPVNDAFGLWLTSVICEIWFAVSWILDQFPKWYPIERETYLDRLSLRYEKEGKPSELAPVDVFVSTVDPLKEPPLITANTVLSILAVDYPVEKVACYVSDDGAAMLTFEALSYTAEFARKWVPFCKKFSIEPRAPEWYFSQKMDYLKHKVDPAFVMERRAMKRDYEEFKVKINALVSVSQKVPEDGWTMQDGTPWPGNNVRDHPGMIQVFLGHSGVCDMDGNELPRLVYVSREKRPGFDHHKKAGAMNSLIRVSAVLSNAPYLLNVDCDHYINNSKAIREAMCFMMDPQSGKKICYVQFPQRFDGIDRHDRYSNRNVVFFDINMKGLDGIQGPIYVGTGCVFRRQALYGFDAPKKKQPPGRTCNCWPKWCCLCCGMRKKKTGKVKDNQRKKPKETSKQIHALEHIEEGLQVTNAENNSETAQLKLEKKFGQSPVLVASTLLLNGGVPSNVNPASLLRESIQVISCGYEEKTEWGKEIGWIYGSVTEDILTGFKMHCHGWRSVYCMPKRAAFKGSAPINLSDRLHQVLRWALGSVEIFLSRHCPIWYGYGGGLKWLERFSYINSVVYPWTSLPLLVYCSLPAICLLTGKFIVPEISNYAGILFLLMFMSIAVTGILEMQWGKIGIDDWWRNEQFWVIGGVSSHLFALFQGLLKVLAGVSTNFTVTSKAADDGEFSELYIFKWTSLLIPPTTLLIINIVGVIVGVSDAINNGYDSWGPLFGRLFFALWVIVHLYPFLKGLLGKQDRVPTIILVWSILLASILTLLWVRVNPFVSKDGPVLEICGLDCLK

SEQ ID NO: 70322 - protein, 960 aa, Arabidopsis thaliana
  peptide (1)..(960): Ceres Seq. ID no. 2703836
  misc_feature: Pfam Name: Cellulose_synt Pfam Description: Cellulose synthase
  misc_feature (354)..(942): Homolog of NCBI NO: 15237873 NR Description: cellulose synthase catalytic subunit -like protein id: At5g16910.1 [Arabidopsis thaliana]
  misc_feature (113)..(348): Homolog of NCBI NO: 15237873 NR Description: cellulose synthase catalytic subunit -like protein id: At5g16910.1 [Arabidopsis thaliana]
  misc_feature (626)..(955): Homolog of NCBI NO: 13925884 NR Description: cellulose synthase D-like protein [Nicotiana
  misc_feature (108)..(348): Homolog of NCBI NO: 13925884 NR Description: cellulose synthase D-like protein [Nicotiana
  misc_feature (391)..(942): Homolog of NCBI NO: 15217853 NR Description: hypothetical protein; protein id: At1g02730.1
  misc_feature (133)..(348): Homolog of NCBI NO: 15217853 NR Description: hypothetical protein; protein id: At1g02730.1
  misc_feature (352)..(942): Homolog of NCBI NO: 27372782 NR Description: cellulose synthase-like protein D4 [Populus
  misc_feature (354)..(942): Homolog of NCBI NO: 15228448 NR Description: putative cellulose synthase catalytic subunit; id: At3g03050.1, supported by cDNA: gi_12619787, supported by gi_13430535 [Arabidopsis thaliana]
  misc_feature (112)..(348): Homolog of NCBI NO: 15228448 NR Description: putative cellulose synthase catalytic subunit; id: At3g03050.1, supported by cDNA: gi_12619787, supported by gi_13430535 [Arabidopsis thaliana]
  misc_feature (115)..(348): Homolog of NCBI NO: 27372782 NR Description: cellulose synthase-like protein D4 [Populus
MRLNTGRGTDEVSHLYSASPGSEVPLLTYCDEDSDMYSDRHALIVPPSTGLGNRVHHVPFTDSFASIHTRPMVPQKDLTVYGYGSVAWKDRMEVWKKQQIEKLQVVKNERVNDGDGDGFIVDELDDPGLPMMDEGRQPLSRKLPIRSSRINPYRMLIFCRLAILGLFFHYRILHPVNDAFGLWLTSVICEIWFAVSWILDQFPKWYPIERETYLDRLSLRYEKEGKPSELAPVDVFVSTVDPLKEPPLITANTVLSILAVDYPVEKVACYVSDDGAAMLTFEALSYTAEFARKWVPFCKKFSIEPRAPEWYFSQKMDYLKHKVDPAFVMERRAMKRDYEEFKVKINALVSVSQKVPEDGWTMQDGTPWPGNNVRDHPGMIQVFLGHSGVCDMDGNELPRLVYVSREKRPGFDHHKKAGAMNSLIRVSAVLSNAPYLLNVDCDHYINNSKAIREAMCFMMDPQSGKKICYVQFPQRFDGIDRHDRYSNRNVVFFDINMKGLDGIQGPIYVGTGCVFRRQALYGFDAPKKKQPPGRTCNCWPKWCCLCCGMRKKKTGKVKDNQRKKPKETSKQIHALEHIEEGLQVTNAENNSETAQLKLEKKFGQSPVLVASTLLLNGGVPSNVNPASLLRESIQVISCGYEEKTEWGKEIGWIYGSVTEDILTGFKMHCHGWRSVYCMPKRAAFKGSAPINLSDRLHQVLRWALGSVEIFLSRHCPIWYGYGGGLKWLERFSYINSVVYPWTSLPLLVYCSLPAICLLTGKFIVPEISNYAGILFLLMFMSIAVTGILEMQWGKIGIDDWWRNEQFWVIGGVSSHLFALFQGLLKVLAGVSTNFTVTSKAADDGEFSELYIFKWTSLLIPPTTLLIINIVGVIVGVSDAINNGYDSWGPLFGRLFFALWVIVHLYPFLKGLLGKQDRVPTIILVWSILLASILTLLWVRVNPFVSKDGPVLEICGLDCLK

SEQ ID NO: 70323 - DNA, 1248 bp, Arabidopsis thaliana
  misc_feature (1)..(1248): Ceres Seq. ID no. 2703868
  misc_feature: MA Experiment ID: 20000227 Result: Down-regulated in Transcription
  misc_feature: MA Experiment 20000227 PARAMETER Experiment Name: At_Root-Tips-vs-Tops_P Parameter: Tissue Value: Root Tips vs. Root Tops
  misc_feature: MA Experiment ID: 20000234 Result: Down-regulated in Transcription
  misc_feature: MA Experiment 20000234 PARAMETER Experiment Name: At_Siliques_P Parameter: Age (day) Value: 21
  misc_feature: MA Experiment 20000234 PARAMETER Experiment Name: At_Siliques_P Parameter: Organism Value: A. thaliana
  misc_feature: MA Experiment 20000234 PARAMETER Experiment Name: At_Siliques_P Parameter: Plant Line Value: WS
  misc_feature: MA Experiment 20000234 PARAMETER Experiment Name: At_Siliques_P Parameter: Tissue Value: Less Than 5mm Siliques vs. Whole Plant
  misc_feature: MA Experiment ID: 20000235 Result: Down-regulated in Transcription
  misc_feature: MA Experiment 20000235 PARAMETER Experiment Name: At_Siliques_P Parameter: Age (day) Value: 21
  misc_feature: MA Experiment 20000235 PARAMETER Experiment Name: At_Siliques_P Parameter: Organism Value: A. thaliana
  misc_feature: MA Experiment 20000235 PARAMETER Experiment Name: At_Siliques_P Parameter: Plant Line Value: WS
  misc_feature: MA Experiment 20000235 PARAMETER Experiment Name: At_Siliques_P Parameter: Tissue Value: 5-10mm Siliques vs. Whole Plant
  misc_feature: MA Experiment ID: 20000264 Result: Down-regulated in Transcription
  misc_feature: MA Experiment 20000264 PARAMETER Experiment Name: At_Open_Flower_P Parameter: Age (day) Value: 21
  misc_feature: MA Experiment 20000264 PARAMETER Experiment Name: At_Open_Flower_P Parameter: Plant Line Value: WS
  misc_feature: MA Experiment 20000264 PARAMETER Experiment Name: At_Open_Flower_P Parameter: Tissue Value: Open Flower vs. Whole Plant
  misc_feature: MA Experiment ID: 20000265 Result: Down-regulated in Transcription
  misc_feature: MA Experiment 20000265 PARAMETER Experiment Name: At_Open_Flower_P Parameter: Age (day) Value: 21
  misc_feature: MA Experiment 20000265 PARAMETER Experiment Name: At_Open_Flower_P Parameter: Plant Line Value: WS
  misc_feature: MA Experiment 20000265 PARAMETER Experiment Name: At_Open_Flower_P Parameter: Tissue Value: Closed Flower vs. Whole Plant
  misc_feature: MA Experiment ID: 20000286 Result: Down-regulated in Transcription
  misc_feature: MA Experiment 20000286 PARAMETER Experiment Name: At_Open_Flower_P Parameter: Age (day) Value: 21
  misc_feature: MA Experiment 20000286 PARAMETER Experiment Name: At_Open_Flower_P Parameter: Plant Line Value: WS
  misc_feature: MA Experiment 20000286 PARAMETER Experiment Name: At_Open_Flower_P Parameter: Tissue Value: Half Open vs. Whole Plant
  misc_feature: MA Experiment ID: 20000441 Result: Up-regulated in Transcription
  misc_feature: MA Experiment 20000441 PARAMETER Experiment Name: At_1uM_BR-BRZ__P Parameter: Tissue Value: Shoot Apices
  misc_feature: MA Experiment 20000441 PARAMETER Experiment Name: At_1uM_BR-BRZ__P Parameter: Treatment Value: 1uM BR vs. No Treatment
  misc_feature: MA Experiment ID: 20000573 Result: Up-regulated in Transcription
  misc_feature: MA Experiment 20000573 PARAMETER Experiment Name: At_100uM_ABA_Mutants__P Parameter: Organism Value: A. thaliana
  misc_feature: MA Experiment 20000573 PARAMETER Experiment Name: At_100uM_ABA_Mutants__P Parameter: Plant Line Value: CS22 vs. Ler wt
  misc_feature: MA Experiment 20000573 PARAMETER Experiment Name: At_100uM_ABA_Mutants__P Parameter: Timepoint (hr) Value: N/A
  misc_feature: MA Experiment 20000573 PARAMETER Experiment Name: At_100uM_ABA_Mutants__P Parameter: Tissue Value: Whole Plant
  misc_feature: MA Experiment 20000573 PARAMETER Experiment Name: At_100uM_ABA_Mutants__P Parameter: Treatment Value: None
  misc_feature: MA Experiment ID: 20001247 Result: Up-regulated in Transcription
  misc_feature: MA Experiment 20001247 PARAMETER Experiment Name: At_Far-red-induction_P Parameter: Age (day) Value: 7
  misc_feature: MA Experiment 20001247 PARAMETER Experiment Name: At_Far-red-induction_P Parameter: Light Value: Far-red vs. White
  misc_feature: MA Experiment 20001247 PARAMETER Experiment Name: At_Far-red-induction_P Parameter: Organism Value: A. thaliana
  misc_feature: MA Experiment 20001247 PARAMETER Experiment Name: At_Far-red-induction_P Parameter: Plant Line Value: Columbia
  misc_feature: MA Experiment 20001247 PARAMETER Experiment Name: At_Far-red-induction_P Parameter: Timepoint (hr) Value: 1
  misc_feature: MA Experiment 20001247 PARAMETER Experiment Name: At_Far-red-induction_P Parameter: Tissue Value: Whole Plant
  misc_feature: MA Experiment ID: 20001248 Result: Up-regulated in Transcription
  misc_feature: MA Experiment 20001248 PARAMETER Experiment Name: At_Far-red-induction_P Parameter: Age (day) Value: 7
  misc_feature: MA Experiment 20001248 PARAMETER Experiment Name: At_Far-red-induction_P Parameter: Light Value: Far-red vs. White
  misc_feature: MA Experiment 20001248 PARAMETER Experiment Name: At_Far-red-induction_P Parameter: Organism Value: A. thaliana
  misc_feature: MA Experiment 20001248 PARAMETER Experiment Name: At_Far-red-induction_P Parameter: Plant Line Value: Columbia
  misc_feature: MA Experiment 20001248 PARAMETER Experiment Name: At_Far-red-induction_P Parameter: Timepoint (hr) Value: 4
  misc_feature: MA Experiment 20001248 PARAMETER Experiment Name: At_Far-red-induction_P Parameter: Tissue Value: Whole Plant
  misc_feature: MA Experiment ID: 20001450 Result: Up-regulated in Transcription
  misc_feature: MA Experiment 20001450 PARAMETER Experiment Name: At_Far-red-induction_P Parameter: Age (day) Value: 7
  misc_feature: MA Experiment 20001450 PARAMETER Experiment Name: At_Far-red-induction_P Parameter: Light Value: Far-red vs. White
  misc_feature: MA Experiment 20001450 PARAMETER Experiment Name: At_Far-red-induction_P Parameter: Organism Value: A. thaliana
  misc_feature: MA Experiment 20001450 PARAMETER Experiment Name: At_Far-red-induction_P Parameter: Plant Line Value: Columbia
  misc_feature: MA Experiment 20001450 PARAMETER Experiment Name: At_Far-red-induction_P Parameter: Timepoint (hr) Value: 8
  misc_feature: MA Experiment 20001450 PARAMETER Experiment Name: At_Far-red-induction_P Parameter: Tissue Value: Whole Plant
  misc_feature: MA Experiment ID: 20001557 Result: Down-regulated in Transcription
  misc_feature: MA Experiment 20001557 PARAMETER Experiment Name: At_Drought_Soil_Dry_P Parameter: Age (day) Value: 27
  misc_feature: MA Experiment 20001557 PARAMETER Experiment Name: At_Drought_Soil_Dry_P Parameter: Organism Value: A. thaliana
  misc_feature: MA Experiment 20001557 PARAMETER Experiment Name: At_Drought_Soil_Dry_P Parameter: Plant Line Value: WS
  misc_feature: MA Experiment 20001557 PARAMETER Experiment Name: At_Drought_Soil_Dry_P Parameter: Post Timepoint (hr) Value: 3
  misc_feature: MA Experiment 20001557 PARAMETER Experiment Name: At_Drought_Soil_Dry_P Parameter: Post-Treatment Value: Re-Water vs. No Drought
  misc_feature: MA Experiment 20001557 PARAMETER Experiment Name: At_Drought_Soil_Dry_P Parameter: Timepoint (day) Value: 13
  misc_feature: MA Experiment 20001557 PARAMETER Experiment Name: At_Drought_Soil_Dry_P Parameter: Treatment Value: Drought vs. No Drought
  misc_feature: MA Experiment ID: 20001558 Result: Down-regulated in Transcription
  misc_feature: MA Experiment 20001558 PARAMETER Experiment Name: At_Drought_Soil_Dry_P Parameter: Age (day) Value: 27
  misc_feature: MA Experiment 20001558 PARAMETER Experiment Name: At_Drought_Soil_Dry_P Parameter: Organism Value: A. thaliana
  misc_feature: MA Experiment 20001558 PARAMETER Experiment Name: At_Drought_Soil_Dry_P Parameter: Plant Line Value: WS
  misc_feature: MA Experiment 20001558 PARAMETER Experiment Name: At_Drought_Soil_Dry_P Parameter: Post Timepoint (hr) Value: 6
  misc_feature: MA Experiment 20001558 PARAMETER Experiment Name: At_Drought_Soil_Dry_P Parameter: Post-Treatment Value: Re-Water vs. No Drought
  misc_feature: MA Experiment 20001558 PARAMETER Experiment Name: At_Drought_Soil_Dry_P Parameter: Timepoint (day) Value: 13
  misc_feature: MA Experiment 20001558 PARAMETER Experiment Name: At_Drought_Soil_Dry_P Parameter: Treatment Value: Drought vs. No Drought
  misc_feature: MA Experiment ID: 20001560 Result: Down-regulated in Transcription
  misc_feature: MA Experiment 20001560 PARAMETER Experiment Name: At_Drought_Soil_Dry_P Parameter: Age (day) Value: 28
  misc_feature: MA Experiment 20001560 PARAMETER Experiment Name: At_Drought_Soil_Dry_P Parameter: Organism Value: A. thaliana
  misc_feature: MA Experiment 20001560 PARAMETER Experiment Name: At_Drought_Soil_Dry_P Parameter: Plant Line Value: WS
  misc_feature: MA Experiment 20001560 PARAMETER Experiment Name: At_Drought_Soil_Dry_P Parameter: Post Timepoint (hr) Value: None
  misc_feature: MA Experiment 20001560 PARAMETER Experiment Name: At_Drought_Soil_Dry_P Parameter: Post-Treatment Value: None
  misc_feature: MA Experiment 20001560 PARAMETER Experiment Name: At_Drought_Soil_Dry_P Parameter: Timepoint (day) Value: 14
  misc_feature: MA Experiment 20001560 PARAMETER Experiment Name: At_Drought_Soil_Dry_P Parameter: Treatment Value: Drought vs. No Drought
atgtctcctgcgatcaaagcaccgctcttaccaaaccaagagccttcatcatcatcatcggagaaccatggatcattcgccggagctgtgtttaacatctcgacaagcatcgtcggagctggaattatggcgattccggcggctttcaaagtcctagctgggtttttaatgaaatccagtctcgccggagaatcaacaacttacgccggcgtgatgaaggaatcgttcggaaaatctggtgccgttgctgttacggttgttacaatggttgtgacttttgggtctatgattattttctcgattatcattggtgatgttatttcgggtaatgagaaagatggaatcatacatttaggtcttcttcaagaatggtttggttctcattggtggaatacgagattctttgaaagattggcatttagttctgcaatttcgtttctgcttgcgttactctttgttgtcataagctcggtgttagcgattattgctctcgtgcaagggaagacaaagcctccgagactcttccctgaactcaatgatggtggattatcgtttttcagtctcttcactgcttcccctgtcattgtaacagccttcacctttcatttcaatggtaagaaaccaagaaccaagaactttatggttattgcagtccatccagtagcattcgaactcaaagatccattaaatgtgctttcagcaacaaggatctctgtgattctgtgtgctacgatctactcagctactggtctcttttgttaccttctgtttggggattccactatgacagatgttctaatgaactttgatcaaagcaccagttcttcggttggttcattactaaatgatattgttagactcagctacgcgattcacctcatgctcgtgtttcctctgctcaacttctcgcttagagccaacctcgacgaactcttgttccctatgaagctttctttagtggaagacaacaaaagattcttcgcactcacttttccattactgatatcttgtttcttgggtgcaattgccataccagacatttggtacttctttcagttcttgggatcaacttctacagtctctatagcattcatctttccagctgcaattgtcctacggaatgtaaatggtttctcgactttaagagagaagattgtagcttcagtaatgcttgttcttgctgttgccacaagtatcatcgctatttcgacaaatatatacactttcacagcaacagaagaaacatga

SEQ ID NO: 70324 - protein, 415 aa, Arabidopsis thaliana
  peptide (1)..(415): Ceres Seq. ID no. 2703869
  misc_feature (1)..(415): Homolog of NCBI NO: 25408697 NR Description: hypothetical protein At2g40420 [imported] - thaliana >gi|20198010|gb|AAM15348.1| unknown protein [Arabidopsis
  misc_feature (28)..(415): Homolog of NCBI NO: 30688270 NR Description: amino acid transporter family [Arabidopsis
  misc_feature (29)..(411): Homolog of NCBI NO: 15228851 NR Description: putative protein; protein id: At3g56200.1, by cDNA: gi_20453044 [Arabidopsis thaliana]
  misc_feature (38)..(407): Homolog of NCBI NO: 18406463 NR Description: expressed protein; protein id: At3g30390.1, by cDNA: gi_15529154, supported by cDNA: gi_16226266 [Arabidopsis >gi|9294342|dbj|BAB02239.1|
  misc_feature (5)..(52): Homolog of NCBI NO: 18406463 NR Description: expressed protein; protein id: At3g30390.1, by cDNA: gi_15529154, supported by cDNA: gi_16226266 [Arabidopsis >gi|9294342|dbj|BAB02239.1|
  misc_feature (56)..(408): Homolog of NCBI NO: 34898706 NR Description: hypothetical protein [Oryza sativa (japonica group)] >gi|11862972|dbj|BAB19353.1| hypothetical protein [Oryza
  misc_feature (8)..(52): Homolog of NCBI NO: 34898706 NR Description: hypothetical protein [Oryza sativa (japonica group)] >gi|11862972|dbj|BAB19353.1| hypothetical protein [Oryza
  misc_feature (29)..(407): Homolog of NCBI NO: 9758059 NR Description: amino acid transporter-like protein [Arabidopsis
  misc_feature (29)..(407): Homolog of NCBI NO: 15241555 NR Description: transporter -like protein; protein id:
  misc_feature (7)..(52): Homolog of NCBI NO: 9758059 NR Description: amino acid transporter-like protein [Arabidopsis
MSPAIKAPLLPNQEPSSSSSENHGSFAGAVFNISTSIVGAGIMAIPAAFKVLAGFLMKSSLAGESTTYAGVMKESFGKSGAVAVTVVTMVVTFGSMIIFSIIIGDVISGNEKDGIIHLGLLQEWFGSHWWNTRFFERLAFSSAISFLLALLFVVISSVLAIIALVQGKTKPPRLFPELNDGGLSFFSLFTASPVIVTAFTFHFNGKKPRTKNFMVIAVHPVAFELKDPLNVLSATRISVILCATIYSATGLFCYLLFGDSTMTDVLMNFDQSTSSSVGSLLNDIVRLSYAIHLMLVFPLLNFSLRANLDELLFPMKLSLVEDNKRFFALTFPLLISCFLGAIAIPDIWYFFQFLGSTSTVSIAFIFPAAIVLRNVNGFSTLREKIVASVMLVLAVATSIIAISTNIYTFTATEET

SEQ ID NO: 70325 - protein, 373 aa, Arabidopsis thaliana
  peptide (1)..(373): Ceres Seq. ID no. 2703870
  misc_feature (1)..(373): Homolog of NCBI NO: 25408697 NR Description: hypothetical protein At2g40420 [imported] - thaliana >gi|20198010|gb|AAM15348.1| unknown protein [Arabidopsis
  misc_feature (1)..(373): Homolog of NCBI NO: 30688270 NR Description: amino acid transporter family [Arabidopsis
  misc_feature (1)..(369): Homolog of NCBI NO: 15228851 NR Description: putative protein; protein id: At3g56200.1, by cDNA: gi_20453044 [Arabidopsis thaliana]
  misc_feature (1)..(365): Homolog of NCBI NO: 18406463 NR Description: expressed protein; protein id: At3g30390.1, by cDNA: gi_15529154, supported by cDNA: gi_16226266 [Arabidopsis >gi|9294342|dbj|BAB02239.1|
  misc_feature (14)..(366): Homolog of NCBI NO: 34898706 NR Description: hypothetical protein [Oryza sativa (japonica group)] >gi|11862972|dbj|BAB19353.1| hypothetical protein [Oryza
  misc_feature (1)..(365): Homolog of NCBI NO: 9758059 NR Description: amino acid transporter-like protein [Arabidopsis
  misc_feature (1)..(365): Homolog of NCBI NO: 15241555 NR Description: transporter -like protein; protein id:
  misc_feature (1)..(331): Homolog of NCBI NO: 34907894 NR Description: P0439E11.11 [Oryza sativa (japonica
  misc_feature (1)..(372): Homolog of NCBI NO: 18412864 NR Description: expressed protein; protein id: At1g80510.1, by cDNA: gi_16226718 [Arabidopsis thaliana]
  misc_feature (8)..(244): Homolog of NCBI NO: 24461850 NR Description: CTV.3 [Poncirus trifoliata]
MAIPAAFKVLAGFLMKSSLAGESTTYAGVMKESFGKSGAVAVTVVTMVVTFGSMIIFSIIIGDVISGNEKDGIIHLGLLQEWFGSHWWNTRFFERLAFSSAISFLLALLFVVISSVLAIIALVQGKTKPPRLFPELNDGGLSFFSLFTASPVIVTAFTFHFNGKKPRTKNFMVIAVHPVAFELKDPLNVLSATRISVILCATIYSATGLFCYLLFGDSTMTDVLMNFDQSTSSSVGSLLNDIVRLSYAIHLMLVFPLLNFSLRANLDELLFPMKLSLVEDNKRFFALTFPLLISCFLGAIAIPDIWYFFQFLGSTSTVSIAFIFPAAIVLRNVNGFSTLREKIVASVMLVLAVATSIIAISTNIYTFTATEET

SEQ ID NO: 70326 - protein, 359 aa, Arabidopsis thaliana
  peptide (1)..(359): Ceres Seq. ID no. 2703871
  misc_feature (1)..(359): Homolog of NCBI NO: 25408697 NR Description: hypothetical protein At2g40420 [imported] - thaliana >gi|20198010|gb|AAM15348.1| unknown protein [Arabidopsis
  misc_feature (1)..(359): Homolog of NCBI NO: 30688270 NR Description: amino acid transporter family [Arabidopsis
  misc_feature (1)..(355): Homolog of NCBI NO: 15228851 NR Description: putative protein; protein id: At3g56200.1, by cDNA: gi_20453044 [Arabidopsis thaliana]
  misc_feature (1)..(351): Homolog of NCBI NO: 18406463 NR Description: expressed protein; protein id: At3g30390.1, by cDNA: gi_15529154, supported by cDNA: gi_16226266 [Arabidopsis >gi|9294342|dbj|BAB02239.1|
  misc_feature (1)..(352): Homolog of NCBI NO: 34898706 NR Description: hypothetical protein [Oryza sativa (japonica group)] >gi|11862972|dbj|BAB19353.1| hypothetical protein [Oryza
  misc_feature (1)..(351): Homolog of NCBI NO: 9758059 NR Description: amino acid transporter-like protein [Arabidopsis
  misc_feature (1)..(351): Homolog of NCBI NO: 15241555 NR Description: transporter -like protein; protein id:
  misc_feature (1)..(317): Homolog of NCBI NO: 34907894 NR Description: P0439E11.11 [Oryza sativa (japonica
  misc_feature (1)..(358): Homolog of NCBI NO: 18412864 NR Description: expressed protein; protein id: At1g80510.1, by cDNA: gi_16226718 [Arabidopsis thaliana]
  misc_feature (1)..(230): Homolog of NCBI NO: 24461850 NR Description: CTV.3 [Poncirus trifoliata]
MKSSLAGESTTYAGVMKESFGKSGAVAVTVVTMVVTFGSMIIFSIIIGDVISGNEKDGIIHLGLLQEWFGSHWWNTRFFERLAFSSAISFLLALLFVVISSVLAIIALVQGKTKPPRLFPELNDGGLSFFSLFTASPVIVTAFTFHFNGKKPRTKNFMVIAVHPVAFELKDPLNVLSATRISVILCATIYSATGLFCYLLFGDSTMTDVLMNFDQSTSSSVGSLLNDIVRLSYAIHLMLVFPLLNFSLRANLDELLFPMKLSLVEDNKRFFALTFPLLISCFLGAIAIPDIWYFFQFLGSTSTVSIAFIFPAAIVLRNVNGFSTLREKIVASVMLVLAVATSIIAISTNIYTFTATEET

SEQ ID NO: 70327 - DNA, 558 bp, Arabidopsis thaliana
  misc_feature (1)..(558): Ceres Seq. ID no. 2703920
  misc_feature: MA Experiment ID: 20000440 Result: Up-regulated in Transcription
  misc_feature: MA Experiment 20000440 PARAMETER Experiment Name: At_Closed-Flower__Sub_P Parameter: Tissue Value: Closed Flower vs. Whole Plant
atgcgtccaagagagtgttttggtcacagttctaatcatatttctgaatgcatgttaagcaccgaatcaacaaccgtcgtcgtcatcatcttcctcaaatctttggacgtggcttatgcagacaacgagtatcgatgcttcgtcggaggtttagcttgggccaccgatgaacagtctatagagaggtgtttcaacgagtttggtgaagttttcgactccaagatcatcattgatcgtgagaccgggaggtctaaggggtttagatttgtgacttttaaagatgaggattccatgaggactgcgatcgatagaatgaatggtcaagaacttgatggtcgtaacattactgctcaggctcgtggtagtggtactcgcggtggtatggttggtggttacggaagtggtggttacagaggtagacgtgatcaaggtggttacaaccgtggcggtggaggtggatacggtggtggttatggaggtgatcgtcgtgaaggtggttatggagacggaggttacggtggtcaggggcgatctgaaggaggaagctggagaaattga

SEQ ID NO: 70328 - protein, 185 aa, Arabidopsis thaliana
  peptide (1)..(185): Ceres Seq. ID no. 2703921
  misc_feature (46)..(117): Pfam Name: RNA recognition motif. (a.k.a. RRM, RBD, or RNP domain) Pfam Description: RNA recognition motif. (a.k.a. RRM, RBD, or RNP
  misc_feature (1)..(185): Homolog of NCBI NO: 15226722 NR Description: glycine-rich RNA-binding protein; protein id:
  misc_feature (40)..(181): Homolog of NCBI NO: 20152613 NR Description: putative glycine rich protein [Rumex obtusifolius]
  misc_feature (40)..(183): Homolog of NCBI NO: 544426 NR Description: Glycine-rich RNA-binding protein
  misc_feature (37)..(185): Homolog of NCBI NO: 7024451 NR Description: glycine-rich RNA-binding protein [Citrus unshiu]
  misc_feature (40)..(185): Homolog of NCBI NO: 2226370 NR Description: RNA-binding protein [Nicotiana glutinosa]
  misc_feature (43)..(183): Homolog of NCBI NO: 15235002 NR Description: glycine-rich RNA-binding protein 8 (GRP8); id: At4g39260.1, supported by cDNA: gi_166838 [Arabidopsis
  misc_feature (40)..(181): Homolog of NCBI NO: 2119042 NR Description: glycine-rich RNA-binding protein RGP-1a - wood
  misc_feature (37)..(185): Homolog of NCBI NO: 2267567 NR Description: glycine-rich RNA binding protein 1 [Pelargonium x
  misc_feature (37)..(181): Homolog of NCBI NO: 10799202 NR Description: glycine-rich RNA-binding protein [Sorghum bicolor]
  misc_feature (37)..(183): Homolog of NCBI NO: 30681492 NR Description: glycine-rich RNA-binding protein (AtGRP7)
MRPRECFGHSSNHISECMLSTESTTVVVIIFLKSLDVAYADNEYRCFVGGLAWATDEQSIERCFNEFGEVFDSKIIIDRETGRSKGFRFVTFKDEDSMRTAIDRMNGQELDGRNITAQARGSGTRGGMVGGYGSGGYRGRRDQGGYNRGGGGGYGGGYGGDRREGGYGDGGYGGQGRSEGGSWRN

SEQ ID NO: 70329 - protein, 168 aa, Arabidopsis thaliana
  peptide (1)..(168): Ceres Seq. ID no. 2703922
  misc_feature (29)..(100): Pfam Name: RNA recognition motif. (a.k.a. RRM, RBD, or RNP domain) Pfam Description: RNA recognition motif. (a.k.a. RRM, RBD, or RNP
  misc_feature (1)..(168): Homolog of NCBI NO: 15226722 NR Description: glycine-rich RNA-binding protein; protein id:
  misc_feature (23)..(164): Homolog of NCBI NO: 20152613 NR Description: putative glycine rich protein [Rumex obtusifolius]
  misc_feature (23)..(166): Homolog of NCBI NO: 544426 NR Description: Glycine-rich RNA-binding protein
  misc_feature (20)..(168): Homolog of NCBI NO: 7024451 NR Description: glycine-rich RNA-binding protein [Citrus unshiu]
  misc_feature (23)..(168): Homolog of NCBI NO: 2226370 NR Description: RNA-binding protein [Nicotiana glutinosa]
  misc_feature (26)..(166): Homolog of NCBI NO: 15235002 NR Description: glycine-rich RNA-binding protein 8 (GRP8); id: At4g39260.1, supported by cDNA: gi_166838 [Arabidopsis
  misc_feature (23)..(164): Homolog of NCBI NO: 2119042 NR Description: glycine-rich RNA-binding protein RGP-1a - wood
  misc_feature (20)..(168): Homolog of NCBI NO: 2267567 NR Description: glycine-rich RNA binding protein 1 [Pelargonium x
  misc_feature (20)..(164): Homolog of NCBI NO: 10799202 NR Description: glycine-rich RNA-binding protein [Sorghum bicolor]
  misc_feature (20)..(166): Homolog of NCBI NO: 30681492 NR Description: glycine-rich RNA-binding protein (AtGRP7)
MLSTESTTVVVIIFLKSLDVAYADNEYRCFVGGLAWATDEQSIERCFNEFGEVFDSKIIIDRETGRSKGFRFVTFKDEDSMRTAIDRMNGQELDGRNITAQARGSGTRGGMVGGYGSGGYRGRRDQGGYNRGGGGGYGGGYGGDRREGGYGDGGYGGQGRSEGGSWRN

SEQ ID NO: 70330 - DNA, 2778 bp, Arabidopsis thaliana
  misc_feature (1)..(2778): Ceres Seq. ID no. 2703953
  misc_feature: MA Experiment ID: 20000171 Result: Up-regulated in Transcription
  misc_feature: MA Experiment 20000171 PARAMETER Experiment Name: At_42deg_Heat_P Parameter: Age (day) Value: 14
  misc_feature: MA Experiment 20000171 PARAMETER Experiment Name: At_42deg_Heat_P Parameter: Organism Value: A. thaliana
  misc_feature: MA Experiment 20000171 PARAMETER Experiment Name: At_42deg_Heat_P Parameter: Plant Line Value: WS
  misc_feature: MA Experiment 20000171 PARAMETER Experiment Name: At_42deg_Heat_P Parameter: Temperature (deg C) Value: 42 vs. 22
  misc_feature: MA Experiment 20000171 PARAMETER Experiment Name: At_42deg_Heat_P Parameter: Timepoint (hr) Value: 1
  misc_feature: MA Experiment 20000171 PARAMETER Experiment Name: At_42deg_Heat_P Parameter: Tissue Value: Aerial
  misc_feature: MA Experiment ID: 20001911 Result: Down-regulated in Transcription
  misc_feature: MA Experiment 20001911 PARAMETER Experiment Name: At_Drought_Reproduction_P Parameter: Age (day) Value: 40
  misc_feature: MA Experiment 20001911 PARAMETER Experiment Name: At_Drought_Reproduction_P Parameter: Organism Value: A. thaliana
  misc_feature: MA Experiment 20001911 PARAMETER Experiment Name: At_Drought_Reproduction_P Parameter: Plant Line Value: WS
  misc_feature: MA Experiment 20001911 PARAMETER Experiment Name: At_Drought_Reproduction_P Parameter: Timepoint (day) Value: 10
  misc_feature: MA Experiment 20001911 PARAMETER Experiment Name: At_Drought_Reproduction_P Parameter: Tissue Value: Flowers
  misc_feature: MA Experiment 20001911 PARAMETER Experiment Name: At_Drought_Reproduction_P Parameter: Treatment Value: Drought vs. No Drought
  misc_feature: Pfam Name: Pkinase Pfam Description: Protein kinase domain
atggttgatcaaagaagaagcgcattgggttttgtcttgttgttgttgtgtttggtactgttcttcgactgtgttgttgttggtcaaacacagagtcgattcagtgagaaactcattttgcttaatctcaggtcttctttagggttaagaggaacagattggccaattaaaggtgacccttgtgttgattggagaggtatacaatgtgagaatggtagtatcattgggatcaatatctctgggtttaggagaacaagaattggtaagctaaacccacaattctctgttgatcctcttcgtaatctaactcgtttgtcgtattttaacgcgtccgggttagcgttaccggggactatacctgagtggtttggtgttagtttgttggcattggaagtattggatcttagttcgtgttctgttaacggtgttgttccttttactcttggtaatctcactagtttaagaactttgaatctgtctcagaacagtcttactagtttagttcctagcagtttaggacagttgttgaatctatcacagcttgatctctctaggaactcattcactggtgttcttcctcaatcttttagctctctgaagaatctgttgactcttgatgtttcttccaattaccttactggacctatccctcctggtttaggagcgttatcaaagcttatccatctgaacttttcaagcaatagtttctcgtctccgattccttcagagcttggtgatcttgtcaatctggttgactttgatctcagcatcaattcattgtctggttcagttcctcaggagctaagaaagttaagtaagttgcagctaatggcgattggcgataaccttttgagtggtactttaccagtagatttgtttagtgctgagagccaactgcaaactttagttttgagggaaaatggtttctctggtagtctacctgatgtgtgctggtcgttgccaaaattgcggattcttgacattgctaagaacaacttcacaggactgctgccatattctagttatgattcagaccagatagctgaaatggttgatatctcttcgaacacattctatggagagctcacaccgattcttagacggttcaggataatggacctctctggtaattatttcgaaggtaagcttcctgattatgtgaccggggaaaatgtgtctgttacaagcaattgccttcgaaatgagaggagacagaagccgtcagcaatatgtgcagcattctataagtctagaggattagattttgatgatttcggacgtcctaatttgacacaaccgacatcgaaaaatgcttcttcagggataagccgcagaacagtaattatattggcagcagtgggtggtggagttgcttttattcttctttttgttatcttgccaattattctggttctatgcatgcgccatagacgcagagcggcacaaagaggaaataacgacaggccaaaacctgccggggaagcttcacaacaaccacctaaaggagcacaaacctttgatttgtcacgtcttggaaatgcattttcttatgagcagcttcttcaggcaacagaggaattcaatgatgctaatctgataaaacgtggtcattcggggaatctgtttcgtggtttcttggaaaatggtatacccgttgttataaaaaagatcgatgtgcgggaaggtaaaagtgaaggctatatatcagaactggagttgtttagtaaggctggacaccagaggctggttccctttttgggacactgcttggagaatgagagccaaaagttcttggtatacaagtttatgagacacggtgatttggctagctctttgttcaggaaatccgaaaacgaaggtgatggattgaagtctttggattggataacaaggttgaaaattgctcttggtgcagctgagggactctcttatttgcatcatgagtgttcaccgcctctagttcatagggatgtacaagcaagtagcatacttcttgatgataaatttgaggtacgtcttggaagcctaagcgaggcatatgctcaaggtgatgcttatcaaagcagaatttctcgtttacttcgattaccgcagatataccatctccgattaaccgatagacatctgattggtttattcttttcaggtgtaacaaatgcaatatgttcgtatgatgtctactgctttggcaaagtgttacttgagctagtaacggggaagctcgggattagctcgccagacaacgcacttgcaaaagagtacatggaagaagctttgccatacatcagcacaaacgagaaagaactagtaaccaagatcttagacccgtcattaatggtggacgaagaccttctagaagaagtatgggcaatggctatcattgcaaagtcatgcctaaacccaaaaccaacaagaagaccattaatgagacacattgtgaacgcacttgagaacccactgaaagtagtaagagaagataccaactcgggttcaggctcttcccggttaagaacaaactcgtcgagagggtcttggaacgctgctatatttgggagctggaggcagagtgcgtcggatgtaacagctgttcaagcgggagcaacaacaagcggtggtggtggtggtggtggtggtaatggtttgagaaactcggggtcgcaaggaagtagcggaaggaacaataacaacaacgggaattcatcgtcgtcgagaagacggcaatctagtgagattgtaccggaacctgctgcttatggagtagtagaggataatttatga

SEQ ID NO: 70331 - protein, 925 aa, Arabidopsis thaliana
  peptide (1)..(925): Ceres Seq. ID no. 2703954
  misc_feature: Pfam Name: Pkinase Pfam Description: Protein kinase domain
  misc_feature (12)..(894): Homolog of NCBI NO: 15235005 NR Description: leucine-rich repeat transmembrane protein kinase, protein id: At4g39270.1, supported by cDNA: gi_20466769
  misc_feature (12)..(894): Homolog of NCBI NO: 20466770 NR Description: receptor protein kinase-like protein [Arabidopsis
  misc_feature (246)..(875): Homolog of NCBI NO: 34394416 NR Description: putative Systemin receptor SR160 precursor [Oryza
  misc_feature (244)..(857): Homolog of NCBI NO: 34915200 NR Description: putative receptor-like protein kinase [Oryza
  misc_feature (102)..(825): Homolog of NCBI NO: 15241558 NR Description: leucine-rich repeat transmembrane protein kinase,
  misc_feature (100)..(813): Homolog of NCBI NO: 15225805 NR Description: putative receptor-like protein kinase; protein id:
  misc_feature (102)..(841): Homolog of NCBI NO: 15240720 NR Description: receptor-like protein kinase; protein id:
  misc_feature (72)..(384): Homolog of NCBI NO: 4105699 NR Description: receptor kinase [Arabidopsis thaliana]
  misc_feature (515)..(823): Homolog of NCBI NO: 4105699 NR Description: receptor kinase [Arabidopsis thaliana]
  misc_feature (12)..(389): Homolog of NCBI NO: 34393421 NR Description: putative OsLRK1(receptor-type protein kinase)
MVDQRRSALGFVLLLLCLVLFFDCVVVGQTQSRFSEKLILLNLRSSLGLRGTDWPIKGDPCVDWRGIQCENGSIIGINISGFRRTRIGKLNPQFSVDPLRNLTRLSYFNASGLALPGTIPEWFGVSLLALEVLDLSSCSVNGVVPFTLGNLTSLRTLNLSQNSLTSLVPSSLGQLLNLSQLDLSRNSFTGVLPQSFSSLKNLLTLDVSSNYLTGPIPPGLGALSKLIHLNFSSNSFSSPIPSELGDLVNLVDFDLSINSLSGSVPQELRKLSKLQLMAIGDNLLSGTLPVDLFSAESQLQTLVLRENGFSGSLPDVCWSLPKLRILDIAKNNFTGLLPYSSYDSDQIAEMVDISSNTFYGELTPILRRFRIMDLSGNYFEGKLPDYVTGENVSVTSNCLRNERRQKPSAICAAFYKSRGLDFDDFGRPNLTQPTSKNASSGISRRTVIILAAVGGGVAFILLFVILPIILVLCMRHRRRAAQRGNNDRPKPAGEASQQPPKGAQTFDLSRLGNAFSYEQLLQATEEFNDANLIKRGHSGNLFRGFLENGIPVVIKKIDVREGKSEGYISELELFSKAGHQRLVPFLGHCLENESQKFLVYKFMRHGDLASSLFRKSENEGDGLKSLDWITRLKIALGAAEGLSYLHHECSPPLVHRDVQASSILLDDKFEVRLGSLSEAYAQGDAYQSRISRLLRLPQIYHLRLTDRHLIGLFFSGVTNAICSYDVYCFGKVLLELVTGKLGISSPDNALAKEYMEEALPYISTNEKELVTKILDPSLMVDEDLLEEVWAMAIIAKSCLNPKPTRRPLMRHIVNALENPLKVVREDTNSGSGSSRLRTNSSRGSWNAAIFGSWRQSASDVTAVQAGATTSGGGGGGGGNGLRNSGSQGSSGRNNNNNGNSSSSRRRQSSEIVPEPAAYGVVEDNL

SEQ ID NO: 70332 - protein, 649 aa, Arabidopsis thaliana
  peptide (1)..(649): Ceres Seq. ID no. 2703955
  misc_feature: Pfam Name: Pkinase Pfam Description: Protein kinase domain
  misc_feature (1)..(618): Homolog of NCBI NO: 15235005 NR Description: leucine-rich repeat transmembrane protein kinase, protein id: At4g39270.1, supported by cDNA: gi_20466769
  misc_feature (1)..(618): Homolog of NCBI NO: 20466770 NR Description: receptor protein kinase-like protein [Arabidopsis
  misc_feature (1)..(599): Homolog of NCBI NO: 34394416 NR Description: putative Systemin receptor SR160 precursor [Oryza
  misc_feature (1)..(581): Homolog of NCBI NO: 34915200 NR Description: putative receptor-like protein kinase [Oryza
  misc_feature (1)..(549): Homolog of NCBI NO: 15241558 NR Description: leucine-rich repeat transmembrane protein kinase,
  misc_feature (1)..(537): Homolog of NCBI NO: 15225805 NR Description: putative receptor-like protein kinase; protein id:
  misc_feature (1)..(565): Homolog of NCBI NO: 15240720 NR Description: receptor-like protein kinase; protein id:
  misc_feature (1)..(108): Homolog of NCBI NO: 4105699 NR Description: receptor kinase [Arabidopsis thaliana]
  misc_feature (239)..(547): Homolog of NCBI NO: 4105699 NR Description: receptor kinase [Arabidopsis thaliana]
  misc_feature (1)..(113): Homolog of NCBI NO: 34393421 NR Description: putative OsLRK1(receptor-type protein kinase)
MAIGDNLLSGTLPVDLFSAESQLQTLVLRENGFSGSLPDVCWSLPKLRILDIAKNNFTGLLPYSSYDSDQIAEMVDISSNTFYGELTPILRRFRIMDLSGNYFEGKLPDYVTGENVSVTSNCLRNERRQKPSAICAAFYKSRGLDFDDFGRPNLTQPTSKNASSGISRRTVIILAAVGGGVAFILLFVILPIILVLCMRHRRRAAQRGNNDRPKPAGEASQQPPKGAQTFDLSRLGNAFSYEQLLQATEEFNDANLIKRGHSGNLFRGFLENGIPVVIKKIDVREGKSEGYISELELFSKAGHQRLVPFLGHCLENESQKFLVYKFMRHGDLASSLFRKSENEGDGLKSLDWITRLKIALGAAEGLSYLHHECSPPLVHRDVQASSILLDDKFEVRLGSLSEAYAQGDAYQSRISRLLRLPQIYHLRLTDRHLIGLFFSGVTNAICSYDVYCFGKVLLELVTGKLGISSPDNALAKEYMEEALPYISTNEKELVTKILDPSLMVDEDLLEEVWAMAIIAKSCLNPKPTRRPLMRHIVNALENPLKVVREDTNSGSGSSRLRTNSSRGSWNAAIFGSWRQSASDVTAVQAGATTSGGGGGGGGNGLRNSGSQGSSGRNNNNNGNSSSSRRRQSSEIVPEPAAYGVVEDNL

SEQ ID NO: 70333 - protein, 576 aa, Arabidopsis thaliana
  peptide (1)..(576): Ceres Seq. ID no. 2703956
  misc_feature: Pfam Name: Pkinase Pfam Description: Protein kinase domain
  misc_feature (1)..(545): Homolog of NCBI NO: 15235005 NR Description: leucine-rich repeat transmembrane protein kinase, protein id: At4g39270.1, supported by cDNA: gi_20466769
  misc_feature (1)..(545): Homolog of NCBI NO: 20466770 NR Description: receptor protein kinase-like protein [Arabidopsis
  misc_feature (1)..(526): Homolog of NCBI NO: 34394416 NR Description: putative Systemin receptor SR160 precursor [Oryza
  misc_feature (1)..(508): Homolog of NCBI NO: 34915200 NR Description: putative receptor-like protein kinase [Oryza
  misc_feature (1)..(476): Homolog of NCBI NO: 15241558 NR Description: leucine-rich repeat transmembrane protein kinase,
  misc_feature (1)..(464): Homolog of NCBI NO: 15225805 NR Description: putative receptor-like protein kinase; protein id:
  misc_feature (1)..(492): Homolog of NCBI NO: 15240720 NR Description: receptor-like protein kinase; protein id:
  misc_feature (1)..(35): Homolog of NCBI NO: 4105699 NR Description: receptor kinase [Arabidopsis thaliana]
  misc_feature (166)..(474): Homolog of NCBI NO: 4105699 NR Description: receptor kinase [Arabidopsis thaliana]
  misc_feature (1)..(40): Homolog of NCBI NO: 34393421 NR Description: putative OsLRK1(receptor-type protein kinase)
MVDISSNTFYGELTPILRRFRIMDLSGNYFEGKLPDYVTGENVSVTSNCLRNERRQKPSAICAAFYKSRGLDFDDFGRPNLTQPTSKNASSGISRRTVIILAAVGGGVAFILLFVILPIILVLCMRHRRRAAQRGNNDRPKPAGEASQQPPKGAQTFDLSRLGNAFSYEQLLQATEEFNDANLIKRGHSGNLFRGFLENGIPVVIKKIDVREGKSEGYISELELFSKAGHQRLVPFLGHCLENESQKFLVYKFMRHGDLASSLFRKSENEGDGLKSLDWITRLKIALGAAEGLSYLHHECSPPLVHRDVQASSILLDDKFEVRLGSLSEAYAQGDAYQSRISRLLRLPQIYHLRLTDRHLIGLFFSGVTNAICSYDVYCFGKVLLELVTGKLGISSPDNALAKEYMEEALPYISTNEKELVTKILDPSLMVDEDLLEEVWAMAIIAKSCLNPKPTRRPLMRHIVNALENPLKVVREDTNSGSGSSRLRTNSSRGSWNAAIFGSWRQSASDVTAVQAGATTSGGGGGGGGNGLRNSGSQGSSGRNNNNNGNSSSSRRRQSSEIVPEPAAYGVVEDNL

SEQ ID NO: 70334 - DNA, 810 bp, Arabidopsis thaliana
  misc_feature (1)..(810): Ceres Seq. ID no. 2704409
  misc_feature: MA Experiment ID: 20000307 Result: Up-regulated in Transcription
  misc_feature: MA Experiment 20000307 PARAMETER Experiment Name: At_Germinating_Seeds_Sub_P Parameter: Age (hr) Value: 24 vs. 0
  misc_feature: MA Experiment 20000307 PARAMETER Experiment Name: At_Germinating_Seeds_Sub_P Parameter: Organism Value: A. thaliana
  misc_feature: MA Experiment 20000307 PARAMETER Experiment Name: At_Germinating_Seeds_Sub_P Parameter: Plant Line Value: WS
  misc_feature: MA Experiment 20000307 PARAMETER Experiment Name: At_Germinating_Seeds_Sub_P Parameter: Tissue Value: Germinating Seeds
  misc_feature: MA Experiment ID: 20000315 Result: Down-regulated in Transcription
  misc_feature: MA Experiment 20000315 PARAMETER Experiment Name: At_14day_Shoots-Roots_Sub_P Parameter: Age (day) Value: 14
  misc_feature: MA Experiment 20000315 PARAMETER Experiment Name: At_14day_Shoots-Roots_Sub_P Parameter: Organism Value: A. thaliana
  misc_feature: MA Experiment 20000315 PARAMETER Experiment Name: At_14day_Shoots-Roots_Sub_P Parameter: Plant Line Value: WS
  misc_feature: MA Experiment 20000315 PARAMETER Experiment Name: At_14day_Shoots-Roots_Sub_P Parameter: Tissue Value: Shoots vs. Whole Plant
  misc_feature: MA Experiment ID: 20000328 Result: Down-regulated in Transcription
  misc_feature: MA Experiment 20000328 PARAMETER Experiment Name: At_42deg_Heat_Sub_P Parameter: Age (day) Value: 14
  misc_feature: MA Experiment 20000328 PARAMETER Experiment Name: At_42deg_Heat_Sub_P Parameter: Organism Value: A. thaliana
  misc_feature: MA Experiment 20000328 PARAMETER Experiment Name: At_42deg_Heat_Sub_P Parameter: Plant Line Value: WS
  misc_feature: MA Experiment 20000328 PARAMETER Experiment Name: At_42deg_Heat_Sub_P Parameter: Temperature (deg C) Value: 42 vs. 22
  misc_feature: MA Experiment 20000328 PARAMETER Experiment Name: At_42deg_Heat_Sub_P Parameter: Timepoint (hr) Value: 6
  misc_feature: MA Experiment 20000328 PARAMETER Experiment Name: At_42deg_Heat_Sub_P Parameter: Tissue Value: Aerial
  misc_feature: MA Experiment ID: 20000329 Result: Up-regulated in Transcription
  misc_feature: MA Experiment 20000329 PARAMETER Experiment Name: At_4deg_Cold_Sub_P Parameter: Age (day) Value: 14
  misc_feature: MA Experiment 20000329 PARAMETER Experiment Name: At_4deg_Cold_Sub_P Parameter: Organism Value: A. thaliana
  misc_feature: MA Experiment 20000329 PARAMETER Experiment Name: At_4deg_Cold_Sub_P Parameter: Plant Line Value: WS
  misc_feature: MA Experiment 20000329 PARAMETER Experiment Name: At_4deg_Cold_Sub_P Parameter: Temperature (deg C) Value: 4 vs. 22
  misc_feature: MA Experiment 20000329 PARAMETER Experiment Name: At_4deg_Cold_Sub_P Parameter: Timepoint (hr) Value: 6
  misc_feature: MA Experiment 20000329 PARAMETER Experiment Name: At_4deg_Cold_Sub_P Parameter: Tissue Value: Aerial
  misc_feature: MA Experiment ID: 20000332 Result: Up-regulated in Transcription
  misc_feature: MA Experiment 20000332 PARAMETER Experiment Name: At_4deg_Cold_Sub_P Parameter: Age (day) Value: 14
  misc_feature: MA Experiment 20000332 PARAMETER Experiment Name: At_4deg_Cold_Sub_P Parameter: Organism Value: A. thaliana
  misc_feature: MA Experiment 20000332 PARAMETER Experiment Name: At_4deg_Cold_Sub_P Parameter: Plant Line Value: WS
  misc_feature: MA Experiment 20000332 PARAMETER Experiment Name: At_4deg_Cold_Sub_P Parameter: Temperature (deg C) Value: 4 vs. 22
  misc_feature: MA Experiment 20000332 PARAMETER Experiment Name: At_4deg_Cold_Sub_P Parameter: Timepoint (hr) Value: 2
  misc_feature: MA Experiment 20000332 PARAMETER Experiment Name: At_4deg_Cold_Sub_P Parameter: Tissue Value: Aerial
  misc_feature: MA Experiment ID: 20000352 Result: Up-regulated in Transcription
  misc_feature: MA Experiment 20000352 PARAMETER Experiment Name: At_Drought_Sub_P Parameter: Age (day) Value: 7
  misc_feature: MA Experiment 20000352 PARAMETER Experiment Name: At_Drought_Sub_P Parameter: Organism Value: A. thaliana
  misc_feature: MA Experiment 20000352 PARAMETER Experiment Name: At_Drought_Sub_P Parameter: Plant Line Value: WS
  misc_feature: MA Experiment 20000352 PARAMETER Experiment Name: At_Drought_Sub_P Parameter: Timepoint (hr) Value: 6
  misc_feature: MA Experiment 20000352 PARAMETER Experiment Name: At_Drought_Sub_P Parameter: Tissue Value: Whole Plant
  misc_feature: MA Experiment 20000352 PARAMETER Experiment Name: At_Drought_Sub_P Parameter: Treatment Value: Drought vs. No Drought
  misc_feature: MA Experiment ID: 20000440 Result: Up-regulated in Transcription
  misc_feature: MA Experiment 20000440 PARAMETER Experiment Name: At_Closed-Flower__Sub_P Parameter: Tissue Value: Closed Flower vs. Whole Plant
atgttcgaagaaatacttcataaatctgaaggaaaacaaatagttatgtttcttgattatgatggtactctctctcccattgttgatgatcctgatcgagctttcatgtccaagaagatgcgaaatactgtgaggaaacttgcaaagtgttttccaacagccatagttagtgggagatgcagagagaaggtttctagttttgtgaaattaactgagttatactacgctggaagtcatggcatggacatcaaaggaccagagcaaggatctaaatacaagaaagaaaatcagtctcttctttgtcaacccgcaactgaattcctcccggtgataaacgaggtttataaaaaactagtcgagaacactcaatcgattccaggagcgaaagttgagaacaacaaattttgtgcgtctgttcactttcgatgcgtagaagaaaataaatggagtgacttggcccatcaagttcgatcagtcttgaagaattaccccaagctcatgcttacccaaggaagaaaagtattggagattcgtccaatcattaagtgggataaaggcaaagcactcgagtttttgttagaatcactaggatatgataattgtaccgatgtttttcctatatatattggagatgatcgtaccgacgaagacgcctttaagatactgagagacaaaaaacaaggtcttggaattcttgtgtccaaatacgcaaaggagactaatgcttcttattctttgcaagagccagatgaggttatggtttttttagaacgtttggtggaatggaaacagtcaaggtgtggggcatga

SEQ ID NO: 70335 - protein, 269 aa, Arabidopsis thaliana
  peptide (1)..(269): Ceres Seq. ID no. 2704410
  misc_feature (17)..(250): Pfam Name: Trehalose-phosphatase Pfam Description: Trehalose-phosphatase
  misc_feature (1)..(269): Homolog of NCBI NO: 15227161 NR Description: putative trehalose-6-phosphate phosphatase;
  misc_feature (1)..(269): Homolog of NCBI NO: 30692524 NR Description: trehalose-6-phosphate phosphatase, putative thaliana] >gi|26452744|dbj|BAC43453.1| putative protein thaliana] >gi|28973301|gb|AAO63975.1| unknown protein
  misc_feature (2)..(264): Homolog of NCBI NO: 30683008 NR Description: trehalose-6-phosphate phosphatase, putative
  misc_feature (1)..(260): Homolog of NCBI NO: 15238360 NR Description: trehalose-6-phosphate phosphatase; protein id:
  misc_feature (2)..(251): Homolog of NCBI NO: 11282598 NR Description: trehalose-6-phosphate phosphatase-like protein -
  misc_feature (1)..(246): Homolog of NCBI NO: 7487212 NR Description: hypothetical protein T19P19.160 - Arabidopsis >gi|3080446|emb|CAA18763.1| puative protein [Arabidopsis >gi|7270961|emb|CAB80640.1| puative protein [Arabidopsis
  misc_feature (1)..(264): Homolog of NCBI NO: 18399940 NR Description: trehalose-phosphatase, putative; protein id:
  misc_feature (1)..(264): Homolog of NCBI NO: 21554408 NR Description: trehalose-phosphatase, putative [Arabidopsis
  misc_feature (1)..(264): Homolog of NCBI NO: 25354597 NR Description: probable trehalose-phosphatase [imported] -
  misc_feature (1)..(268): Homolog of NCBI NO: 15218205 NR Description: trehalose-6-phosphate phosphatase (AtTPPB); id: At1g78090.1, supported by cDNA: gi_2944179 [Arabidopsis
MFEEILHKSEGKQIVMFLDYDGTLSPIVDDPDRAFMSKKMRNTVRKLAKCFPTAIVSGRCREKVSSFVKLTELYYAGSHGMDIKGPEQGSKYKKENQSLLCQPATEFLPVINEVYKKLVENTQSIPGAKVENNKFCASVHFRCVEENKWSDLAHQVRSVLKNYPKLMLTQGRKVLEIRPIIKWDKGKALEFLLESLGYDNCTDVFPIYIGDDRTDEDAFKILRDKKQGLGILVSKYAKETNASYSLQEPDEVMVFLERLVEWKQSRCGA

SEQ ID NO: 70336 - protein, 254 aa, Arabidopsis thaliana
  peptide (1)..(254): Ceres Seq. ID no. 2704411
  misc_feature (2)..(235): Pfam Name: Trehalose-phosphatase Pfam Description: Trehalose-phosphatase
  misc_feature (1)..(254): Homolog of NCBI NO: 15227161 NR Description: putative trehalose-6-phosphate phosphatase;
  misc_feature (1)..(254): Homolog of NCBI NO: 30692524 NR Description: trehalose-6-phosphate phosphatase, putative thaliana] >gi|26452744|dbj|BAC43453.1| putative protein thaliana] >gi|28973301|gb|AAO63975.1| unknown protein
  misc_feature (1)..(249): Homolog of NCBI NO: 30683008 NR Description: trehalose-6-phosphate phosphatase, putative
  misc_feature (1)..(245): Homolog of NCBI NO: 15238360 NR Description: trehalose-6-phosphate phosphatase; protein id:
  misc_feature (1)..(236): Homolog of NCBI NO: 11282598 NR Description: trehalose-6-phosphate phosphatase-like protein -
  misc_feature (1)..(231): Homolog of NCBI NO: 7487212 NR Description: hypothetical protein T19P19.160 - Arabidopsis >gi|3080446|emb|CAA18763.1| puative protein [Arabidopsis >gi|7270961|emb|CAB80640.1| puative protein [Arabidopsis
  misc_feature (1)..(249): Homolog of NCBI NO: 18399940 NR Description: trehalose-phosphatase, putative; protein id:
  misc_feature (1)..(249): Homolog of NCBI NO: 21554408 NR Description: trehalose-phosphatase, putative [Arabidopsis
  misc_feature (1)..(249): Homolog of NCBI NO: 25354597 NR Description: probable trehalose-phosphatase [imported] -
  misc_feature (1)..(253): Homolog of NCBI NO: 15218205 NR Description: trehalose-6-phosphate phosphatase (AtTPPB); id: At1g78090.1, supported by cDNA: gi_2944179 [Arabidopsis
MFLDYDGTLSPIVDDPDRAFMSKKMRNTVRKLAKCFPTAIVSGRCREKVSSFVKLTELYYAGSHGMDIKGPEQGSKYKKENQSLLCQPATEFLPVINEVYKKLVENTQSIPGAKVENNKFCASVHFRCVEENKWSDLAHQVRSVLKNYPKLMLTQGRKVLEIRPIIKWDKGKALEFLLESLGYDNCTDVFPIYIGDDRTDEDAFKILRDKKQGLGILVSKYAKETNASYSLQEPDEVMVFLERLVEWKQSRCGA

SEQ ID NO: 70337 - protein, 234 aa, Arabidopsis thaliana
  peptide (1)..(234): Ceres Seq. ID no. 2704412
  misc_feature (1)..(215): Pfam Name: Trehalose-phosphatase Pfam Description: Trehalose-phosphatase
  misc_feature (1)..(234): Homolog of NCBI NO: 15227161 NR Description: putative trehalose-6-phosphate phosphatase;
  misc_feature (1)..(234): Homolog of NCBI NO: 30692524 NR Description: trehalose-6-phosphate phosphatase, putative thaliana] >gi|26452744|dbj|BAC43453.1| putative protein thaliana] >gi|28973301|gb|AAO63975.1| unknown protein
  misc_feature (1)..(229): Homolog of NCBI NO: 30683008 NR Description: trehalose-6-phosphate phosphatase, putative
  misc_feature (1)..(225): Homolog of NCBI NO: 15238360 NR Description: trehalose-6-phosphate phosphatase; protein id:
  misc_feature (1)..(216): Homolog of NCBI NO: 11282598 NR Description: trehalose-6-phosphate phosphatase-like protein -
  misc_feature (1)..(211): Homolog of NCBI NO: 7487212 NR Description: hypothetical protein T19P19.160 - Arabidopsis >gi|3080446|emb|CAA18763.1| puative protein [Arabidopsis >gi|7270961|emb|CAB80640.1| puative protein [Arabidopsis
  misc_feature (1)..(229): Homolog of NCBI NO: 18399940 NR Description: trehalose-phosphatase, putative; protein id:
  misc_feature (1)..(229): Homolog of NCBI NO: 21554408 NR Description: trehalose-phosphatase, putative [Arabidopsis
  misc_feature (1)..(229): Homolog of NCBI NO: 25354597 NR Description: probable trehalose-phosphatase [imported] -
  misc_feature (1)..(233): Homolog of NCBI NO: 15218205 NR Description: trehalose-6-phosphate phosphatase (AtTPPB); id: At1g78090.1, supported by cDNA: gi_2944179 [Arabidopsis
MSKKMRNTVRKLAKCFPTAIVSGRCREKVSSFVKLTELYYAGSHGMDIKGPEQGSKYKKENQSLLCQPATEFLPVINEVYKKLVENTQSIPGAKVENNKFCASVHFRCVEENKWSDLAHQVRSVLKNYPKLMLTQGRKVLEIRPIIKWDKGKALEFLLESLGYDNCTDVFPIYIGDDRTDEDAFKILRDKKQGLGILVSKYAKETNASYSLQEPDEVMVFLERLVEWKQSRCGA

SEQ ID NO: 70338 - DNA, 1818 bp, Arabidopsis thaliana
  misc_feature (1)..(1818): Ceres Seq. ID no. 2704510
  misc_feature: MA Experiment ID: 20000794 Result: Up-regulated in Transcription
  misc_feature: MA Experiment 20000794 PARAMETER Experiment Name: At_Petals_P Parameter: Age (day) Value: 23-25 days
  misc_feature: MA Experiment 20000794 PARAMETER Experiment Name: At_Petals_P Parameter: Plant Line Value: WS
  misc_feature: MA Experiment 20000794 PARAMETER Experiment Name: At_Petals_P Parameter: Tissue Value: Petals vs. Whole plant
  misc_feature: MA Experiment ID: 20001910 Result: Up-regulated in Transcription
  misc_feature: MA Experiment 20001910 PARAMETER Experiment Name: At_Drought_Reproduction_P Parameter: Age (day) Value: 37
  misc_feature: MA Experiment 20001910 PARAMETER Experiment Name: At_Drought_Reproduction_P Parameter: Organism Value: A. thaliana
  misc_feature: MA Experiment 20001910 PARAMETER Experiment Name: At_Drought_Reproduction_P Parameter: Plant Line Value: WS
  misc_feature: MA Experiment 20001910 PARAMETER Experiment Name: At_Drought_Reproduction_P Parameter: Timepoint (day) Value: 7
  misc_feature: MA Experiment 20001910 PARAMETER Experiment Name: At_Drought_Reproduction_P Parameter: Tissue Value: Flowers
  misc_feature: MA Experiment 20001910 PARAMETER Experiment Name: At_Drought_Reproduction_P Parameter: Treatment Value: Drought vs. No Drought
atgatgctactatttaaaccgtctttaactctaggaagaaggataaaaccacgtccatgccaaagcttctctgagtctcttctaatggatagtattgaagcagctgaaactctcacacgtaaatggatttctccagatctctctagttcatcttcttgctccctctcctcgattttctccaccgataatcgcgtagaaggacgaagattcgtcgaagttatcaacagcttacaatacgcaattcaaggagtggtcttggtgaatcctgaatcaccaaagcttactagagcgcataatcttgtgacaatcgctatgaaacagttggaaaaagagttttaccggattttaaaatcgaatcgacggaatcttgatccggaatccgtatccgttcgatcttccccatctttcaatgcaagaaacaaagtgtctatttattcccaagttccaaaatctgaagaagctgatgttatgacggatttgaaaatgatcgctgattgtatgatatcttcgggttacgaaaacgaatgtatcaagatttacaagaagattagaggatcaatcatggttgaagcgttgagtaacttagggtttgagaatctaagttttggcaagattcaaaaattggattgggatagtatggagaagaacatcaagaaatggttagaagctacgaaagtcctaatcacaaacttgttcgagggagaaagaatccttagcgatcacgttttctcgccttcagtctctgtcgcggagtcttgtttcacggagatcacgttagatagtgctttaacactctttatcttccccgtgagtgtagctcgatgtaagaaaaccgtcgagaaaatcttccttactctcgacatttaccaaacgatatcgcagcttatgcctcaaatcgaagagatttttagttatgattcgactactgcggttcgactacaagctgctgattctctcaacaatctcggtgaagagattaattcaatggtggctgaattcgaagcttcgattacgaaagaatcttcgaaaaccccaatccgtggaggcagtgttcatcagctcacaaggtacgtaatgaatttcatcgtttttctcgcggattaccacgaatgtctcgctggagttctcaccgaatcgacgttgccattaccggaagattactttgggaacaatgacgaagacaacaacgaaggagaaaccggatcttcttctactgtaaccacaagaattgcatggctaatcctcgtcttgctctgtaaaatcgacacgaaatctcgaatgtacaacgacatggctctttcatacctcttcctagccaacaatctgcattacgtgatctccaaggtacgtacatcgaatatgagagtcgtgcttggcgacgaatgggtaacgaatcacgaagggaaagttactcagtacctcgaaaaatacgagaaaattgcttggggagaagtgataacgtcacttttcgattccaacgaagaaatgctcgaagaacacgtggcgaaagagcggttgatgcggttcaacgaagggtttgaggaagcgtttcagaaacagagtgagtgggtcgtaccggattcgaaacttagagacgatttaaaagattccgtgacggagaagttaacaactgttacgacgacgttttatgaaaagtaccacgttgaaaattgggaggaagtcaaatttgcccctgaagatttggataattacctctctgaccttttcttaggtacgggacgatcttgtattatcgttccttcgcttaaacaatcggactcgggacgttcacttaaagattcagaatcaggacgttga

SEQ ID NO: 70339 - protein, 605 aa, Arabidopsis thaliana
  peptide (1)..(605): Ceres Seq. ID no. 2704511
  misc_feature (20)..(577): Pfam Name: Exo70 exocyst complex subunit Pfam Description: Exo70 exocyst complex subunit
  misc_feature (48)..(582): Homolog of NCBI NO: 25308573 NR Description: hypothetical protein [imported] - Arabidopsis >gi|8439895|gb|AAF75081.1|AC007583_17 It contains a interferon domain PF|00143. EST gb|N96176 comes from this gene. [Arabidopsis
  misc_feature (48)..(542): Homolog of NCBI NO: 22329407 NR Description: similar to leucine zipper-containing protein;
  misc_feature (2)..(582): Homolog of NCBI NO: 15226919 NR Description: hypothetical protein; protein id: At2g28650.1
  misc_feature (19)..(582): Homolog of NCBI NO: 15232697 NR Description: hypothetical protein; protein id: At3g09520.1 thaliana] >gi|6682261|gb|AAF23313.1|AC016661_38 hypothetical
  misc_feature (16)..(605): Homolog of NCBI NO: 23397263 NR Description: unknown protein [Arabidopsis thaliana]
  misc_feature (16)..(605): Homolog of NCBI NO: 15238510 NR Description: putative protein; protein id: At5g59730.1, by cDNA: gi_13430533, supported by cDNA: gi_14334437, supported cDNA: gi_15010739, supported by cDNA: gi_16974428, supported by
  misc_feature (21)..(603): Homolog of NCBI NO: 15225082 NR Description: hypothetical protein; protein id: At2g39380.1
  misc_feature (146)..(598): Homolog of NCBI NO: 11278980 NR Description: hypothetical protein T26I12.30 - Arabidopsis >gi|7019648|emb|CAB75749.1| putative protein [Arabidopsis
  misc_feature (146)..(598): Homolog of NCBI NO: 22331801 NR Description: putative protein; protein id: At3g55150.1, by cDNA: gi_18377617, supported by cDNA: gi_20465378 [Arabidopsis >gi|18377618|gb|AAL66959.1| unknown protein [Arabidopsis
  misc_feature (21)..(138): Homolog of NCBI NO: 11278980 NR Description: hypothetical protein T26I12.30 - Arabidopsis >gi|7019648|emb|CAB75749.1| putative protein [Arabidopsis
MMLLFKPSLTLGRRIKPRPCQSFSESLLMDSIEAAETLTRKWISPDLSSSSSCSLSSIFSTDNRVEGRRFVEVINSLQYAIQGVVLVNPESPKLTRAHNLVTIAMKQLEKEFYRILKSNRRNLDPESVSVRSSPSFNARNKVSIYSQVPKSEEADVMTDLKMIADCMISSGYENECIKIYKKIRGSIMVEALSNLGFENLSFGKIQKLDWDSMEKNIKKWLEATKVLITNLFEGERILSDHVFSPSVSVAESCFTEITLDSALTLFIFPVSVARCKKTVEKIFLTLDIYQTISQLMPQIEEIFSYDSTTAVRLQAADSLNNLGEEINSMVAEFEASITKESSKTPIRGGSVHQLTRYVMNFIVFLADYHECLAGVLTESTLPLPEDYFGNNDEDNNEGETGSSSTVTTRIAWLILVLLCKIDTKSRMYNDMALSYLFLANNLHYVISKVRTSNMRVVLGDEWVTNHEGKVTQYLEKYEKIAWGEVITSLFDSNEEMLEEHVAKERLMRFNEGFEEAFQKQSEWVVPDSKLRDDLKDSVTEKLTTVTTTFYEKYHVENWEEVKFAPEDLDNYLSDLFLGTGRSCIIVPSLKQSDSGRSLKDSESGR

SEQ ID NO: 70340 - protein, 604 aa, Arabidopsis thaliana
  peptide (1)..(604): Ceres Seq. ID no. 2704512
  misc_feature (19)..(576): Pfam Name: Exo70 exocyst complex subunit Pfam Description: Exo70 exocyst complex subunit
  misc_feature (47)..(581): Homolog of NCBI NO: 25308573 NR Description: hypothetical protein [imported] - Arabidopsis >gi|8439895|gb|AAF75081.1|AC007583_17 It contains a interferon domain PF|00143. EST gb|N96176 comes from this gene. [Arabidopsis
  misc_feature (47)..(541): Homolog of NCBI NO: 22329407 NR Description: similar to leucine zipper-containing protein;
  misc_feature (1)..(581): Homolog of NCBI NO: 15226919 NR Description: hypothetical protein; protein id: At2g28650.1
  misc_feature (18)..(581): Homolog of NCBI NO: 15232697 NR Description: hypothetical protein; protein id: At3g09520.1 thaliana] >gi|6682261|gb|AAF23313.1|AC016661_38 hypothetical
  misc_feature (15)..(604): Homolog of NCBI NO: 23397263 NR Description: unknown protein [Arabidopsis thaliana]
  misc_feature (15)..(604): Homolog of NCBI NO: 15238510 NR Description: putative protein; protein id: At5g59730.1, by cDNA: gi_13430533, supported by cDNA: gi_14334437, supported cDNA: gi_15010739, supported by cDNA: gi_16974428, supported by
  misc_feature (20)..(602): Homolog of NCBI NO: 15225082 NR Description: hypothetical protein; protein id: At2g39380.1
  misc_feature (145)..(597): Homolog of NCBI NO: 11278980 NR Description: hypothetical protein T26I12.30 - Arabidopsis >gi|7019648|emb|CAB75749.1| putative protein [Arabidopsis
  misc_feature (145)..(597): Homolog of NCBI NO: 22331801 NR Description: putative protein; protein id: At3g55150.1, by cDNA: gi_18377617, supported by cDNA: gi_20465378 [Arabidopsis >gi|18377618|gb|AAL66959.1| unknown protein [Arabidopsis
  misc_feature (20)..(137): Homolog of NCBI NO: 11278980 NR Description: hypothetical protein T26I12.30 - Arabidopsis >gi|7019648|emb|CAB75749.1| putative protein [Arabidopsis
MLLFKPSLTLGRRIKPRPCQSFSESLLMDSIEAAETLTRKWISPDLSSSSSCSLSSIFSTDNRVEGRRFVEVINSLQYAIQGVVLVNPESPKLTRAHNLVTIAMKQLEKEFYRILKSNRRNLDPESVSVRSSPSFNARNKVSIYSQVPKSEEADVMTDLKMIADCMISSGYENECIKIYKKIRGSIMVEALSNLGFENLSFGKIQKLDWDSMEKNIKKWLEATKVLITNLFEGERILSDHVFSPSVSVAESCFTEITLDSALTLFIFPVSVARCKKTVEKIFLTLDIYQTISQLMPQIEEIFSYDSTTAVRLQAADSLNNLGEEINSMVAEFEASITKESSKTPIRGGSVHQLTRYVMNFIVFLADYHECLAGVLTESTLPLPEDYFGNNDEDNNEGETGSSSTVTTRIAWLILVLLCKIDTKSRMYNDMALSYLFLANNLHYVISKVRTSNMRVVLGDEWVTNHEGKVTQYLEKYEKIAWGEVITSLFDSNEEMLEEHVAKERLMRFNEGFEEAFQKQSEWVVPDSKLRDDLKDSVTEKLTTVTTTFYEKYHVENWEEVKFAPEDLDNYLSDLFLGTGRSCIIVPSLKQSDSGRSLKDSESGR

SEQ ID NO: 70341 - protein, 577 aa, Arabidopsis thaliana
  peptide (1)..(577): Ceres Seq. ID no. 2704513
  misc_feature (1)..(549): Pfam Name: Exo70 exocyst complex subunit Pfam Description: Exo70 exocyst complex subunit
  misc_feature (20)..(554): Homolog of NCBI NO: 25308573 NR Description: hypothetical protein [imported] - Arabidopsis >gi|8439895|gb|AAF75081.1|AC007583_17 It contains a interferon domain PF|00143. EST gb|N96176 comes from this gene. [Arabidopsis
  misc_feature (20)..(514): Homolog of NCBI NO: 22329407 NR Description: similar to leucine zipper-containing protein;
  misc_feature (1)..(554): Homolog of NCBI NO: 15226919 NR Description: hypothetical protein; protein id: At2g28650.1
  misc_feature (1)..(554): Homolog of NCBI NO: 15232697 NR Description: hypothetical protein; protein id: At3g09520.1 thaliana] >gi|6682261|gb|AAF23313.1|AC016661_38 hypothetical
  misc_feature (1)..(577): Homolog of NCBI NO: 23397263 NR Description: unknown protein [Arabidopsis thaliana]
  misc_feature (1)..(577): Homolog of NCBI NO: 15238510 NR Description: putative protein; protein id: At5g59730.1, by cDNA: gi_13430533, supported by cDNA: gi_14334437, supported cDNA: gi_15010739, supported by cDNA: gi_16974428, supported by
  misc_feature (1)..(575): Homolog of NCBI NO: 15225082 NR Description: hypothetical protein; protein id: At2g39380.1
  misc_feature (118)..(570): Homolog of NCBI NO: 11278980 NR Description: hypothetical protein T26I12.30 - Arabidopsis >gi|7019648|emb|CAB75749.1| putative protein [Arabidopsis
  misc_feature (118)..(570): Homolog of NCBI NO: 22331801 NR Description: putative protein; protein id: At3g55150.1, by cDNA: gi_18377617, supported by cDNA: gi_20465378 [Arabidopsis >gi|18377618|gb|AAL66959.1| unknown protein [Arabidopsis
  misc_feature (1)..(110): Homolog of NCBI NO: 11278980 NR Description: hypothetical protein T26I12.30 - Arabidopsis >gi|7019648|emb|CAB75749.1| putative protein [Arabidopsis
MDSIEAAETLTRKWISPDLSSSSSCSLSSIFSTDNRVEGRRFVEVINSLQYAIQGVVLVNPESPKLTRAHNLVTIAMKQLEKEFYRILKSNRRNLDPESVSVRSSPSFNARNKVSIYSQVPKSEEADVMTDLKMIADCMISSGYENECIKIYKKIRGSIMVEALSNLGFENLSFGKIQKLDWDSMEKNIKKWLEATKVLITNLFEGERILSDHVFSPSVSVAESCFTEITLDSALTLFIFPVSVARCKKTVEKIFLTLDIYQTISQLMPQIEEIFSYDSTTAVRLQAADSLNNLGEEINSMVAEFEASITKESSKTPIRGGSVHQLTRYVMNFIVFLADYHECLAGVLTESTLPLPEDYFGNNDEDNNEGETGSSSTVTTRIAWLILVLLCKIDTKSRMYNDMALSYLFLANNLHYVISKVRTSNMRVVLGDEWVTNHEGKVTQYLEKYEKIAWGEVITSLFDSNEEMLEEHVAKERLMRFNEGFEEAFQKQSEWVVPDSKLRDDLKDSVTEKLTTVTTTFYEKYHVENWEEVKFAPEDLDNYLSDLFLGTGRSCIIVPSLKQSDSGRSLKDSESGR

SEQ ID NO: 70342 - DNA, 3231 bp, Arabidopsis thaliana
  misc_feature (1)..(3231): Ceres Seq. ID no. 2704537
  misc_feature: MA Experiment ID: 20000227 Result: Up-regulated in Transcription
  misc_feature: MA Experiment 20000227 PARAMETER Experiment Name: At_Root-Tips-vs-Tops_P Parameter: Tissue Value: Root Tips vs. Root Tops
  misc_feature: MA Experiment ID: 20000264 Result: Up-regulated in Transcription
  misc_feature: MA Experiment 20000264 PARAMETER Experiment Name: At_Open_Flower_P Parameter: Age (day) Value: 21
  misc_feature: MA Experiment 20000264 PARAMETER Experiment Name: At_Open_Flower_P Parameter: Plant Line Value: WS
  misc_feature: MA Experiment 20000264 PARAMETER Experiment Name: At_Open_Flower_P Parameter: Tissue Value: Open Flower vs. Whole Plant
  misc_feature: MA Experiment ID: 20000265 Result: Up-regulated in Transcription
  misc_feature: MA Experiment 20000265 PARAMETER Experiment Name: At_Open_Flower_P Parameter: Age (day) Value: 21
  misc_feature: MA Experiment 20000265 PARAMETER Experiment Name: At_Open_Flower_P Parameter: Plant Line Value: WS
  misc_feature: MA Experiment 20000265 PARAMETER Experiment Name: At_Open_Flower_P Parameter: Tissue Value: Closed Flower vs. Whole Plant
  misc_feature: MA Experiment ID: 20000286 Result: Up-regulated in Transcription
  misc_feature: MA Experiment 20000286 PARAMETER Experiment Name: At_Open_Flower_P Parameter: Age (day) Value: 21
  misc_feature: MA Experiment 20000286 PARAMETER Experiment Name: At_Open_Flower_P Parameter: Plant Line Value: WS
  misc_feature: MA Experiment 20000286 PARAMETER Experiment Name: At_Open_Flower_P Parameter: Tissue Value: Half Open vs. Whole Plant
  misc_feature: MA Experiment ID: 20000437 Result: Down-regulated in Transcription
  misc_feature: MA Experiment 20000437 PARAMETER Experiment Name: At_Drought_P Parameter: Age (day) Value: 8
  misc_feature: MA Experiment 20000437 PARAMETER Experiment Name: At_Drought_P Parameter: Organism Value: A. thaliana
  misc_feature: MA Experiment 20000437 PARAMETER Experiment Name: At_Drought_P Parameter: Plant Line Value: WS
  misc_feature: MA Experiment 20000437 PARAMETER Experiment Name: At_Drought_P Parameter: Timepoint (hr) Value: 24
  misc_feature: MA Experiment 20000437 PARAMETER Experiment Name: At_Drought_P Parameter: Tissue Value: Whole Plant
  misc_feature: MA Experiment 20000437 PARAMETER Experiment Name: At_Drought_P Parameter: Treatment Value: Drought vs. No Drought
  misc_feature: MA Experiment ID: 20000495 Result: Up-regulated in Transcription
  misc_feature: MA Experiment 20000495 PARAMETER Experiment Name: At_Guard_Cells_P Parameter: Harvest Date Value: 8/2/2002
  misc_feature: MA Experiment 20000495 PARAMETER Experiment Name: At_Guard_Cells_P Parameter: Organism Value: A. thaliana
  misc_feature: MA Experiment 20000495 PARAMETER Experiment Name: At_Guard_Cells_P Parameter: Tissue Value: Guard Cells vs. Leaves
  misc_feature: MA Experiment ID: 20001450 Result: Down-regulated in Transcription
  misc_feature: MA Experiment 20001450 PARAMETER Experiment Name: At_Far-red-induction_P Parameter: Age (day) Value: 7
  misc_feature: MA Experiment 20001450 PARAMETER Experiment Name: At_Far-red-induction_P Parameter: Light Value: Far-red vs. White
  misc_feature: MA Experiment 20001450 PARAMETER Experiment Name: At_Far-red-induction_P Parameter: Organism Value: A. thaliana
  misc_feature: MA Experiment 20001450 PARAMETER Experiment Name: At_Far-red-induction_P Parameter: Plant Line Value: Columbia
  misc_feature: MA Experiment 20001450 PARAMETER Experiment Name: At_Far-red-induction_P Parameter: Timepoint (hr) Value: 8
  misc_feature: MA Experiment 20001450 PARAMETER Experiment Name: At_Far-red-induction_P Parameter: Tissue Value: Whole Plant
  misc_feature: MA Experiment ID: 20001451 Result: Down-regulated in Transcription
  misc_feature: MA Experiment 20001451 PARAMETER Experiment Name: At_Far-red-induction_P Parameter: Age (day) Value: 7
  misc_feature: MA Experiment 20001451 PARAMETER Experiment Name: At_Far-red-induction_P Parameter: Light Value: Far-red vs. White
  misc_feature: MA Experiment 20001451 PARAMETER Experiment Name: At_Far-red-induction_P Parameter: Organism Value: A. thaliana
  misc_feature: MA Experiment 20001451 PARAMETER Experiment Name: At_Far-red-induction_P Parameter: Plant Line Value: Columbia
  misc_feature: MA Experiment 20001451 PARAMETER Experiment Name: At_Far-red-induction_P Parameter: Timepoint (hr) Value: 24
  misc_feature: MA Experiment 20001451 PARAMETER Experiment Name: At_Far-red-induction_P Parameter: Tissue Value: Whole Plant
atggattctaacaattcgaaaaaaggaagttcggtgaaatctccatgtcaaactccacgttcgactgagaagtcaaatcgagattttcgagttgactcaaactcaaactcgaatccagttagcaagaatgagaaagaaaagggtgtgaatatacaagttattgttcgttgcagaccgtttaattcagaggagacgaggttacaaacaccggctgttcttacctgtaatgaccggaaaaaggaagtagcggtagcacaaaatatagctgggaagcagattgataaaacgtttttgtttgacaaggtttttggcccaacatcccagcaaaaggatctgtatcatcaagcagtttctccaattgtctttgaggttcttgatgggtataactgcaccatctttgcatatgggcaaacaggaactggtaagacatacacaatggaaggaggagcaagaaaaaagaatggtgaaattccgagtgatgcaggtgttatccctagagcagttaaacagatatttgatatactggaagcacaaagtgctgctgaatacagtttgaaagtttcatttcttgagctctacaatgaagaactgacagaccttttagctccggaagaaacaaaattcgctgatgataaatcaaagaaacctctggctcttatggaagatggcaaaggtggtgtttttgtccgcggattggaagaagagattgtgtctactgctgatgaaatttacaaagtcttggagaaaggttcagctaagagacgcacagcagagactcttctcaacaaacaaagtagtagatctcattcaatattttcggttacaatccatattaaggaatgtactccagaaggggaagagattgtcaaaagtggaaagctgaatctagttgatcttgctggttcagagaatatttcacggtctggtgctcgagagggtagagccagggaagctggtgagatcaacaaaagtttgctcacacttggacgtgtcataaatgctttggttgaacactctggtcacattccatatagagaaagcaagttgacaagattattgagagactctttgggaggaaaaacaaaaacatgtgtaattgctacagtttcaccctctgttcattgcctggaagaaacactcagcacacttgattatgcacaccgtgcgaaacacatcaaaaataaaccagaggttaaccagaagatgatgaaatcagctattatgaaagatttgtattctgaaattgaacgtctgaagcaagaggtctatgctgctagggagaaaaatggaatttatattccaaaggagaggtatactcaagaagaagctgagaaaaaggctatggctgataagatagagcaaatggaagtagagggtgaagcaaaagacaagcaaattattgatcttcaagagctgtacaactcggaacagcttgtaactgctggattgagagaaaagcttgacaagacagagaaaaagctctatgaaactgaacaagcattgctagatctcgaagagaaacatagacaagcagttgcaacaattaaagaaaaggagtacttaatatccaatctccttaaatctgagaaaacacttgttgaccgggctgtcgagcttcaggcagaattggcaaatgcagcatccgatgtttcaaacttgttcgccaaaattggtaggaaggacaagattgaagacagtaatagatcgctcatccaagatttccagtcacaattgctacgacaacttgaactcttgaacaacagtgttgccggttcagtaagccagcaggaaaaacaattgcaagacatggaaaatgttatggtttctttcgtatctgcaaagacaaaggctactgaaacactacgaggaagtttagcacagttgaaggaaaaatacaatacaggcatcaagtctttagatgatatagctgggaatctggataaagatagccaatcaactttgaatgacttgaactcggaagtgacaaaacattcttgtgcactggaagatatgtttaaaggatttacatcagaagcttacacgctacttgaagggcttcaaggtagcctccacaatcaagaggagaagctctctgcattcacacagcaacagagagacttgcattcccgatcaatggattctgctaagtccgtctccacggtgatgttagacttcttcaagactctagacacacatgccaataagctaacaaagctagcagaagatgctcaaaatgtcaacgagcagaaattatctgcattcactaagaaattcgaggaatccattgcaaatgaagaaaaacaaatgctcgaaaaagtggcggaattactagcgagttcaaacgctaggaagaaagaattggttcagatagctgtgcaagatatacgccaaggatcatcttcccaaacaggtgcattgcagcaagaaatgtctgcaatgcaagattctgcttcttccattaaagtccagtggaactctcacatagtccaagcggaatctcatcatctcgataacatatccgcagttgaggttgcaaaggaagatatgcagaaaatgcatctaaaatgtctggagaattcaaaaaccggaacccaacaatggaagactgctcaagaatcattagttgatctcgaaaaaaggaatgttgcaaccgcggattctattattcggggagccatagaaaacaatgagaaactacgaacgcagttttcttccgcggtctcaaccactttaagcgatgtcgattcttcaaacagagaaatcatctcatccattgacaactcgttacaactcgataaagacgcatcaacggatgttaattccacaatcgttccttgctctgaaaacttgaaagaactaagaacacaccatgatgacaacgttgtcgaaatcaaacagaacacaggaaaatgtcttggtcacgagtacaaggtaacacgatttgatccttttttatataatcatcatatatacatgattgaattggacaaaattgttaaccgtaaattaaattccctgaaaacatcaacacaggtggatgaagcaacaagctcaacaccgaggaagagagagtacaacattccaactgttggatcaatagaagaacttaaaacgccgtcgtttgaggaattgttgaaggcgtttcacgattgtaagtcaccaaaacaaatgcagaacggagaagctaaacacgttagtaacggtcgacctccgttaacggccattaactga

SEQ ID NO: 70343 - protein, 1076 aa, Arabidopsis thaliana
  peptide (1)..(1076): Ceres Seq. ID no. 2704538
  misc_feature (435)..(966): Pfam Name: Myosin tail Pfam Description: Myosin tail
  misc_feature (43)..(966): Homolog of NCBI NO: 11132775 NR Description: 125 kDa kinesin-related protein
  misc_feature (41)..(957): Homolog of NCBI NO: 15208453 NR Description: kinesin heavy chain [Zea mays]
  misc_feature (41)..(965): Homolog of NCBI NO: 15227596 NR Description: kinesin-related protein; protein id: At2g36200.1
  misc_feature (7)..(978): Homolog of NCBI NO: 30687132 NR Description: kinesin-related protein [Arabidopsis thaliana]
  misc_feature (277)..(977): Homolog of NCBI NO: 15208459 NR Description: kinesin heavy chain [Zea mays]
  misc_feature (41)..(270): Homolog of NCBI NO: 15208459 NR Description: kinesin heavy chain [Zea mays]
  misc_feature (7)..(1020): Homolog of NCBI NO: 25408550 NR Description: probable kinesin heavy chain [imported] - thaliana >gi|4056495|gb|AAC98061.1| putative kinesin heavy chain
  misc_feature (40)..(951): Homolog of NCBI NO: 10567777 NR Description: KRP170 [Strongylocentrotus purpuratus]
  misc_feature (42)..(951): Homolog of NCBI NO: 12055369 NR Description: kinesin-like boursin [Paracentrotus lividus]
  misc_feature (33)..(951): Homolog of NCBI NO: 2497521 NR Description: Kinesin-related motor protein Eg5 2
MDSNNSKKGSSVKSPCQTPRSTEKSNRDFRVDSNSNSNPVSKNEKEKGVNIQVIVRCRPFNSEETRLQTPAVLTCNDRKKEVAVAQNIAGKQIDKTFLFDKVFGPTSQQKDLYHQAVSPIVFEVLDGYNCTIFAYGQTGTGKTYTMEGGARKKNGEIPSDAGVIPRAVKQIFDILEAQSAAEYSLKVSFLELYNEELTDLLAPEETKFADDKSKKPLALMEDGKGGVFVRGLEEEIVSTADEIYKVLEKGSAKRRTAETLLNKQSSRSHSIFSVTIHIKECTPEGEEIVKSGKLNLVDLAGSENISRSGAREGRAREAGEINKSLLTLGRVINALVEHSGHIPYRESKLTRLLRDSLGGKTKTCVIATVSPSVHCLEETLSTLDYAHRAKHIKNKPEVNQKMMKSAIMKDLYSEIERLKQEVYAAREKNGIYIPKERYTQEEAEKKAMADKIEQMEVEGEAKDKQIIDLQELYNSEQLVTAGLREKLDKTEKKLYETEQALLDLEEKHRQAVATIKEKEYLISNLLKSEKTLVDRAVELQAELANAASDVSNLFAKIGRKDKIEDSNRSLIQDFQSQLLRQLELLNNSVAGSVSQQEKQLQDMENVMVSFVSAKTKATETLRGSLAQLKEKYNTGIKSLDDIAGNLDKDSQSTLNDLNSEVTKHSCALEDMFKGFTSEAYTLLEGLQGSLHNQEEKLSAFTQQQRDLHSRSMDSAKSVSTVMLDFFKTLDTHANKLTKLAEDAQNVNEQKLSAFTKKFEESIANEEKQMLEKVAELLASSNARKKELVQIAVQDIRQGSSSQTGALQQEMSAMQDSASSIKVQWNSHIVQAESHHLDNISAVEVAKEDMQKMHLKCLENSKTGTQQWKTAQESLVDLEKRNVATADSIIRGAIENNEKLRTQFSSAVSTTLSDVDSSNREIISSIDNSLQLDKDASTDVNSTIVPCSENLKELRTHHDDNVVEIKQNTGKCLGHEYKVTRFDPFLYNHHIYMIELDKIVNRKLNSLKTSTQVDEATSSTPRKREYNIPTVGSIEELKTPSFEELLKAFHDCKSPKQMQNGEAKHVSNGRPPLTAIN

SEQ ID NO: 70344 - protein, 931 aa, Arabidopsis thaliana
  peptide (1)..(931): Ceres Seq. ID no. 2704539
  misc_feature (290)..(821): Pfam Name: Myosin tail Pfam Description: Myosin tail
  misc_feature (1)..(821): Homolog of NCBI NO: 11132775 NR Description: 125 kDa kinesin-related protein
  misc_feature (1)..(812): Homolog of NCBI NO: 15208453 NR Description: kinesin heavy chain [Zea mays]
  misc_feature (1)..(820): Homolog of NCBI NO: 15227596 NR Description: kinesin-related protein; protein id: At2g36200.1
  misc_feature (1)..(833): Homolog of NCBI NO: 30687132 NR Description: kinesin-related protein [Arabidopsis thaliana]
  misc_feature (132)..(832): Homolog of NCBI NO: 15208459 NR Description: kinesin heavy chain [Zea mays]
  misc_feature (1)..(125): Homolog of NCBI NO: 15208459 NR Description: kinesin heavy chain [Zea mays]
  misc_feature (1)..(875): Homolog of NCBI NO: 25408550 NR Description: probable kinesin heavy chain [imported] - thaliana >gi|4056495|gb|AAC98061.1| putative kinesin heavy chain
  misc_feature (1)..(806): Homolog of NCBI NO: 10567777 NR Description: KRP170 [Strongylocentrotus purpuratus]
  misc_feature (1)..(806): Homolog of NCBI NO: 12055369 NR Description: kinesin-like boursin [Paracentrotus lividus]
  misc_feature (1)..(806): Homolog of NCBI NO: 2497521 NR Description: Kinesin-related motor protein Eg5 2
MEGGARKKNGEIPSDAGVIPRAVKQIFDILEAQSAAEYSLKVSFLELYNEELTDLLAPEETKFADDKSKKPLALMEDGKGGVFVRGLEEEIVSTADEIYKVLEKGSAKRRTAETLLNKQSSRSHSIFSVTIHIKECTPEGEEIVKSGKLNLVDLAGSENISRSGAREGRAREAGEINKSLLTLGRVINALVEHSGHIPYRESKLTRLLRDSLGGKTKTCVIATVSPSVHCLEETLSTLDYAHRAKHIKNKPEVNQKMMKSAIMKDLYSEIERLKQEVYAAREKNGIYIPKERYTQEEAEKKAMADKIEQMEVEGEAKDKQIIDLQELYNSEQLVTAGLREKLDKTEKKLYETEQALLDLEEKHRQAVATIKEKEYLISNLLKSEKTLVDRAVELQAELANAASDVSNLFAKIGRKDKIEDSNRSLIQDFQSQLLRQLELLNNSVAGSVSQQEKQLQDMENVMVSFVSAKTKATETLRGSLAQLKEKYNTGIKSLDDIAGNLDKDSQSTLNDLNSEVTKHSCALEDMFKGFTSEAYTLLEGLQGSLHNQEEKLSAFTQQQRDLHSRSMDSAKSVSTVMLDFFKTLDTHANKLTKLAEDAQNVNEQKLSAFTKKFEESIANEEKQMLEKVAELLASSNARKKELVQIAVQDIRQGSSSQTGALQQEMSAMQDSASSIKVQWNSHIVQAESHHLDNISAVEVAKEDMQKMHLKCLENSKTGTQQWKTAQESLVDLEKRNVATADSIIRGAIENNEKLRTQFSSAVSTTLSDVDSSNREIISSIDNSLQLDKDASTDVNSTIVPCSENLKELRTHHDDNVVEIKQNTGKCLGHEYKVTRFDPFLYNHHIYMIELDKIVNRKLNSLKTSTQVDEATSSTPRKREYNIPTVGSIEELKTPSFEELLKAFHDCKSPKQMQNGEAKHVSNGRPPLTAIN

SEQ ID NO: 70345 - protein, 857 aa, Arabidopsis thaliana
  peptide (1)..(857): Ceres Seq. ID no. 2704540
  misc_feature (216)..(747): Pfam Name: Myosin tail Pfam Description: Myosin tail
  misc_feature (1)..(747): Homolog of NCBI NO: 11132775 NR Description: 125 kDa kinesin-related protein
  misc_feature (1)..(738): Homolog of NCBI NO: 15208453 NR Description: kinesin heavy chain [Zea mays]
  misc_feature (1)..(746): Homolog of NCBI NO: 15227596 NR Description: kinesin-related protein; protein id: At2g36200.1
  misc_feature (1)..(759): Homolog of NCBI NO: 30687132 NR Description: kinesin-related protein [Arabidopsis thaliana]
  misc_feature (58)..(758): Homolog of NCBI NO: 15208459 NR Description: kinesin heavy chain [Zea mays]
  misc_feature (1)..(51): Homolog of NCBI NO: 15208459 NR Description: kinesin heavy chain [Zea mays]
  misc_feature (1)..(801): Homolog of NCBI NO: 25408550 NR Description: probable kinesin heavy chain [imported] - thaliana >gi|4056495|gb|AAC98061.1| putative kinesin heavy chain
  misc_feature (1)..(732): Homolog of NCBI NO: 10567777 NR Description: KRP170 [Strongylocentrotus purpuratus]
  misc_feature (1)..(732): Homolog of NCBI NO: 12055369 NR Description: kinesin-like boursin [Paracentrotus lividus]
  misc_feature (1)..(732): Homolog of NCBI NO: 2497521 NR Description: Kinesin-related motor protein Eg5 2
MEDGKGGVFVRGLEEEIVSTADEIYKVLEKGSAKRRTAETLLNKQSSRSHSIFSVTIHIKECTPEGEEIVKSGKLNLVDLAGSENISRSGAREGRAREAGEINKSLLTLGRVINALVEHSGHIPYRESKLTRLLRDSLGGKTKTCVIATVSPSVHCLEETLSTLDYAHRAKHIKNKPEVNQKMMKSAIMKDLYSEIERLKQEVYAAREKNGIYIPKERYTQEEAEKKAMADKIEQMEVEGEAKDKQIIDLQELYNSEQLVTAGLREKLDKTEKKLYETEQALLDLEEKHRQAVATIKEKEYLISNLLKSEKTLVDRAVELQAELANAASDVSNLFAKIGRKDKIEDSNRSLIQDFQSQLLRQLELLNNSVAGSVSQQEKQLQDMENVMVSFVSAKTKATETLRGSLAQLKEKYNTGIKSLDDIAGNLDKDSQSTLNDLNSEVTKHSCALEDMFKGFTSEAYTLLEGLQGSLHNQEEKLSAFTQQQRDLHSRSMDSAKSVSTVMLDFFKTLDTHANKLTKLAEDAQNVNEQKLSAFTKKFEESIANEEKQMLEKVAELLASSNARKKELVQIAVQDIRQGSSSQTGALQQEMSAMQDSASSIKVQWNSHIVQAESHHLDNISAVEVAKEDMQKMHLKCLENSKTGTQQWKTAQESLVDLEKRNVATADSIIRGAIENNEKLRTQFSSAVSTTLSDVDSSNREIISSIDNSLQLDKDASTDVNSTIVPCSENLKELRTHHDDNVVEIKQNTGKCLGHEYKVTRFDPFLYNHHIYMIELDKIVNRKLNSLKTSTQVDEATSSTPRKREYNIPTVGSIEELKTPSFEELLKAFHDCKSPKQMQNGEAKHVSNGRPPLTAIN

SEQ ID NO: 70346 - DNA, 531 bp, Arabidopsis thaliana
  misc_feature (1)..(531): Ceres Seq. ID no. 2704770
  misc_feature: MA Experiment ID: 20000314 Result: Up-regulated in Transcription
  misc_feature: MA Experiment 20000314 PARAMETER Experiment Name: At_14day_Shoots-Roots_Sub_P Parameter: Age (day) Value: 14
  misc_feature: MA Experiment 20000314 PARAMETER Experiment Name: At_14day_Shoots-Roots_Sub_P Parameter: Organism Value: A. thaliana
  misc_feature: MA Experiment 20000314 PARAMETER Experiment Name: At_14day_Shoots-Roots_Sub_P Parameter: Plant Line Value: WS
  misc_feature: MA Experiment 20000314 PARAMETER Experiment Name: At_14day_Shoots-Roots_Sub_P Parameter: Tissue Value: Roots vs. Whole Plant
atgaatgaaatgtcgttctttggttatagtttcatcgtagtagcattattcttcgatttaactcaagcctatcgtcacactcccgctcaaccgccaaaagcaaacgcaaacggtgatgtcaaaccgcaagaaacgctcgtggttcacaacaaggcccgagccatggtcggagtcggaccaatggtgtggaacgaaactcttgcgacctatgcacagagctacgcacatgaacgagccagagactgtgccatgaagcattccttgggaccattcggcgagaatctagccgcgggttggggaacgatgagcggtccggtagcaactgagtattggatgacggagaaggaaaattacgattatgatagtaacacgtgtggtggtgatggtgtgtgtggacactacactcagatcgtgtggcgtgactcggttcgacttggttgtgcctccgtgagatgtaagaatgatgagtatatttgggtgatttgtagctatgatcctccggggaattacatcggtcaacgtccatattag

SEQ ID NO: 70347 - protein, 176 aa, Arabidopsis thaliana
  peptide (1)..(176): Ceres Seq. ID no. 2704771
  misc_feature (46)..(163): Pfam Name: SCP-like extracellular protein Pfam Description: SCP-like extracellular protein
  misc_feature (1)..(176): Homolog of NCBI NO: 15225280 NR Description: pathogenesis-related protein (PR-1); protein id:
  misc_feature (8)..(176): Homolog of NCBI NO: 282959 NR Description: pathogenesis-related protein 1b - common tobacco
  misc_feature (42)..(176): Homolog of NCBI NO: 17221641 NR Description: PR-1 [Solanum torvum]
  misc_feature (42)..(176): Homolog of NCBI NO: 15235056 NR Description: pathogenesis-related protein 1 precursor, 19.3K; id: At4g33720.1, supported by cDNA: 5743., supported by cDNA:
  misc_feature (42)..(175): Homolog of NCBI NO: 1228950 NR Description: pathogenesis-related protein 1 [Arabidopsis
  misc_feature (4)..(176): Homolog of NCBI NO: 15225974 NR Description: pathogenesis-related PR-1-like protein; protein At2g14610.1, supported by cDNA: gi_166860, supported by cDNA:
  misc_feature (42)..(176): Homolog of NCBI NO: 130846 NR Description: Basic form of pathogenesis-related protein 1
  misc_feature (43)..(176): Homolog of NCBI NO: 15225965 NR Description: putative pathogenesis related-1 (PR1) protein; id: At2g14580.1, supported by cDNA: gi_17529119 [Arabidopsis
  misc_feature (42)..(176): Homolog of NCBI NO: 13560653 NR Description: pathogenesis-related protein PR-1 precursor
  misc_feature (42)..(176): Homolog of NCBI NO: 33413141 NR Description: putative pathogenesis related protein 1 precursor
MNEMSFFGYSFIVVALFFDLTQAYRHTPAQPPKANANGDVKPQETLVVHNKARAMVGVGPMVWNETLATYAQSYAHERARDCAMKHSLGPFGENLAAGWGTMSGPVATEYWMTEKENYDYDSNTCGGDGVCGHYTQIVWRDSVRLGCASVRCKNDEYIWVICSYDPPGNYIGQRPY

SEQ ID NO: 70348 - protein, 173 aa, Arabidopsis thaliana
  peptide (1)..(173): Ceres Seq. ID no. 2704772
  misc_feature (43)..(160): Pfam Name: SCP-like extracellular protein Pfam Description: SCP-like extracellular protein
  misc_feature (1)..(173): Homolog of NCBI NO: 15225280 NR Description: pathogenesis-related protein (PR-1); protein id:
  misc_feature (5)..(173): Homolog of NCBI NO: 282959 NR Description: pathogenesis-related protein 1b - common tobacco
  misc_feature (39)..(173): Homolog of NCBI NO: 17221641 NR Description: PR-1 [Solanum torvum]
  misc_feature (39)..(173): Homolog of NCBI NO: 15235056 NR Description: pathogenesis-related protein 1 precursor, 19.3K; id: At4g33720.1, supported by cDNA: 5743., supported by cDNA:
  misc_feature (39)..(172): Homolog of NCBI NO: 1228950 NR Description: pathogenesis-related protein 1 [Arabidopsis
  misc_feature (1)..(173): Homolog of NCBI NO: 15225974 NR Description: pathogenesis-related PR-1-like protein; protein At2g14610.1, supported by cDNA: gi_166860, supported by cDNA:
  misc_feature (39)..(173): Homolog of NCBI NO: 130846 NR Description: Basic form of pathogenesis-related protein 1
  misc_feature (40)..(173): Homolog of NCBI NO: 15225965 NR Description: putative pathogenesis related-1 (PR1) protein; id: At2g14580.1, supported by cDNA: gi_17529119 [Arabidopsis
  misc_feature (39)..(173): Homolog of NCBI NO: 13560653 NR Description: pathogenesis-related protein PR-1 precursor
  misc_feature (39)..(173): Homolog of NCBI NO: 33413141 NR Description: putative pathogenesis related protein 1 precursor
MSFFGYSFIVVALFFDLTQAYRHTPAQPPKANANGDVKPQETLVVHNKARAMVGVGPMVWNETLATYAQSYAHERARDCAMKHSLGPFGENLAAGWGTMSGPVATEYWMTEKENYDYDSNTCGGDGVCGHYTQIVWRDSVRLGCASVRCKNDEYIWVICSYDPPGNYIGQRPY

SEQ ID NO: 70349 - protein, 122 aa, Arabidopsis thaliana
  peptide (1)..(122): Ceres Seq. ID no. 2704773
  misc_feature (1)..(109): Pfam Name: SCP-like extracellular protein Pfam Description: SCP-like extracellular protein
  misc_feature (1)..(122): Homolog of NCBI NO: 15225280 NR Description: pathogenesis-related protein (PR-1); protein id:
  misc_feature (1)..(122): Homolog of NCBI NO: 282959 NR Description: pathogenesis-related protein 1b - common tobacco
  misc_feature (1)..(122): Homolog of NCBI NO: 17221641 NR Description: PR-1 [Solanum torvum]
  misc_feature (1)..(122): Homolog of NCBI NO: 15235056 NR Description: pathogenesis-related protein 1 precursor, 19.3K; id: At4g33720.1, supported by cDNA: 5743., supported by cDNA:
  misc_feature (1)..(121): Homolog of NCBI NO: 1228950 NR Description: pathogenesis-related protein 1 [Arabidopsis
  misc_feature (1)..(122): Homolog of NCBI NO: 15225974 NR Description: pathogenesis-related PR-1-like protein; protein At2g14610.1, supported by cDNA: gi_166860, supported by cDNA:
  misc_feature (1)..(122): Homolog of NCBI NO: 130846 NR Description: Basic form of pathogenesis-related protein 1
  misc_feature (1)..(122): Homolog of NCBI NO: 15225965 NR Description: putative pathogenesis related-1 (PR1) protein; id: At2g14580.1, supported by cDNA: gi_17529119 [Arabidopsis
  misc_feature (1)..(122): Homolog of NCBI NO: 13560653 NR Description: pathogenesis-related protein PR-1 precursor
  misc_feature (1)..(122): Homolog of NCBI NO: 33413141 NR Description: putative pathogenesis related protein 1 precursor
MVGVGPMVWNETLATYAQSYAHERARDCAMKHSLGPFGENLAAGWGTMSGPVATEYWMTEKENYDYDSNTCGGDGVCGHYTQIVWRDSVRLGCASVRCKNDEYIWVICSYDPPGNYIGQRPY

SEQ ID NO: 70350 - DNA, 1008 bp, Arabidopsis thaliana
  misc_feature (1)..(1008): Ceres Seq. ID no. 2704836
  misc_feature: MA Experiment ID: 20000179 Result: Down-regulated in Transcription
  misc_feature: MA Experiment 20000179 PARAMETER Experiment Name: At_Germinating_Seeds_P Parameter: Age (hr) Value: 6 vs. 0
  misc_feature: MA Experiment 20000179 PARAMETER Experiment Name: At_Germinating_Seeds_P Parameter: Tissue Value: Germinating Seeds
  misc_feature: MA Experiment ID: 20000180 Result: Down-regulated in Transcription
  misc_feature: MA Experiment 20000180 PARAMETER Experiment Name: At_Germinating_Seeds_P Parameter: Age (hr) Value: 24 vs. 0
  misc_feature: MA Experiment 20000180 PARAMETER Experiment Name: At_Germinating_Seeds_P Parameter: Tissue Value: Germinating Seeds
  misc_feature: MA Experiment ID: 20001556 Result: Up-regulated in Transcription
  misc_feature: MA Experiment 20001556 PARAMETER Experiment Name: At_Drought_Soil_Dry_P Parameter: Age (day) Value: 26
  misc_feature: MA Experiment 20001556 PARAMETER Experiment Name: At_Drought_Soil_Dry_P Parameter: Organism Value: A. thaliana
  misc_feature: MA Experiment 20001556 PARAMETER Experiment Name: At_Drought_Soil_Dry_P Parameter: Plant Line Value: WS
  misc_feature: MA Experiment 20001556 PARAMETER Experiment Name: At_Drought_Soil_Dry_P Parameter: Post Timepoint (hr) Value: None
  misc_feature: MA Experiment 20001556 PARAMETER Experiment Name: At_Drought_Soil_Dry_P Parameter: Post-Treatment Value: None
  misc_feature: MA Experiment 20001556 PARAMETER Experiment Name: At_Drought_Soil_Dry_P Parameter: Timepoint (day) Value: 12
  misc_feature: MA Experiment 20001556 PARAMETER Experiment Name: At_Drought_Soil_Dry_P Parameter: Treatment Value: Drought vs. No Drought
  misc_feature: MA Experiment ID: 20001557 Result: Up-regulated in Transcription
  misc_feature: MA Experiment 20001557 PARAMETER Experiment Name: At_Drought_Soil_Dry_P Parameter: Age (day) Value: 27
  misc_feature: MA Experiment 20001557 PARAMETER Experiment Name: At_Drought_Soil_Dry_P Parameter: Organism Value: A. thaliana
  misc_feature: MA Experiment 20001557 PARAMETER Experiment Name: At_Drought_Soil_Dry_P Parameter: Plant Line Value: WS
  misc_feature: MA Experiment 20001557 PARAMETER Experiment Name: At_Drought_Soil_Dry_P Parameter: Post Timepoint (hr) Value: 3
  misc_feature: MA Experiment 20001557 PARAMETER Experiment Name: At_Drought_Soil_Dry_P Parameter: Post-Treatment Value: Re-Water vs. No Drought
  misc_feature: MA Experiment 20001557 PARAMETER Experiment Name: At_Drought_Soil_Dry_P Parameter: Timepoint (day) Value: 13
  misc_feature: MA Experiment 20001557 PARAMETER Experiment Name: At_Drought_Soil_Dry_P Parameter: Treatment Value: Drought vs. No Drought
  misc_feature: MA Experiment ID: 20001558 Result: Up-regulated in Transcription
  misc_feature: MA Experiment 20001558 PARAMETER Experiment Name: At_Drought_Soil_Dry_P Parameter: Age (day) Value: 27
  misc_feature: MA Experiment 20001558 PARAMETER Experiment Name: At_Drought_Soil_Dry_P Parameter: Organism Value: A. thaliana
  misc_feature: MA Experiment 20001558 PARAMETER Experiment Name: At_Drought_Soil_Dry_P Parameter: Plant Line Value: WS
  misc_feature: MA Experiment 20001558 PARAMETER Experiment Name: At_Drought_Soil_Dry_P Parameter: Post Timepoint (hr) Value: 6
  misc_feature: MA Experiment 20001558 PARAMETER Experiment Name: At_Drought_Soil_Dry_P Parameter: Post-Treatment Value: Re-Water vs. No Drought
  misc_feature: MA Experiment 20001558 PARAMETER Experiment Name: At_Drought_Soil_Dry_P Parameter: Timepoint (day) Value: 13
  misc_feature: MA Experiment 20001558 PARAMETER Experiment Name: At_Drought_Soil_Dry_P Parameter: Treatment Value: Drought vs. No Drought
  misc_feature: MA Experiment ID: 20001560 Result: Up-regulated in Transcription
  misc_feature: MA Experiment 20001560 PARAMETER Experiment Name: At_Drought_Soil_Dry_P Parameter: Age (day) Value: 28
  misc_feature: MA Experiment 20001560 PARAMETER Experiment Name: At_Drought_Soil_Dry_P Parameter: Organism Value: A. thaliana
  misc_feature: MA Experiment 20001560 PARAMETER Experiment Name: At_Drought_Soil_Dry_P Parameter: Plant Line Value: WS
  misc_feature: MA Experiment 20001560 PARAMETER Experiment Name: At_Drought_Soil_Dry_P Parameter: Post Timepoint (hr) Value: None
  misc_feature: MA Experiment 20001560 PARAMETER Experiment Name: At_Drought_Soil_Dry_P Parameter: Post-Treatment Value: None
  misc_feature: MA Experiment 20001560 PARAMETER Experiment Name: At_Drought_Soil_Dry_P Parameter: Timepoint (day) Value: 14
  misc_feature: MA Experiment 20001560 PARAMETER Experiment Name: At_Drought_Soil_Dry_P Parameter: Treatment Value: Drought vs. No Drought
  misc_feature: MA Experiment ID: 20001904 Result: Up-regulated in Transcription
  misc_feature: MA Experiment 20001904 PARAMETER Experiment Name: At_Drought_Reproduction_P Parameter: Age (day) Value: 37
  misc_feature: MA Experiment 20001904 PARAMETER Experiment Name: At_Drought_Reproduction_P Parameter: Organism Value: A. thaliana
  misc_feature: MA Experiment 20001904 PARAMETER Experiment Name: At_Drought_Reproduction_P Parameter: Plant Line Value: WS
  misc_feature: MA Experiment 20001904 PARAMETER Experiment Name: At_Drought_Reproduction_P Parameter: Timepoint (day) Value: 7
  misc_feature: MA Experiment 20001904 PARAMETER Experiment Name: At_Drought_Reproduction_P Parameter: Tissue Value: Rosettes
  misc_feature: MA Experiment 20001904 PARAMETER Experiment Name: At_Drought_Reproduction_P Parameter: Treatment Value: Drought vs. No Drought
atgtctaaagaagctgagatgtcgatcgcggtgtcggctttgttccctggttttagattctctcctactgatgttgaacttatctcgtactatcttcgtcgtaaaatcgatggtgatgagaactctgttgctgtgattgctgaggtcgagatttacaagttcgagccgtgggacttgccagaggaatcgaaactgaaatcggagaacgagtggttttacttctgcgcgagggggaggaagtacccgcacgggtcacaaagccggcgagccacacagctaggatattggaaagcgaccggtaaagagcggagtgttaaatccgggaaccaagttgttggaaccaagagaacgcttgtatttcatatcggtcgggctcctcgtggcgagagaacggagtggattatgcatgaatactgcatccatggagccccacaggatgcattagtggtgtgccggttaagaaaaaatgctgattttcgggctagttcgacccaaaaaatggaggatggtgttgtgcaagacgatggctacgttggccaaagaggtggtttggagaaggaggacaaatcctactatgaatctgagcatcagataccaaatggtgacatcgcagaatcatcaaatgttgttgaggatcaggccgataccgatgatgattgttacgccgagattctgaacgatgatataataaagctcgacgaagaagcgttgaaagctagccaagcgtttcgaccaactaatccaactcatcaagaaacaatatcaagcgagtcatcgagtaagaggtcaaaatgtggtataaaaaaagaatcaacggaaacaatgaattgttacgctttgttcaggatcaagaacgttgccggaaccgactccagctggagattcccgaacccgttcaaaatcaagaaagatgatagccagagattgatgaagaatgttctggccactactgttttcttggctatcttattttctttcttttggactgtattaatagctaggaactaa

SEQ ID NO: 70351 - protein, 335 aa, Arabidopsis thaliana
  peptide (1)..(335): Ceres Seq. ID no. 2704837
  misc_feature (14)..(141): Pfam Name: No apical meristem (NAM) protein Pfam Description: No apical meristem (NAM) protein
  misc_feature (1)..(335): Homolog of NCBI NO: 15225866 NR Description: NAM (no apical meristem)-like protein; protein At2g27300.1 [Arabidopsis thaliana] >gi|25407881|pir||C84671 NAM
  misc_feature (10)..(253): Homolog of NCBI NO: 15229931 NR Description: putative protein; protein id: At3g44290.1
  misc_feature (1)..(324): Homolog of NCBI NO: 18420448 NR Description: NAM (no apical meristem)-like protein; protein At5g22290.1, supported by cDNA: gi_14326464, supported by cDNA: [Arabidopsis thaliana] >gi|14326465|gb|AAK60278.1|AF385685_1
  misc_feature (12)..(324): Homolog of NCBI NO: 9757809 NR Description: NAM (no apical meristem)-like protein
  misc_feature (1)..(299): Homolog of NCBI NO: 30689531 NR Description: No apical meristem (NAM) protein family thaliana] >gi|9408601|gb|AAF87300.1|AF281062_1 TIP [Arabidopsis
  misc_feature (9)..(290): Homolog of NCBI NO: 15229161 NR Description: NAC2-like protein; protein id: At3g49530.1,
  misc_feature (9)..(228): Homolog of NCBI NO: 15229511 NR Description: hypothetical protein; protein id: At3g17730.1 thaliana] >gi|9294586|dbj|BAB02867.1| contains similarity to NAM
  misc_feature (10)..(218): Homolog of NCBI NO: 15237699 NR Description: putative protein; protein id: At5g04410.1, by cDNA: gi_20466285, supported by cDNA: gi_6456750 [Arabidopsis
  misc_feature (8)..(177): Homolog of NCBI NO: 34902994 NR Description: unnamed protein product [Oryza sativa (japonica group)] >gi|6730946|dbj|BAA89802.1| OsNAC8 protein [Oryza sativa]
  misc_feature (8)..(177): Homolog of NCBI NO: 7486659 NR Description: hypothetical protein F8D20.90 - Arabidopsis
MSKEAEMSIAVSALFPGFRFSPTDVELISYYLRRKIDGDENSVAVIAEVEIYKFEPWDLPEESKLKSENEWFYFCARGRKYPHGSQSRRATQLGYWKATGKERSVKSGNQVVGTKRTLVFHIGRAPRGERTEWIMHEYCIHGAPQDALVVCRLRKNADFRASSTQKMEDGVVQDDGYVGQRGGLEKEDKSYYESEHQIPNGDIAESSNVVEDQADTDDDCYAEILNDDIIKLDEEALKASQAFRPTNPTHQETISSESSSKRSKCGIKKESTETMNCYALFRIKNVAGTDSSWRFPNPFKIKKDDSQRLMKNVLATTVFLAILFSFFWTVLIARN

SEQ ID NO: 70352 - protein, 329 aa, Arabidopsis thaliana
  peptide (1)..(329): Ceres Seq. ID no. 2704838
  misc_feature (8)..(135): Pfam Name: No apical meristem (NAM) protein Pfam Description: No apical meristem (NAM) protein
  misc_feature (3)..(222): Homolog of NCBI NO: 15229511 NR Description: hypothetical protein; protein id: At3g17730.1 thaliana] >gi|9294586|dbj|BAB02867.1| contains similarity to NAM
  misc_feature (4)..(212): Homolog of NCBI NO: 15237699 NR Description: putative protein; protein id: At5g04410.1, by cDNA: gi_20466285, supported by cDNA: gi_6456750 [Arabidopsis
  misc_feature (1)..(329): Homolog of NCBI NO: 15225866 NR Description: NAM (no apical meristem)-like protein; protein At2g27300.1 [Arabidopsis thaliana] >gi|25407881|pir||C84671 NAM
  misc_feature (1)..(318): Homolog of NCBI NO: 18420448 NR Description: NAM (no apical meristem)-like protein; protein At5g22290.1, supported by cDNA: gi_14326464, supported by cDNA: [Arabidopsis thaliana] >gi|14326465|gb|AAK60278.1|AF385685_1
  misc_feature (1)..(293): Homolog of NCBI NO: 30689531 NR Description: No apical meristem (NAM) protein family thaliana] >gi|9408601|gb|AAF87300.1|AF281062_1 TIP [Arabidopsis
  misc_feature (3)..(284): Homolog of NCBI NO: 15229161 NR Description: NAC2-like protein; protein id: At3g49530.1,
  misc_feature (6)..(318): Homolog of NCBI NO: 9757809 NR Description: NAM (no apical meristem)-like protein
  misc_feature (4)..(247): Homolog of NCBI NO: 15229931 NR Description: putative protein; protein id: At3g44290.1
  misc_feature (2)..(171): Homolog of NCBI NO: 34902994 NR Description: unnamed protein product [Oryza sativa (japonica group)] >gi|6730946|dbj|BAA89802.1| OsNAC8 protein [Oryza sativa]
  misc_feature (2)..(171): Homolog of NCBI NO: 7486659 NR Description: hypothetical protein F8D20.90 - Arabidopsis
MSIAVSALFPGFRFSPTDVELISYYLRRKIDGDENSVAVIAEVEIYKFEPWDLPEESKLKSENEWFYFCARGRKYPHGSQSRRATQLGYWKATGKERSVKSGNQVVGTKRTLVFHIGRAPRGERTEWIMHEYCIHGAPQDALVVCRLRKNADFRASSTQKMEDGVVQDDGYVGQRGGLEKEDKSYYESEHQIPNGDIAESSNVVEDQADTDDDCYAEILNDDIIKLDEEALKASQAFRPTNPTHQETISSESSSKRSKCGIKKESTETMNCYALFRIKNVAGTDSSWRFPNPFKIKKDDSQRLMKNVLATTVFLAILFSFFWTVLIARN

SEQ ID NO: 70353 - protein, 201 aa, Arabidopsis thaliana
  peptide (1)..(201): Ceres Seq. ID no. 2704839
  misc_feature (1)..(201): Homolog of NCBI NO: 15225866 NR Description: NAM (no apical meristem)-like protein; protein At2g27300.1 [Arabidopsis thaliana] >gi|25407881|pir||C84671 NAM
  misc_feature (1)..(119): Homolog of NCBI NO: 15229931 NR Description: putative protein; protein id: At3g44290.1
  misc_feature (1)..(190): Homolog of NCBI NO: 18420448 NR Description: NAM (no apical meristem)-like protein; protein At5g22290.1, supported by cDNA: gi_14326464, supported by cDNA: [Arabidopsis thaliana] >gi|14326465|gb|AAK60278.1|AF385685_1
  misc_feature (1)..(190): Homolog of NCBI NO: 9757809 NR Description: NAM (no apical meristem)-like protein
  misc_feature (1)..(165): Homolog of NCBI NO: 30689531 NR Description: No apical meristem (NAM) protein family thaliana] >gi|9408601|gb|AAF87300.1|AF281062_1 TIP [Arabidopsis
  misc_feature (1)..(156): Homolog of NCBI NO: 15229161 NR Description: NAC2-like protein; protein id: At3g49530.1,
  misc_feature (1)..(94): Homolog of NCBI NO: 15229511 NR Description: hypothetical protein; protein id: At3g17730.1 thaliana] >gi|9294586|dbj|BAB02867.1| contains similarity to NAM
  misc_feature (1)..(84): Homolog of NCBI NO: 15237699 NR Description: putative protein; protein id: At5g04410.1, by cDNA: gi_20466285, supported by cDNA: gi_6456750 [Arabidopsis
  misc_feature (1)..(43): Homolog of NCBI NO: 34902994 NR Description: unnamed protein product [Oryza sativa (japonica group)] >gi|6730946|dbj|BAA89802.1| OsNAC8 protein [Oryza sativa]
  misc_feature (1)..(43): Homolog of NCBI NO: 7486659 NR Description: hypothetical protein F8D20.90 - Arabidopsis
MHEYCIHGAPQDALVVCRLRKNADFRASSTQKMEDGVVQDDGYVGQRGGLEKEDKSYYESEHQIPNGDIAESSNVVEDQADTDDDCYAEILNDDIIKLDEEALKASQAFRPTNPTHQETISSESSSKRSKCGIKKESTETMNCYALFRIKNVAGTDSSWRFPNPFKIKKDDSQRLMKNVLATTVFLAILFSFFWTVLIARN

SEQ ID NO: 70354 - DNA, 1431 bp, Arabidopsis thaliana
  misc_feature (1)..(1431): Ceres Seq. ID no. 2705490
  misc_feature: MA Experiment ID: 20000306 Result: Down-regulated in Transcription
  misc_feature: MA Experiment 20000306 PARAMETER Experiment Name: At_Germinating_Seeds_Sub_P Parameter: Age (hr) Value: 6 vs. 0
  misc_feature: MA Experiment 20000306 PARAMETER Experiment Name: At_Germinating_Seeds_Sub_P Parameter: Organism Value: A. thaliana
  misc_feature: MA Experiment 20000306 PARAMETER Experiment Name: At_Germinating_Seeds_Sub_P Parameter: Plant Line Value: WS
  misc_feature: MA Experiment 20000306 PARAMETER Experiment Name: At_Germinating_Seeds_Sub_P Parameter: Tissue Value: Germinating Seeds
  misc_feature: MA Experiment ID: 20000307 Result: Down-regulated in Transcription
  misc_feature: MA Experiment 20000307 PARAMETER Experiment Name: At_Germinating_Seeds_Sub_P Parameter: Age (hr) Value: 24 vs. 0
  misc_feature: MA Experiment 20000307 PARAMETER Experiment Name: At_Germinating_Seeds_Sub_P Parameter: Organism Value: A. thaliana
  misc_feature: MA Experiment 20000307 PARAMETER Experiment Name: At_Germinating_Seeds_Sub_P Parameter: Plant Line Value: WS
  misc_feature: MA Experiment 20000307 PARAMETER Experiment Name: At_Germinating_Seeds_Sub_P Parameter: Tissue Value: Germinating Seeds
  misc_feature: Pfam Name: MatE Pfam Description: MatE
atggaagagccatttcttccgcaagatgagcagatagtcccctgtaaagccacatggaaaagtggtcagctcaatgtcgagctgaagaaagtgagccgcttggctgttcctatggccaccgtgaccattgcacagtacttattgccagtcatctcagtcatggtcgctggccacaacggcgagctccagctctccggtgtcgctcttgctacctccttcacaaatgtctccggtttcagcattatgtttgggttagtgggttcactagaaactctttctggccaagcttatggagccaaacaatacgaaaaaatgggaacctatacatactccgcaatttcctctaacatccctatatgtgtcctcatatcaattctctggatatacatggaaaaactcttgatctctctcggacaagaccctgacatctccagagtcgctggctcctacgccttgcggctcataccgactttgtttgcccatgcgattgtcttaccactgacccggtttctgctagcacaagggttggttcttccactgctttactttgccctgaccacccttttgttccacattgcggtttgctggactttggtttccgcacttggtttgggaagcaatggagctgccttggctattagtgtgtctttctggtttttcgctatgacactctcatgttatgtgagattctccagctcttgcgagaagactcgccgatttgtatcccaagatttcttgtcttctgtcaagcagttcttccgttatggagtcccatcagcggcaatgctttgcctagaatggtggctatttgagctacttatactctgttcaggtcttctccaaaacccaaaactcgagacctctgttctttcaatttgtcttacaacagcaactttgcactatgtgattccagttggagtcgcggccgctgtgagcacacgcgtgtcaaacaaattgggagctgggattcctcaagttgctagggtttcagtattggcagggctttgtctctggcttgtagagtcatctttctttagcatacttctcttcgccttcaggaacatcataggctacgcattcagcaacagtaaagaagttgtggactatgtggctgatctatctcctttgctctgtctctcctttgttcttgacggatttaccgcagttcttaatggggttgccaggggatgtggttggcaacacattggagctttgaacaacgtagtagcttattatctcgtaggagctccggttggaatatatttagctttcagttgtgagttgaacggaaaaggactatggtgtggtgtagtggttggatccgctgtgcaagccattatactggctattgtcacggcttccatgaattggaaggaacaggttagagcttattacaatacattcttttttttttttaattctctaaagtaa

SEQ ID NO: 70355 - protein, 476 aa, Arabidopsis thaliana
  peptide (1)..(476): Ceres Seq. ID no. 2705491
  misc_feature: Pfam Name: MatE Pfam Description: MatE
  misc_feature (1)..(476): Homolog of NCBI NO: 15228081 NR Description: hypothetical protein; protein id: At2g04070.1
  misc_feature (1)..(460): Homolog of NCBI NO: 15228073 NR Description: hypothetical protein; protein id: At2g04050.1
  misc_feature (1)..(469): Homolog of NCBI NO: 25411053 NR Description: hypothetical protein At2g04080 [imported] - thaliana >gi|4734007|gb|AAD28684.1| hypothetical protein
  misc_feature (1)..(460): Homolog of NCBI NO: 30678096 NR Description: MATE efflux protein - related [Arabidopsis >gi|26451343|dbj|BAC42772.1| unknown protein [Arabidopsis >gi|28973213|gb|AAO63931.1| unknown protein [Arabidopsis
  misc_feature (1)..(460): Homolog of NCBI NO: 15228071 NR Description: hypothetical protein; protein id: At2g04040.1
  misc_feature (1)..(460): Homolog of NCBI NO: 22325453 NR Description: hypothetical protein; protein id: At2g04100.1, by cDNA: gi_20260453 [Arabidopsis thaliana]
  misc_feature (1)..(461): Homolog of NCBI NO: 25411056 NR Description: hypothetical protein At2g04100 [imported] - thaliana >gi|4734005|gb|AAD28682.1| hypothetical protein
  misc_feature (1)..(469): Homolog of NCBI NO: 15228085 NR Description: hypothetical protein; protein id: At2g04090.1
  misc_feature (18)..(468): Homolog of NCBI NO: 25511632 NR Description: F9L1.11 protein - Arabidopsis thaliana Strong similarity to gi|4734005 F3L12.7 hypothetical protein from
  misc_feature (20)..(462): Homolog of NCBI NO: 15223961 NR Description: hypothetical protein; protein id: At1g71140.1
MEEPFLPQDEQIVPCKATWKSGQLNVELKKVSRLAVPMATVTIAQYLLPVISVMVAGHNGELQLSGVALATSFTNVSGFSIMFGLVGSLETLSGQAYGAKQYEKMGTYTYSAISSNIPICVLISILWIYMEKLLISLGQDPDISRVAGSYALRLIPTLFAHAIVLPLTRFLLAQGLVLPLLYFALTTLLFHIAVCWTLVSALGLGSNGAALAISVSFWFFAMTLSCYVRFSSSCEKTRRFVSQDFLSSVKQFFRYGVPSAAMLCLEWWLFELLILCSGLLQNPKLETSVLSICLTTATLHYVIPVGVAAAVSTRVSNKLGAGIPQVARVSVLAGLCLWLVESSFFSILLFAFRNIIGYAFSNSKEVVDYVADLSPLLCLSFVLDGFTAVLNGVARGCGWQHIGALNNVVAYYLVGAPVGIYLAFSCELNGKGLWCGVVVGSAVQAIILAIVTASMNWKEQVRAYYNTFFFFFNSLK

SEQ ID NO: 70356 - protein, 439 aa, Arabidopsis thaliana
  peptide (1)..(439): Ceres Seq. ID no. 2705492
  misc_feature: Pfam Name: MatE Pfam Description: MatE
  misc_feature (1)..(439): Homolog of NCBI NO: 15228081 NR Description: hypothetical protein; protein id: At2g04070.1
  misc_feature (1)..(423): Homolog of NCBI NO: 15228073 NR Description: hypothetical protein; protein id: At2g04050.1
  misc_feature (1)..(432): Homolog of NCBI NO: 25411053 NR Description: hypothetical protein At2g04080 [imported] - thaliana >gi|4734007|gb|AAD28684.1| hypothetical protein
  misc_feature (1)..(423): Homolog of NCBI NO: 30678096 NR Description: MATE efflux protein - related [Arabidopsis >gi|26451343|dbj|BAC42772.1| unknown protein [Arabidopsis >gi|28973213|gb|AAO63931.1| unknown protein [Arabidopsis
  misc_feature (1)..(423): Homolog of NCBI NO: 15228071 NR Description: hypothetical protein; protein id: At2g04040.1
  misc_feature (1)..(423): Homolog of NCBI NO: 22325453 NR Description: hypothetical protein; protein id: At2g04100.1, by cDNA: gi_20260453 [Arabidopsis thaliana]
  misc_feature (1)..(424): Homolog of NCBI NO: 25411056 NR Description: hypothetical protein At2g04100 [imported] - thaliana >gi|4734005|gb|AAD28682.1| hypothetical protein
  misc_feature (1)..(432): Homolog of NCBI NO: 15228085 NR Description: hypothetical protein; protein id: At2g04090.1
  misc_feature (1)..(431): Homolog of NCBI NO: 25511632 NR Description: F9L1.11 protein - Arabidopsis thaliana Strong similarity to gi|4734005 F3L12.7 hypothetical protein from
  misc_feature (1)..(425): Homolog of NCBI NO: 15223961 NR Description: hypothetical protein; protein id: At1g71140.1
MATVTIAQYLLPVISVMVAGHNGELQLSGVALATSFTNVSGFSIMFGLVGSLETLSGQAYGAKQYEKMGTYTYSAISSNIPICVLISILWIYMEKLLISLGQDPDISRVAGSYALRLIPTLFAHAIVLPLTRFLLAQGLVLPLLYFALTTLLFHIAVCWTLVSALGLGSNGAALAISVSFWFFAMTLSCYVRFSSSCEKTRRFVSQDFLSSVKQFFRYGVPSAAMLCLEWWLFELLILCSGLLQNPKLETSVLSICLTTATLHYVIPVGVAAAVSTRVSNKLGAGIPQVARVSVLAGLCLWLVESSFFSILLFAFRNIIGYAFSNSKEVVDYVADLSPLLCLSFVLDGFTAVLNGVARGCGWQHIGALNNVVAYYLVGAPVGIYLAFSCELNGKGLWCGVVVGSAVQAIILAIVTASMNWKEQVRAYYNTFFFFFNSLK

SEQ ID NO: 70357 - protein, 423 aa, Arabidopsis thaliana
  peptide (1)..(423): Ceres Seq. ID no. 2705493
  misc_feature: Pfam Name: MatE Pfam Description: MatE
  misc_feature (1)..(423): Homolog of NCBI NO: 15228081 NR Description: hypothetical protein; protein id: At2g04070.1
  misc_feature (1)..(407): Homolog of NCBI NO: 15228073 NR Description: hypothetical protein; protein id: At2g04050.1
  misc_feature (1)..(416): Homolog of NCBI NO: 25411053 NR Description: hypothetical protein At2g04080 [imported] - thaliana >gi|4734007|gb|AAD28684.1| hypothetical protein
  misc_feature (1)..(407): Homolog of NCBI NO: 30678096 NR Description: MATE efflux protein - related [Arabidopsis >gi|26451343|dbj|BAC42772.1| unknown protein [Arabidopsis >gi|28973213|gb|AAO63931.1| unknown protein [Arabidopsis
  misc_feature (1)..(407): Homolog of NCBI NO: 15228071 NR Description: hypothetical protein; protein id: At2g04040.1
  misc_feature (1)..(407): Homolog of NCBI NO: 22325453 NR Description: hypothetical protein; protein id: At2g04100.1, by cDNA: gi_20260453 [Arabidopsis thaliana]
  misc_feature (1)..(408): Homolog of NCBI NO: 25411056 NR Description: hypothetical protein At2g04100 [imported] - thaliana >gi|4734005|gb|AAD28682.1| hypothetical protein
  misc_feature (1)..(416): Homolog of NCBI NO: 15228085 NR Description: hypothetical protein; protein id: At2g04090.1
  misc_feature (1)..(415): Homolog of NCBI NO: 25511632 NR Description: F9L1.11 protein - Arabidopsis thaliana Strong similarity to gi|4734005 F3L12.7 hypothetical protein from
  misc_feature (1)..(409): Homolog of NCBI NO: 15223961 NR Description: hypothetical protein; protein id: At1g71140.1
MVAGHNGELQLSGVALATSFTNVSGFSIMFGLVGSLETLSGQAYGAKQYEKMGTYTYSAISSNIPICVLISILWIYMEKLLISLGQDPDISRVAGSYALRLIPTLFAHAIVLPLTRFLLAQGLVLPLLYFALTTLLFHIAVCWTLVSALGLGSNGAALAISVSFWFFAMTLSCYVRFSSSCEKTRRFVSQDFLSSVKQFFRYGVPSAAMLCLEWWLFELLILCSGLLQNPKLETSVLSICLTTATLHYVIPVGVAAAVSTRVSNKLGAGIPQVARVSVLAGLCLWLVESSFFSILLFAFRNIIGYAFSNSKEVVDYVADLSPLLCLSFVLDGFTAVLNGVARGCGWQHIGALNNVVAYYLVGAPVGIYLAFSCELNGKGLWCGVVVGSAVQAIILAIVTASMNWKEQVRAYYNTFFFFFNSLK

SEQ ID NO: 70358 - DNA, 1410 bp, Arabidopsis thaliana
  misc_feature (1)..(1410): Ceres Seq. ID no. 2705494
  misc_feature: MA Experiment ID: 108434 Result: Down-regulated in Transcription
  misc_feature: MA Experiment 108434 PARAMETER Experiment Name: At_Root_Tips_cDNA_P Parameter: Tissue Value: Root Tips
  misc_feature: MA Experiment ID: 108461 Result: Down-regulated in Transcription
  misc_feature: MA Experiment 108461 PARAMETER Experiment Name: At_Germinating_Seeds_cDNA_P Parameter: Age (day) Value: 1 vs. 0
  misc_feature: MA Experiment 108461 PARAMETER Experiment Name: At_Germinating_Seeds_cDNA_P Parameter: Tissue Value: Germinating Seeds
  misc_feature: MA Experiment ID: 108462 Result: Down-regulated in Transcription
  misc_feature: MA Experiment 108462 PARAMETER Experiment Name: At_Germinating_Seeds_cDNA_P Parameter: Age (day) Value: 2 vs. 0
  misc_feature: MA Experiment 108462 PARAMETER Experiment Name: At_Germinating_Seeds_cDNA_P Parameter: Tissue Value: Germinating Seeds
  misc_feature: MA Experiment ID: 108463 Result: Down-regulated in Transcription
  misc_feature: MA Experiment 108463 PARAMETER Experiment Name: At_Germinating_Seeds_cDNA_P Parameter: Age (day) Value: 3 vs. 0
  misc_feature: MA Experiment 108463 PARAMETER Experiment Name: At_Germinating_Seeds_cDNA_P Parameter: Tissue Value: Germinating Seeds
  misc_feature: MA Experiment ID: 108569 Result: Up-regulated in Transcription
  misc_feature: MA Experiment 108569 PARAMETER Experiment Name: At_0.001%_MeJA__cDNA_P Parameter: Timepoint (hr) Value: 6
  misc_feature: MA Experiment 108569 PARAMETER Experiment Name: At_0.001%_MeJA__cDNA_P Parameter: Tissue Value: Aerial
  misc_feature: MA Experiment 108569 PARAMETER Experiment Name: At_0.001%_MeJA__cDNA_P Parameter: Treatment Value: 0.001% MeJA vs. No Treatment
  misc_feature: MA Experiment ID: 108572 Result: Up-regulated in Transcription
  misc_feature: MA Experiment 108572 PARAMETER Experiment Name: At_Drought_cDNA_P Parameter: Timepoint (hr) Value: 1
  misc_feature: MA Experiment 108572 PARAMETER Experiment Name: At_Drought_cDNA_P Parameter: Tissue Value: Aerial
  misc_feature: MA Experiment 108572 PARAMETER Experiment Name: At_Drought_cDNA_P Parameter: Treatment Value: Drought vs. No Drought
  misc_feature: MA Experiment ID: 108585 Result: Up-regulated in Transcription
  misc_feature: MA Experiment 108585 PARAMETER Experiment Name: At_5mM_NaNP_cDNA_P Parameter: Timepoint (hr) Value: 6
  misc_feature: MA Experiment 108585 PARAMETER Experiment Name: At_5mM_NaNP_cDNA_P Parameter: Tissue Value: Aerial
  misc_feature: MA Experiment 108585 PARAMETER Experiment Name: At_5mM_NaNP_cDNA_P Parameter: Treatment Value: null
  misc_feature: MA Experiment ID: 20000069 Result: Up-regulated in Transcription
  misc_feature: MA Experiment 20000069 PARAMETER Experiment Name: At_100uM_ABA_Mutants_cDNA_P Parameter: Plant Line Value: CS23
  misc_feature: MA Experiment 20000069 PARAMETER Experiment Name: At_100uM_ABA_Mutants_cDNA_P Parameter: Timepoint (hr) Value: 6
  misc_feature: MA Experiment 20000069 PARAMETER Experiment Name: At_100uM_ABA_Mutants_cDNA_P Parameter: Tissue Value: Aerial
  misc_feature: MA Experiment 20000069 PARAMETER Experiment Name: At_100uM_ABA_Mutants_cDNA_P Parameter: Treatment Value: 100uM ABA vs. No Treatment
  misc_feature: MA Experiment ID: 20000070 Result: Up-regulated in Transcription
  misc_feature: MA Experiment 20000070 PARAMETER Experiment Name: At_100uM_ABA_Mutants_cDNA_P Parameter: Plant Line Value: CS24
  misc_feature: MA Experiment 20000070 PARAMETER Experiment Name: At_100uM_ABA_Mutants_cDNA_P Parameter: Timepoint (hr) Value: 6
  misc_feature: MA Experiment 20000070 PARAMETER Experiment Name: At_100uM_ABA_Mutants_cDNA_P Parameter: Tissue Value: Aerial
  misc_feature: MA Experiment 20000070 PARAMETER Experiment Name: At_100uM_ABA_Mutants_cDNA_P Parameter: Treatment Value: 100uM ABA vs. No Treatment
  misc_feature: MA Experiment ID: 20000071 Result: Up-regulated in Transcription
  misc_feature: MA Experiment 20000071 PARAMETER Experiment Name: At_100uM_ABA_Mutants_cDNA_P Parameter: Plant Line Value: CS8104
  misc_feature: MA Experiment 20000071 PARAMETER Experiment Name: At_100uM_ABA_Mutants_cDNA_P Parameter: Timepoint (hr) Value: 6
  misc_feature: MA Experiment 20000071 PARAMETER Experiment Name: At_100uM_ABA_Mutants_cDNA_P Parameter: Tissue Value: Aerial
  misc_feature: MA Experiment 20000071 PARAMETER Experiment Name: At_100uM_ABA_Mutants_cDNA_P Parameter: Treatment Value: 100uM ABA vs. No Treatment
  misc_feature: MA Experiment ID: 20000072 Result: Up-regulated in Transcription
  misc_feature: MA Experiment 20000072 PARAMETER Experiment Name: At_100uM_ABA_Mutants_cDNA_P Parameter: Plant Line Value: CS8105
  misc_feature: MA Experiment 20000072 PARAMETER Experiment Name: At_100uM_ABA_Mutants_cDNA_P Parameter: Timepoint (hr) Value: 6
  misc_feature: MA Experiment 20000072 PARAMETER Experiment Name: At_100uM_ABA_Mutants_cDNA_P Parameter: Tissue Value: Aerial
  misc_feature: MA Experiment 20000072 PARAMETER Experiment Name: At_100uM_ABA_Mutants_cDNA_P Parameter: Treatment Value: 100uM ABA vs. No Treatment
  misc_feature: MA Experiment ID: 20000086 Result: Up-regulated in Transcription
  misc_feature: MA Experiment 20000086 PARAMETER Experiment Name: At_100uM_ABA_Mutants_cDNA_P Parameter: Plant Line Value: CS22
  misc_feature: MA Experiment 20000086 PARAMETER Experiment Name: At_100uM_ABA_Mutants_cDNA_P Parameter: Timepoint (hr) Value: 6
  misc_feature: MA Experiment 20000086 PARAMETER Experiment Name: At_100uM_ABA_Mutants_cDNA_P Parameter: Tissue Value: Aerial
  misc_feature: MA Experiment 20000086 PARAMETER Experiment Name: At_100uM_ABA_Mutants_cDNA_P Parameter: Treatment Value: 100uM ABA vs. No Treatment
  misc_feature: MA Experiment ID: 20000087 Result: Up-regulated in Transcription
  misc_feature: MA Experiment 20000087 PARAMETER Experiment Name: At_100uM_ABA_Mutants_cDNA_P Parameter: Plant Line Value: WS
  misc_feature: MA Experiment 20000087 PARAMETER Experiment Name: At_100uM_ABA_Mutants_cDNA_P Parameter: Timepoint (hr) Value: 6
  misc_feature: MA Experiment 20000087 PARAMETER Experiment Name: At_100uM_ABA_Mutants_cDNA_P Parameter: Tissue Value: Aerial
  misc_feature: MA Experiment 20000087 PARAMETER Experiment Name: At_100uM_ABA_Mutants_cDNA_P Parameter: Treatment Value: 100uM ABA vs. No Treatment
  misc_feature: MA Experiment ID: 20000088 Result: Up-regulated in Transcription
  misc_feature: MA Experiment 20000088 PARAMETER Experiment Name: At_100uM_ABA_Mutants_cDNA_P Parameter: Plant Line Value: Landsberg
  misc_feature: MA Experiment 20000088 PARAMETER Experiment Name: At_100uM_ABA_Mutants_cDNA_P Parameter: Timepoint (hr) Value: 6
  misc_feature: MA Experiment 20000088 PARAMETER Experiment Name: At_100uM_ABA_Mutants_cDNA_P Parameter: Tissue Value: Aerial
  misc_feature: MA Experiment 20000088 PARAMETER Experiment Name: At_100uM_ABA_Mutants_cDNA_P Parameter: Treatment Value: 100uM ABA vs. No Treatment
  misc_feature: MA Experiment ID: 20000224 Result: Up-regulated in Transcription
  misc_feature: MA Experiment ID: 20000306 Result: Down-regulated in Transcription
  misc_feature: MA Experiment 20000306 PARAMETER Experiment Name: At_Germinating_Seeds_Sub_P Parameter: Age (hr) Value: 6 vs. 0
  misc_feature: MA Experiment 20000306 PARAMETER Experiment Name: At_Germinating_Seeds_Sub_P Parameter: Organism Value: A. thaliana
  misc_feature: MA Experiment 20000306 PARAMETER Experiment Name: At_Germinating_Seeds_Sub_P Parameter: Plant Line Value: WS
  misc_feature: MA Experiment 20000306 PARAMETER Experiment Name: At_Germinating_Seeds_Sub_P Parameter: Tissue Value: Germinating Seeds
  misc_feature: MA Experiment ID: 20000307 Result: Down-regulated in Transcription
  misc_feature: MA Experiment 20000307 PARAMETER Experiment Name: At_Germinating_Seeds_Sub_P Parameter: Age (hr) Value: 24 vs. 0
  misc_feature: MA Experiment 20000307 PARAMETER Experiment Name: At_Germinating_Seeds_Sub_P Parameter: Organism Value: A. thaliana
  misc_feature: MA Experiment 20000307 PARAMETER Experiment Name: At_Germinating_Seeds_Sub_P Parameter: Plant Line Value: WS
  misc_feature: MA Experiment 20000307 PARAMETER Experiment Name: At_Germinating_Seeds_Sub_P Parameter: Tissue Value: Germinating Seeds
  misc_feature: MA Experiment ID: 20000315 Result: Down-regulated in Transcription
  misc_feature: MA Experiment 20000315 PARAMETER Experiment Name: At_14day_Shoots-Roots_Sub_P Parameter: Age (day) Value: 14
  misc_feature: MA Experiment 20000315 PARAMETER Experiment Name: At_14day_Shoots-Roots_Sub_P Parameter: Organism Value: A. thaliana
  misc_feature: MA Experiment 20000315 PARAMETER Experiment Name: At_14day_Shoots-Roots_Sub_P Parameter: Plant Line Value: WS
  misc_feature: MA Experiment 20000315 PARAMETER Experiment Name: At_14day_Shoots-Roots_Sub_P Parameter: Tissue Value: Shoots vs. Whole Plant
  misc_feature: MA Experiment ID: 20000355 Result: Down-regulated in Transcription
  misc_feature: MA Experiment 20000355 PARAMETER Experiment Name: At_Siliques_Sub_P Parameter: Age (day) Value: 21
  misc_feature: MA Experiment 20000355 PARAMETER Experiment Name: At_Siliques_Sub_P Parameter: Organism Value: A. thaliana
  misc_feature: MA Experiment 20000355 PARAMETER Experiment Name: At_Siliques_Sub_P Parameter: Plant Line Value: WS
  misc_feature: MA Experiment 20000355 PARAMETER Experiment Name: At_Siliques_Sub_P Parameter: Tissue Value: Less Than 5mm Siliques vs. Whole Plant
  misc_feature: MA Experiment ID: 20000440 Result: Down-regulated in Transcription
  misc_feature: MA Experiment 20000440 PARAMETER Experiment Name: At_Closed-Flower__Sub_P Parameter: Tissue Value: Closed Flower vs. Whole Plant
atggaagagccatttcttccgagagacgagcagttagtctcttgtaaatccacatggcaaagtggtcaggtcaccgtcgagctgaagaaagtgagccgcttggccgctcctatggccaccgtaaccatagctcagtacttattgcctgtcatctcagtcatggtcgccggccacatcggcgagttggagctcgccggtgtcgcgcttgccacgtctttcacaaacgtttccggcttcagcataatgtttgggttagttggtgcattggaaactctttgtggccaagcctatggagcagaacaatacgaaaaaatcggaacctatacatactctgcaatggcttccaacataccaatttgtttcatcatatcaattctatggatttacatcgaaaagctcttgatcactctcgggcaagagcctgacatctctagagtcgctggctcctactcattgtggctcgtaccggctttgtttgcccatgctattttcttaccactgactcggtttctgctagcacaagggttggttatttccctgctatactctgccatgaccacccttttgttccatattgcggtttgctggactttggttttcgcgcttggtcttggaagcaatggagctgctattgctattagtttgtctttctggttttacgctgtgatactctcatgtcatgtgagatttttcagctcttgcgagaagactcgcggatttgtatcaaatgattttatgtctagtatcaagcagtacttccagtacggagtcccatccgctggattgatttgcttagaatggtggctgtttgagctactcatactctgctcaggtcttctcccaaacccaaaactcgagacatctgttctttcgatttgtcttacaataggaactttacactatgtgattccatctggagtcgcggcggctgtgagcacacgagtgtcaaacaaattgggagctggaaatcctcaagttgctagggtttccgtattggcagggctttgtctctggcttgtagagtcagctttctttagcacacttctcttcacctgccgaaacatcataggctacacattcagcaacagcaaagaagttgttgactatgttgctgacatatctcctttgctctgtctctccttcatcctcgacggattaacggcagttctaaatggagtggctaggggatgtgggtggcaacacattggagctttgatcaacgtggtggcttattatcttgtaggagctcctgttggagtttacttagctttcagtcgtgagtggaatggaaaaggactctggtgcggtgttatggttggatccgcggtgcaagccactttactggctatcgtcacagcctccatgaactggaaggaacaggttagagtttgttacattctagttttttga

SEQ ID NO: 70359 - protein, 469 aa, Arabidopsis thaliana
  peptide (1)..(469): Ceres Seq. ID no. 2705495
  misc_feature (1)..(469): Homolog of NCBI NO: 25411053 NR Description: hypothetical protein At2g04080 [imported] - thaliana >gi|4734007|gb|AAD28684.1| hypothetical protein
  misc_feature (1)..(460): Homolog of NCBI NO: 30678096 NR Description: MATE efflux protein - related [Arabidopsis >gi|26451343|dbj|BAC42772.1| unknown protein [Arabidopsis >gi|28973213|gb|AAO63931.1| unknown protein [Arabidopsis
  misc_feature (1)..(469): Homolog of NCBI NO: 15228081 NR Description: hypothetical protein; protein id: At2g04070.1
  misc_feature (1)..(460): Homolog of NCBI NO: 15228073 NR Description: hypothetical protein; protein id: At2g04050.1
  misc_feature (1)..(460): Homolog of NCBI NO: 15228071 NR Description: hypothetical protein; protein id: At2g04040.1
  misc_feature (1)..(460): Homolog of NCBI NO: 22325453 NR Description: hypothetical protein; protein id: At2g04100.1, by cDNA: gi_20260453 [Arabidopsis thaliana]
  misc_feature (1)..(461): Homolog of NCBI NO: 15228085 NR Description: hypothetical protein; protein id: At2g04090.1
  misc_feature (1)..(463): Homolog of NCBI NO: 25411056 NR Description: hypothetical protein At2g04100 [imported] - thaliana >gi|4734005|gb|AAD28682.1| hypothetical protein
  misc_feature (27)..(462): Homolog of NCBI NO: 15223961 NR Description: hypothetical protein; protein id: At1g71140.1
  misc_feature (18)..(465): Homolog of NCBI NO: 25511632 NR Description: F9L1.11 protein - Arabidopsis thaliana Strong similarity to gi|4734005 F3L12.7 hypothetical protein from
MEEPFLPRDEQLVSCKSTWQSGQVTVELKKVSRLAAPMATVTIAQYLLPVISVMVAGHIGELELAGVALATSFTNVSGFSIMFGLVGALETLCGQAYGAEQYEKIGTYTYSAMASNIPICFIISILWIYIEKLLITLGQEPDISRVAGSYSLWLVPALFAHAIFLPLTRFLLAQGLVISLLYSAMTTLLFHIAVCWTLVFALGLGSNGAAIAISLSFWFYAVILSCHVRFFSSCEKTRGFVSNDFMSSIKQYFQYGVPSAGLICLEWWLFELLILCSGLLPNPKLETSVLSICLTIGTLHYVIPSGVAAAVSTRVSNKLGAGNPQVARVSVLAGLCLWLVESAFFSTLLFTCRNIIGYTFSNSKEVVDYVADISPLLCLSFILDGLTAVLNGVARGCGWQHIGALINVVAYYLVGAPVGVYLAFSREWNGKGLWCGVMVGSAVQATLLAIVTASMNWKEQVRVCYILVF

SEQ ID NO: 70360 - protein, 432 aa, Arabidopsis thaliana
  peptide (1)..(432): Ceres Seq. ID no. 2705496
  misc_feature (1)..(432): Homolog of NCBI NO: 25411053 NR Description: hypothetical protein At2g04080 [imported] - thaliana >gi|4734007|gb|AAD28684.1| hypothetical protein
  misc_feature (1)..(423): Homolog of NCBI NO: 30678096 NR Description: MATE efflux protein - related [Arabidopsis >gi|26451343|dbj|BAC42772.1| unknown protein [Arabidopsis >gi|28973213|gb|AAO63931.1| unknown protein [Arabidopsis
  misc_feature (1)..(432): Homolog of NCBI NO: 15228081 NR Description: hypothetical protein; protein id: At2g04070.1
  misc_feature (1)..(423): Homolog of NCBI NO: 15228073 NR Description: hypothetical protein; protein id: At2g04050.1
  misc_feature (1)..(423): Homolog of NCBI NO: 15228071 NR Description: hypothetical protein; protein id: At2g04040.1
  misc_feature (1)..(423): Homolog of NCBI NO: 22325453 NR Description: hypothetical protein; protein id: At2g04100.1, by cDNA: gi_20260453 [Arabidopsis thaliana]
  misc_feature (1)..(424): Homolog of NCBI NO: 15228085 NR Description: hypothetical protein; protein id: At2g04090.1
  misc_feature (1)..(426): Homolog of NCBI NO: 25411056 NR Description: hypothetical protein At2g04100 [imported] - thaliana >gi|4734005|gb|AAD28682.1| hypothetical protein
  misc_feature (1)..(425): Homolog of NCBI NO: 15223961 NR Description: hypothetical protein; protein id: At1g71140.1
  misc_feature (1)..(428): Homolog of NCBI NO: 25511632 NR Description: F9L1.11 protein - Arabidopsis thaliana Strong similarity to gi|4734005 F3L12.7 hypothetical protein from
MATVTIAQYLLPVISVMVAGHIGELELAGVALATSFTNVSGFSIMFGLVGALETLCGQAYGAEQYEKIGTYTYSAMASNIPICFIISILWIYIEKLLITLGQEPDISRVAGSYSLWLVPALFAHAIFLPLTRFLLAQGLVISLLYSAMTTLLFHIAVCWTLVFALGLGSNGAAIAISLSFWFYAVILSCHVRFFSSCEKTRGFVSNDFMSSIKQYFQYGVPSAGLICLEWWLFELLILCSGLLPNPKLETSVLSICLTIGTLHYVIPSGVAAAVSTRVSNKLGAGNPQVARVSVLAGLCLWLVESAFFSTLLFTCRNIIGYTFSNSKEVVDYVADISPLLCLSFILDGLTAVLNGVARGCGWQHIGALINVVAYYLVGAPVGVYLAFSREWNGKGLWCGVMVGSAVQATLLAIVTASMNWKEQVRVCYILVF

SEQ ID NO: 70361 - protein, 416 aa, Arabidopsis thaliana
  peptide (1)..(416): Ceres Seq. ID no. 2705497
  misc_feature (1)..(416): Homolog of NCBI NO: 25411053 NR Description: hypothetical protein At2g04080 [imported] - thaliana >gi|4734007|gb|AAD28684.1| hypothetical protein
  misc_feature (1)..(407): Homolog of NCBI NO: 30678096 NR Description: MATE efflux protein - related [Arabidopsis >gi|26451343|dbj|BAC42772.1| unknown protein [Arabidopsis >gi|28973213|gb|AAO63931.1| unknown protein [Arabidopsis
  misc_feature (1)..(416): Homolog of NCBI NO: 15228081 NR Description: hypothetical protein; protein id: At2g04070.1
  misc_feature (1)..(407): Homolog of NCBI NO: 15228073 NR Description: hypothetical protein; protein id: At2g04050.1
  misc_feature (1)..(407): Homolog of NCBI NO: 15228071 NR Description: hypothetical protein; protein id: At2g04040.1
  misc_feature (1)..(407): Homolog of NCBI NO: 22325453 NR Description: hypothetical protein; protein id: At2g04100.1, by cDNA: gi_20260453 [Arabidopsis thaliana]
  misc_feature (1)..(408): Homolog of NCBI NO: 15228085 NR Description: hypothetical protein; protein id: At2g04090.1
  misc_feature (1)..(410): Homolog of NCBI NO: 25411056 NR Description: hypothetical protein At2g04100 [imported] - thaliana >gi|4734005|gb|AAD28682.1| hypothetical protein
  misc_feature (1)..(409): Homolog of NCBI NO: 15223961 NR Description: hypothetical protein; protein id: At1g71140.1
  misc_feature (1)..(412): Homolog of NCBI NO: 25511632 NR Description: F9L1.11 protein - Arabidopsis thaliana Strong similarity to gi|4734005 F3L12.7 hypothetical protein from
MVAGHIGELELAGVALATSFTNVSGFSIMFGLVGALETLCGQAYGAEQYEKIGTYTYSAMASNIPICFIISILWIYIEKLLITLGQEPDISRVAGSYSLWLVPALFAHAIFLPLTRFLLAQGLVISLLYSAMTTLLFHIAVCWTLVFALGLGSNGAAIAISLSFWFYAVILSCHVRFFSSCEKTRGFVSNDFMSSIKQYFQYGVPSAGLICLEWWLFELLILCSGLLPNPKLETSVLSICLTIGTLHYVIPSGVAAAVSTRVSNKLGAGNPQVARVSVLAGLCLWLVESAFFSTLLFTCRNIIGYTFSNSKEVVDYVADISPLLCLSFILDGLTAVLNGVARGCGWQHIGALINVVAYYLVGAPVGVYLAFSREWNGKGLWCGVMVGSAVQATLLAIVTASMNWKEQVRVCYILVF

SEQ ID NO: 70362 - DNA, 837 bp, Arabidopsis thaliana
  misc_feature (1)..(837): Ceres Seq. ID no. 2705531
  misc_feature: MA Experiment ID: 20000314 Result: Up-regulated in Transcription
  misc_feature: MA Experiment 20000314 PARAMETER Experiment Name: At_14day_Shoots-Roots_Sub_P Parameter: Age (day) Value: 14
  misc_feature: MA Experiment 20000314 PARAMETER Experiment Name: At_14day_Shoots-Roots_Sub_P Parameter: Organism Value: A. thaliana
  misc_feature: MA Experiment 20000314 PARAMETER Experiment Name: At_14day_Shoots-Roots_Sub_P Parameter: Plant Line Value: WS
  misc_feature: MA Experiment 20000314 PARAMETER Experiment Name: At_14day_Shoots-Roots_Sub_P Parameter: Tissue Value: Roots vs. Whole Plant
atgtgtgaaaacgaggaatatcgggaacggtttccagacaaacatttcgatctcgagacggttctccaagcaaaagtcagacccatctgtgttgtccctgaaagaacattcatcgggtttttccatcgagagaaatcaaaggaagaagaagaaaaagaagatgttagtctagattttcttaaaggtgtaatgtcctttgacagtatctgggaagagatcatgaaacaagaaccagaagagtcggcaagcgaacatgtgatctacattgtaagctggaatgatcattacttcgtactccttgtgaaccacgatgcttattacatcatagacacgcttggagagagggtctatgagggttgcaaccaagcgtatgtcttgaaatttgaccaagatgcagagatcaaaagattaccatccgtcatcaaagacaacaaagccgacatgggaagccagaaacaaggtggtaagaacaagtatgagcaacccgaaagatcaaaagaatcagaagaacaaggagaagaagtagtagtgtgtagaggtaaagagtcatgtagagagtatataaagagctttctcgcagcgattccaatacagcaagtgaaagctgatatgaaggaaggactggtttcatcttttcatcaccgtcttcaaatagagctttactacaccaaacaccttcatcaccgccaacccaatatgtttgaatcctctacaaccaaagtaactgtgtcagaagctactgtgtctatgacagtggcttggttattggcgagccaattcagcaatagtggtgggtttggttgcgaaatggctgagcttttggggataaaagtttaa

SEQ ID NO: 70363 - protein, 278 aa, Arabidopsis thaliana
  peptide (1)..(278): Ceres Seq. ID no. 2705532
  misc_feature (1)..(278): Homolog of NCBI NO: 15226799 NR Description: unknown protein; protein id: At2g10560.1
  misc_feature (1)..(278): Homolog of NCBI NO: 15238352 NR Description: unknown protein; protein id: At5g04860.1 thaliana] >gi|9758461|dbj|BAB08990.1| gene_id:MUK11.18~unknown
  misc_feature (1)..(132): Homolog of NCBI NO: 25412320 NR Description: hypothetical protein At2g25460 [imported] -
  misc_feature (152)..(222): Homolog of NCBI NO: 25412320 NR Description: hypothetical protein At2g25460 [imported] -
  misc_feature (1)..(135): Homolog of NCBI NO: 34903512 NR Description: P0001B06.8 [Oryza sativa (japonica
  misc_feature (162)..(223): Homolog of NCBI NO: 34903512 NR Description: P0001B06.8 [Oryza sativa (japonica
  misc_feature (1)..(220): Homolog of NCBI NO: 15229852 NR Description: unknown protein; protein id: At3g11760.1 thaliana] >gi|6671932|gb|AAF23192.1|AC016795_5 unknown protein
  misc_feature (1)..(73): Homolog of NCBI NO: 17063176 NR Description: SYNC1 protein [Arabidopsis thaliana]
  misc_feature (1)..(73): Homolog of NCBI NO: 18400834 NR Description: expressed protein; protein id: At2g25460.1, by cDNA: gi_17063175 [Arabidopsis thaliana]
MCENEEYRERFPDKHFDLETVLQAKVRPICVVPERTFIGFFHREKSKEEEEKEDVSLDFLKGVMSFDSIWEEIMKQEPEESASEHVIYIVSWNDHYFVLLVNHDAYYIIDTLGERVYEGCNQAYVLKFDQDAEIKRLPSVIKDNKADMGSQKQGGKNKYEQPERSKESEEQGEEVVVCRGKESCREYIKSFLAAIPIQQVKADMKEGLVSSFHHRLQIELYYTKHLHHRQPNMFESSTTKVTVSEATVSMTVAWLLASQFSNSGGFGCEMAELLGIKV

SEQ ID NO: 70364 - protein, 215 aa, Arabidopsis thaliana
  peptide (1)..(215): Ceres Seq. ID no. 2705533
  misc_feature (1)..(215): Homolog of NCBI NO: 15226799 NR Description: unknown protein; protein id: At2g10560.1
  misc_feature (1)..(215): Homolog of NCBI NO: 15238352 NR Description: unknown protein; protein id: At5g04860.1 thaliana] >gi|9758461|dbj|BAB08990.1| gene_id:MUK11.18~unknown
  misc_feature (1)..(69): Homolog of NCBI NO: 25412320 NR Description: hypothetical protein At2g25460 [imported] -
  misc_feature (89)..(159): Homolog of NCBI NO: 25412320 NR Description: hypothetical protein At2g25460 [imported] -
  misc_feature (1)..(72): Homolog of NCBI NO: 34903512 NR Description: P0001B06.8 [Oryza sativa (japonica
  misc_feature (99)..(160): Homolog of NCBI NO: 34903512 NR Description: P0001B06.8 [Oryza sativa (japonica
  misc_feature (1)..(157): Homolog of NCBI NO: 15229852 NR Description: unknown protein; protein id: At3g11760.1 thaliana] >gi|6671932|gb|AAF23192.1|AC016795_5 unknown protein
MSFDSIWEEIMKQEPEESASEHVIYIVSWNDHYFVLLVNHDAYYIIDTLGERVYEGCNQAYVLKFDQDAEIKRLPSVIKDNKADMGSQKQGGKNKYEQPERSKESEEQGEEVVVCRGKESCREYIKSFLAAIPIQQVKADMKEGLVSSFHHRLQIELYYTKHLHHRQPNMFESSTTKVTVSEATVSMTVAWLLASQFSNSGGFGCEMAELLGIKV

SEQ ID NO: 70365 - protein, 205 aa, Arabidopsis thaliana
  peptide (1)..(205): Ceres Seq. ID no. 2705534
  misc_feature (1)..(205): Homolog of NCBI NO: 15226799 NR Description: unknown protein; protein id: At2g10560.1
  misc_feature (1)..(205): Homolog of NCBI NO: 15238352 NR Description: unknown protein; protein id: At5g04860.1 thaliana] >gi|9758461|dbj|BAB08990.1| gene_id:MUK11.18~unknown
  misc_feature (1)..(59): Homolog of NCBI NO: 25412320 NR Description: hypothetical protein At2g25460 [imported] -
  misc_feature (79)..(149): Homolog of NCBI NO: 25412320 NR Description: hypothetical protein At2g25460 [imported] -
  misc_feature (1)..(62): Homolog of NCBI NO: 34903512 NR Description: P0001B06.8 [Oryza sativa (japonica
  misc_feature (89)..(150): Homolog of NCBI NO: 34903512 NR Description: P0001B06.8 [Oryza sativa (japonica
  misc_feature (1)..(147): Homolog of NCBI NO: 15229852 NR Description: unknown protein; protein id: At3g11760.1 thaliana] >gi|6671932|gb|AAF23192.1|AC016795_5 unknown protein
MKQEPEESASEHVIYIVSWNDHYFVLLVNHDAYYIIDTLGERVYEGCNQAYVLKFDQDAEIKRLPSVIKDNKADMGSQKQGGKNKYEQPERSKESEEQGEEVVVCRGKESCREYIKSFLAAIPIQQVKADMKEGLVSSFHHRLQIELYYTKHLHHRQPNMFESSTTKVTVSEATVSMTVAWLLASQFSNSGGFGCEMAELLGIKV

SEQ ID NO: 70366 - DNA, 1677 bp, Arabidopsis thaliana
  misc_feature (1)..(1677): Ceres Seq. ID no. 2705651
  misc_feature: MA Experiment ID: 20000355 Result: Up-regulated in Transcription
  misc_feature: MA Experiment 20000355 PARAMETER Experiment Name: At_Siliques_Sub_P Parameter: Age (day) Value: 21
  misc_feature: MA Experiment 20000355 PARAMETER Experiment Name: At_Siliques_Sub_P Parameter: Organism Value: A. thaliana
  misc_feature: MA Experiment 20000355 PARAMETER Experiment Name: At_Siliques_Sub_P Parameter: Plant Line Value: WS
  misc_feature: MA Experiment 20000355 PARAMETER Experiment Name: At_Siliques_Sub_P Parameter: Tissue Value: Less Than 5mm Siliques vs. Whole Plant
  misc_feature: MA Experiment ID: 20000440 Result: Up-regulated in Transcription
  misc_feature: MA Experiment 20000440 PARAMETER Experiment Name: At_Closed-Flower__Sub_P Parameter: Tissue Value: Closed Flower vs. Whole Plant
atgtctctcaacgttgatcttgacgtatgtgttttggagagacccaatgtgtgttcttttaaaaagaggagttgctccaagttgagttgttccttgacgaagaagagaagaagtagcaaggtgatgtccgtggagatcttcgaggatgagcatgacgcggaggagttaaaggtggttgatgcattccgccaagtgcttattctcgatgaactacttccggacaaacatgatgattaccatatgatgcttaggtttttgaaggctagaaaatttgatcttgagaaaacaaatcaaatgtggtctgacatgctccgatggaggaaggagtttggtgctgacacagttatggaggattttgaatttaaggaaattgatgaagtgttgaaatactaccctcaaggacaccatggagtcgacaaggaaggaagaccggtgtacattgagaggctaggtcaagtagactctaccaagttgatgcaagtcacaaccatggatagatatgtgaactaccatgtgatggagtttgagaggactttcaatgttaagttcccagcatgctccatcgcggcaaagaagcacattgatcaaagtacaacaattcttgatgtccaaggagtggggctgaaaaacttcaacaaggcagcaagggatttgattacgcgtcttcaaaaggtcgatggtgacaactatccagagaccttgaacaggatgtttatcatcaatgctggctcaggattcaggatgttgtggaacacggttaagtctttccttgacccaaagactacagcaaagatccatgttcttggcaacaagtaccaaagcaagttgcttgaaataattgatgctagtgagctgcctgagttcttgggaggttcttgtacttgtgctgacaatgggggttgcatgcgctcggacaaaggaccatggaacaatccagatattatgaagagagttaataatggtgaccacatatgctcaaagagatctcaagctgataatgctggagagaatattatctctcaggggaataactctgcagttgaggaagctcctgaaactgaccagtcacagccctctccttgtcaaaatgtcgtggttgctcatccagcttggaacataccagaagctcacaaattttccctctcaaaaagggatgtttacgccattcaagaagcttgcaaagctacaaatgaaagtggaaggtctcctattttcactggagtcatggcttttgtaatgggtgtagtcaccatgattagagtgactaaaaacgttccaaggaagctaaccgagtcaactatatactctagcccggtttactgcgacgaaaactcgatgaacaagagctcgatgcatgggaagaaaatggcaacaacaaccatctcaggggaagatttcatggcggtcatgaaacgaatggctgagcttgagcagaaagtcacaaacttgagtgcacagccagcaactatgcctcctgaaaaggaagagatgcttaatgctgccattagccgagccgatttcttggaacaagaacttgctgcaaccaagaaggctcttgatgattctcttacccgacaagaggaccttgtggcatacgttgagagaaagaagaagaagaagaagctggtccgctttcaaatcaatgcctacttaactaatttttgttttggtgtttaa

SEQ ID NO: 70367 - protein, 558 aa, Arabidopsis thaliana
  peptide (1)..(558): Ceres Seq. ID no. 2705652
  misc_feature (132)..(318): Pfam Name: CRAL/TRIO domain Pfam Description: CRAL/TRIO domain
  misc_feature (3)..(545): Homolog of NCBI NO: 25407729 NR Description: hypothetical protein AT4g36490 [imported] - thaliana >gi|4006913|emb|CAB16843.1| hypothetical protein thaliana] >gi|7270597|emb|CAB80315.1| hypothetical protein
  misc_feature (19)..(542): Homolog of NCBI NO: 14517816 NR Description: phosphatidylinositol transfer-like protein II
  misc_feature (13)..(545): Homolog of NCBI NO: 18399733 NR Description: putative phosphatidylinositol phophatidylcholine protein; protein id: At2g21540.1, supported by cDNA: gi_16209641 thaliana] >gi|16209642|gb|AAL14382.1| At2g21540/F2G1.19
  misc_feature (19)..(409): Homolog of NCBI NO: 14486707 NR Description: phosphatidylinositol transfer-like protein IV
  misc_feature (1)..(558): Homolog of NCBI NO: 15224125 NR Description: putative phosphatidylinositol/phophatidylcholine protein; protein id: At2g18180.1 [Arabidopsis thaliana]
  misc_feature (14)..(545): Homolog of NCBI NO: 18419847 NR Description: expressed protein; protein id: At4g36490.1, by cDNA: gi_15215779 [Arabidopsis thaliana] C7A10_870/C7A10_870 [Arabidopsis thaliana]
  misc_feature (454)..(541): Homolog of NCBI NO: 14486707 NR Description: phosphatidylinositol transfer-like protein IV
  misc_feature (17)..(544): Homolog of NCBI NO: 15236152 NR Description: putative protein; protein id: At4g34580.1
  misc_feature (17)..(547): Homolog of NCBI NO: 38707281 NR Description: can of worms 1 protein [Arabidopsis thaliana]
  misc_feature (17)..(517): Homolog of NCBI NO: 15234966 NR Description: SEC14 - like protein; protein id: At4g39180.1
MSLNVDLDVCVLERPNVCSFKKRSCSKLSCSLTKKRRSSKVMSVEIFEDEHDAEELKVVDAFRQVLILDELLPDKHDDYHMMLRFLKARKFDLEKTNQMWSDMLRWRKEFGADTVMEDFEFKEIDEVLKYYPQGHHGVDKEGRPVYIERLGQVDSTKLMQVTTMDRYVNYHVMEFERTFNVKFPACSIAAKKHIDQSTTILDVQGVGLKNFNKAARDLITRLQKVDGDNYPETLNRMFIINAGSGFRMLWNTVKSFLDPKTTAKIHVLGNKYQSKLLEIIDASELPEFLGGSCTCADNGGCMRSDKGPWNNPDIMKRVNNGDHICSKRSQADNAGENIISQGNNSAVEEAPETDQSQPSPCQNVVVAHPAWNIPEAHKFSLSKRDVYAIQEACKATNESGRSPIFTGVMAFVMGVVTMIRVTKNVPRKLTESTIYSSPVYCDENSMNKSSMHGKKMATTTISGEDFMAVMKRMAELEQKVTNLSAQPATMPPEKEEMLNAAISRADFLEQELAATKKALDDSLTRQEDLVAYVERKKKKKKLVRFQINAYLTNFCFGV

SEQ ID NO: 70368 - protein, 517 aa, Arabidopsis thaliana
  peptide (1)..(517): Ceres Seq. ID no. 2705653
  misc_feature (91)..(277): Pfam Name: CRAL/TRIO domain Pfam Description: CRAL/TRIO domain
  misc_feature (1)..(517): Homolog of NCBI NO: 15224125 NR Description: putative phosphatidylinositol/phophatidylcholine protein; protein id: At2g18180.1 [Arabidopsis thaliana]
  misc_feature (1)..(504): Homolog of NCBI NO: 18419847 NR Description: expressed protein; protein id: At4g36490.1, by cDNA: gi_15215779 [Arabidopsis thaliana] C7A10_870/C7A10_870 [Arabidopsis thaliana]
  misc_feature (1)..(504): Homolog of NCBI NO: 25407729 NR Description: hypothetical protein AT4g36490 [imported] - thaliana >gi|4006913|emb|CAB16843.1| hypothetical protein thaliana] >gi|7270597|emb|CAB80315.1| hypothetical protein
  misc_feature (1)..(501): Homolog of NCBI NO: 14517816 NR Description: phosphatidylinositol transfer-like protein II
  misc_feature (1)..(504): Homolog of NCBI NO: 18399733 NR Description: putative phosphatidylinositol phophatidylcholine protein; protein id: At2g21540.1, supported by cDNA: gi_16209641 thaliana] >gi|16209642|gb|AAL14382.1| At2g21540/F2G1.19
  misc_feature (1)..(368): Homolog of NCBI NO: 14486707 NR Description: phosphatidylinositol transfer-like protein IV
  misc_feature (413)..(500): Homolog of NCBI NO: 14486707 NR Description: phosphatidylinositol transfer-like protein IV
  misc_feature (1)..(503): Homolog of NCBI NO: 15236152 NR Description: putative protein; protein id: At4g34580.1
  misc_feature (1)..(506): Homolog of NCBI NO: 38707281 NR Description: can of worms 1 protein [Arabidopsis thaliana]
  misc_feature (1)..(476): Homolog of NCBI NO: 15234966 NR Description: SEC14 - like protein; protein id: At4g39180.1
MSVEIFEDEHDAEELKVVDAFRQVLILDELLPDKHDDYHMMLRFLKARKFDLEKTNQMWSDMLRWRKEFGADTVMEDFEFKEIDEVLKYYPQGHHGVDKEGRPVYIERLGQVDSTKLMQVTTMDRYVNYHVMEFERTFNVKFPACSIAAKKHIDQSTTILDVQGVGLKNFNKAARDLITRLQKVDGDNYPETLNRMFIINAGSGFRMLWNTVKSFLDPKTTAKIHVLGNKYQSKLLEIIDASELPEFLGGSCTCADNGGCMRSDKGPWNNPDIMKRVNNGDHICSKRSQADNAGENIISQGNNSAVEEAPETDQSQPSPCQNVVVAHPAWNIPEAHKFSLSKRDVYAIQEACKATNESGRSPIFTGVMAFVMGVVTMIRVTKNVPRKLTESTIYSSPVYCDENSMNKSSMHGKKMATTTISGEDFMAVMKRMAELEQKVTNLSAQPATMPPEKEEMLNAAISRADFLEQELAATKKALDDSLTRQEDLVAYVERKKKKKKLVRFQINAYLTNFCFGV

SEQ ID NO: 70369 - protein, 478 aa, Arabidopsis thaliana
  peptide (1)..(478): Ceres Seq. ID no. 2705654
  misc_feature (52)..(238): Pfam Name: CRAL/TRIO domain Pfam Description: CRAL/TRIO domain
  misc_feature (1)..(478): Homolog of NCBI NO: 15224125 NR Description: putative phosphatidylinositol/phophatidylcholine protein; protein id: At2g18180.1 [Arabidopsis thaliana]
  misc_feature (1)..(465): Homolog of NCBI NO: 18419847 NR Description: expressed protein; protein id: At4g36490.1, by cDNA: gi_15215779 [Arabidopsis thaliana] C7A10_870/C7A10_870 [Arabidopsis thaliana]
  misc_feature (1)..(465): Homolog of NCBI NO: 25407729 NR Description: hypothetical protein AT4g36490 [imported] - thaliana >gi|4006913|emb|CAB16843.1| hypothetical protein thaliana] >gi|7270597|emb|CAB80315.1| hypothetical protein
  misc_feature (1)..(462): Homolog of NCBI NO: 14517816 NR Description: phosphatidylinositol transfer-like protein II
  misc_feature (1)..(465): Homolog of NCBI NO: 18399733 NR Description: putative phosphatidylinositol phophatidylcholine protein; protein id: At2g21540.1, supported by cDNA: gi_16209641 thaliana] >gi|16209642|gb|AAL14382.1| At2g21540/F2G1.19
  misc_feature (1)..(329): Homolog of NCBI NO: 14486707 NR Description: phosphatidylinositol transfer-like protein IV
  misc_feature (374)..(461): Homolog of NCBI NO: 14486707 NR Description: phosphatidylinositol transfer-like protein IV
  misc_feature (1)..(464): Homolog of NCBI NO: 15236152 NR Description: putative protein; protein id: At4g34580.1
  misc_feature (1)..(467): Homolog of NCBI NO: 38707281 NR Description: can of worms 1 protein [Arabidopsis thaliana]
  misc_feature (1)..(437): Homolog of NCBI NO: 15234966 NR Description: SEC14 - like protein; protein id: At4g39180.1
MMLRFLKARKFDLEKTNQMWSDMLRWRKEFGADTVMEDFEFKEIDEVLKYYPQGHHGVDKEGRPVYIERLGQVDSTKLMQVTTMDRYVNYHVMEFERTFNVKFPACSIAAKKHIDQSTTILDVQGVGLKNFNKAARDLITRLQKVDGDNYPETLNRMFIINAGSGFRMLWNTVKSFLDPKTTAKIHVLGNKYQSKLLEIIDASELPEFLGGSCTCADNGGCMRSDKGPWNNPDIMKRVNNGDHICSKRSQADNAGENIISQGNNSAVEEAPETDQSQPSPCQNVVVAHPAWNIPEAHKFSLSKRDVYAIQEACKATNESGRSPIFTGVMAFVMGVVTMIRVTKNVPRKLTESTIYSSPVYCDENSMNKSSMHGKKMATTTISGEDFMAVMKRMAELEQKVTNLSAQPATMPPEKEEMLNAAISRADFLEQELAATKKALDDSLTRQEDLVAYVERKKKKKKLVRFQINAYLTNFCFGV

SEQ ID NO: 70370 - DNA, 2991 bp, Arabidopsis thaliana
  misc_feature (1)..(2991): Ceres Seq. ID no. 2705655
  misc_feature: MA Experiment ID: 20000171 Result: Up-regulated in Transcription
  misc_feature: MA Experiment 20000171 PARAMETER Experiment Name: At_42deg_Heat_P Parameter: Age (day) Value: 14
  misc_feature: MA Experiment 20000171 PARAMETER Experiment Name: At_42deg_Heat_P Parameter: Organism Value: A. thaliana
  misc_feature: MA Experiment 20000171 PARAMETER Experiment Name: At_42deg_Heat_P Parameter: Plant Line Value: WS
  misc_feature: MA Experiment 20000171 PARAMETER Experiment Name: At_42deg_Heat_P Parameter: Temperature (deg C) Value: 42 vs. 22
  misc_feature: MA Experiment 20000171 PARAMETER Experiment Name: At_42deg_Heat_P Parameter: Timepoint (hr) Value: 1
  misc_feature: MA Experiment 20000171 PARAMETER Experiment Name: At_42deg_Heat_P Parameter: Tissue Value: Aerial
atgtttccttcatcagatttctctttctcaccgtcgtcgctgttctcagcgtacgcatctttaaccggattcttgatgctctttagatcgatgctccatgatttcgtaccggagaagcttcgatcttacttctccagcttactcgaccggtttttcactccgaaatcaaagtatctcactgtgatcatcgacgagaacttcggattgaaccggaatcaagtcttcgacgcggcggagatgtatctcaggagcaagatcggaccggaaacagagcggttgcgagttggtaagatcccaaaacagaagcatttcacaatctctatcgaaagaggcgaagagatcctcgatactttcgaggagtcggaggtgaaatggagttatgttcaatcggagaacgagaaaggagataaagtgaaacgttactacgagctcacattcgagaagaagcttagagacaaagtcttgaactcttatttaacccacgttgtagccgaatccgaggagatcaagaggaatctgagagtggtgaagctttatagcagagatgtgtatgctagtgatgatgatgatggaatggctggtgggaattggggatgtatcaatctcgagcatccgtctacgttcgatacgttggcgatggatccgaatgcgaagaagaagatcatcgatgatttggagaggtttttgaagaggaaggagttttacaaaagagttggtaaagcttggaaacgaggttacttgttgtatgggccaccaggaactggtaaatctagtttgattgctgcgatggcgaattatcttaagtttgatgtgtttgatcttgagcttagtagtatttatgacaatggtgagttgaagagggttttgttatctacgacgaatcgttcgattttggttattgaggatattgattgtaatgctgaagtgagagatagggaagctgagaatcaagaagatgaacaaattaagggaaaggtgactctatcagggattctgaatttcattgatggtttatggtcgagtttcggagatgagagaatcattgtgttcacgacgaatcacaaagaacggcttgatcctgctctgctacgtcctggaagaatggatgtgcatatcaacatgtcttattgtacaggtttaggatttaggacattggtctctaactaccttggtttagatggcttaaaccatcctctttgcgaggaaatcgaggcgctggtcgattctactgaagttactccagctgagttagctgaagagctgatgcaagacgatgatactgacgttgttcttcgtggagtaataagctttgttgagaagaggaaggttgagagaagcaagactaagaaggaggtttctatttgtaaagcaactgatgatgacgaaaaacagaatggttctttgggttgtgtaaagaagaagaagaaagggggtaaacagaaaggtaaagggaaagctaggtcaaaggaaattccgcaagataattgtggatttcgattaacagagatgtttccttcaatatccaatatctctttatcaccatcgtcgctgtttacagcgtacgcgtccttaaccggattcttgatgctctttagatcactgttcaatgatgaagtaccggagaggctccgatcatacatcaccgacttactcaaccggtttttcactccgaaatcaaagaatttgactatggttatcgacgagatcatcggatttaagaggaaccaagtgttcgacgcggcagaggtgtacctccggaacaaaatcggacccgagacagcccgtttacgagtaggtaaactccctaagcagaagcacttcacaatctatatcgagaaaggagaagagatcttggatactttcgagaatagcgagctgagatggacttatgttgaatcagagaacgaggcaagccaaaaagagaaacgttactacgagctcacgttcgagaagaagcttagagataaagtcatgaactcttatttgagccacgttgtagctgaatctgaggagactaagagggatctgagagcggtgaagctttatagccgagatgtgcgtgcgagcaaagatgatgacggaatggctggtgccggttggggatgtatcaatcttgagcatccatcgacattcgaaacattggcaatggacccgggtgcgaagaagaagataatcgatgatatggagaggtttttgaagagaagagagttttacaaaagagttggtaaagcttggaaacgaggttacttgttgtatgggccaccaggaactggtaaatctagtttgattgctgccatggcgaattatcttaagtttgatgtgtttgatcttgagcttagtagtatttatgaaaatgctcaactaaagagcatcttgttatcaaccacgaaccgttcgattttggttattgaggatatcgattgtagtagtgccgaggtggtagacagggaagctgatgagtatcaagaatacgaagaaggttattatggaagggtgactctatcagggcttttgaatttcgttgatgggttgtggtcaagttttggggatgagagaatcattgtgttcacgacgaatcacaaagaacggcttgaccctgctctgttacgtcctggaagaatggatatgcatatcaacatgtcttactgtacaggtttagggtttaggacattggtctctaattacctcggtttaggtggcttaaaccatcctctttgcgaggaaatcgaggcgctgatcgattccactgaggtgactccggctgagttagctgaagagttgatgcaagaagatgatactgatgttgtccttcgtggagtagttagctttgttgagaatagaaaggtcgagataagcaaaaccaaggagctggaaggttctacttgtagaaaacttgatggtgacgataaacacaatgtttcttctaccaatgatttgaagaagacgaagaagaagaagaaaggtggaaaaggaaaagcgaaaggaaactag

SEQ ID NO: 70371 - protein, 996 aa, Arabidopsis thaliana
  peptide (1)..(996): Ceres Seq. ID no. 2705656
  misc_feature (748)..(878): Pfam Name: ATPase family associated with various cellular Pfam Description: ATPase family associated with various cellular
  misc_feature (503)..(996): Homolog of NCBI NO: 30680264 NR Description: AAA-type ATPase family [Arabidopsis thaliana]
  misc_feature (1)..(489): Homolog of NCBI NO: 30680274 NR Description: AAA-type ATPase family [Arabidopsis thaliana]
  misc_feature (1)..(484): Homolog of NCBI NO: 30680264 NR Description: AAA-type ATPase family [Arabidopsis thaliana]
  misc_feature (503)..(995): Homolog of NCBI NO: 30680274 NR Description: AAA-type ATPase family [Arabidopsis thaliana]
  misc_feature (1)..(452): Homolog of NCBI NO: 30686502 NR Description: BCS1 - like protein [Arabidopsis thaliana]
  misc_feature (1)..(447): Homolog of NCBI NO: 30693380 NR Description: AAA-type ATPase family [Arabidopsis thaliana]
  misc_feature (1)..(447): Homolog of NCBI NO: 39104562 NR Description: putative BCS1 protein [Arabidopsis thaliana]
  misc_feature (1)..(322): Homolog of NCBI NO: 7485704 NR Description: hypothetical protein F18B3.220 - Arabidopsis >gi|4835245|emb|CAB42923.1| putative mitochondrial protein
  misc_feature (831)..(955): Homolog of NCBI NO: 7485704 NR Description: hypothetical protein F18B3.220 - Arabidopsis >gi|4835245|emb|CAB42923.1| putative mitochondrial protein
  misc_feature (325)..(447): Homolog of NCBI NO: 7485704 NR Description: hypothetical protein F18B3.220 - Arabidopsis >gi|4835245|emb|CAB42923.1| putative mitochondrial protein
MFPSSDFSFSPSSLFSAYASLTGFLMLFRSMLHDFVPEKLRSYFSSLLDRFFTPKSKYLTVIIDENFGLNRNQVFDAAEMYLRSKIGPETERLRVGKIPKQKHFTISIERGEEILDTFEESEVKWSYVQSENEKGDKVKRYYELTFEKKLRDKVLNSYLTHVVAESEEIKRNLRVVKLYSRDVYASDDDDGMAGGNWGCINLEHPSTFDTLAMDPNAKKKIIDDLERFLKRKEFYKRVGKAWKRGYLLYGPPGTGKSSLIAAMANYLKFDVFDLELSSIYDNGELKRVLLSTTNRSILVIEDIDCNAEVRDREAENQEDEQIKGKVTLSGILNFIDGLWSSFGDERIIVFTTNHKERLDPALLRPGRMDVHINMSYCTGLGFRTLVSNYLGLDGLNHPLCEEIEALVDSTEVTPAELAEELMQDDDTDVVLRGVISFVEKRKVERSKTKKEVSICKATDDDEKQNGSLGCVKKKKKGGKQKGKGKARSKEIPQDNCGFRLTEMFPSISNISLSPSSLFTAYASLTGFLMLFRSLFNDEVPERLRSYITDLLNRFFTPKSKNLTMVIDEIIGFKRNQVFDAAEVYLRNKIGPETARLRVGKLPKQKHFTIYIEKGEEILDTFENSELRWTYVESENEASQKEKRYYELTFEKKLRDKVMNSYLSHVVAESEETKRDLRAVKLYSRDVRASKDDDGMAGAGWGCINLEHPSTFETLAMDPGAKKKIIDDMERFLKRREFYKRVGKAWKRGYLLYGPPGTGKSSLIAAMANYLKFDVFDLELSSIYENAQLKSILLSTTNRSILVIEDIDCSSAEVVDREADEYQEYEEGYYGRVTLSGLLNFVDGLWSSFGDERIIVFTTNHKERLDPALLRPGRMDMHINMSYCTGLGFRTLVSNYLGLGGLNHPLCEEIEALIDSTEVTPAELAEELMQEDDTDVVLRGVVSFVENRKVEISKTKELEGSTCRKLDGDDKHNVSSTNDLKKTKKKKKGGKGKAKGN

SEQ ID NO: 70372 - protein, 971 aa, Arabidopsis thaliana
  peptide (1)..(971): Ceres Seq. ID no. 2705657
  misc_feature (723)..(853): Pfam Name: ATPase family associated with various cellular Pfam Description: ATPase family associated with various cellular
  misc_feature (478)..(971): Homolog of NCBI NO: 30680264 NR Description: AAA-type ATPase family [Arabidopsis thaliana]
  misc_feature (1)..(464): Homolog of NCBI NO: 30680274 NR Description: AAA-type ATPase family [Arabidopsis thaliana]
  misc_feature (1)..(459): Homolog of NCBI NO: 30680264 NR Description: AAA-type ATPase family [Arabidopsis thaliana]
  misc_feature (478)..(970): Homolog of NCBI NO: 30680274 NR Description: AAA-type ATPase family [Arabidopsis thaliana]
  misc_feature (1)..(427): Homolog of NCBI NO: 30686502 NR Description: BCS1 - like protein [Arabidopsis thaliana]
  misc_feature (1)..(422): Homolog of NCBI NO: 30693380 NR Description: AAA-type ATPase family [Arabidopsis thaliana]
  misc_feature (1)..(422): Homolog of NCBI NO: 39104562 NR Description: putative BCS1 protein [Arabidopsis thaliana]
  misc_feature (1)..(297): Homolog of NCBI NO: 7485704 NR Description: hypothetical protein F18B3.220 - Arabidopsis >gi|4835245|emb|CAB42923.1| putative mitochondrial protein
  misc_feature (806)..(930): Homolog of NCBI NO: 7485704 NR Description: hypothetical protein F18B3.220 - Arabidopsis >gi|4835245|emb|CAB42923.1| putative mitochondrial protein
  misc_feature (300)..(422): Homolog of NCBI NO: 7485704 NR Description: hypothetical protein F18B3.220 - Arabidopsis >gi|4835245|emb|CAB42923.1| putative mitochondrial protein
MLFRSMLHDFVPEKLRSYFSSLLDRFFTPKSKYLTVIIDENFGLNRNQVFDAAEMYLRSKIGPETERLRVGKIPKQKHFTISIERGEEILDTFEESEVKWSYVQSENEKGDKVKRYYELTFEKKLRDKVLNSYLTHVVAESEEIKRNLRVVKLYSRDVYASDDDDGMAGGNWGCINLEHPSTFDTLAMDPNAKKKIIDDLERFLKRKEFYKRVGKAWKRGYLLYGPPGTGKSSLIAAMANYLKFDVFDLELSSIYDNGELKRVLLSTTNRSILVIEDIDCNAEVRDREAENQEDEQIKGKVTLSGILNFIDGLWSSFGDERIIVFTTNHKERLDPALLRPGRMDVHINMSYCTGLGFRTLVSNYLGLDGLNHPLCEEIEALVDSTEVTPAELAEELMQDDDTDVVLRGVISFVEKRKVERSKTKKEVSICKATDDDEKQNGSLGCVKKKKKGGKQKGKGKARSKEIPQDNCGFRLTEMFPSISNISLSPSSLFTAYASLTGFLMLFRSLFNDEVPERLRSYITDLLNRFFTPKSKNLTMVIDEIIGFKRNQVFDAAEVYLRNKIGPETARLRVGKLPKQKHFTIYIEKGEEILDTFENSELRWTYVESENEASQKEKRYYELTFEKKLRDKVMNSYLSHVVAESEETKRDLRAVKLYSRDVRASKDDDGMAGAGWGCINLEHPSTFETLAMDPGAKKKIIDDMERFLKRREFYKRVGKAWKRGYLLYGPPGTGKSSLIAAMANYLKFDVFDLELSSIYENAQLKSILLSTTNRSILVIEDIDCSSAEVVDREADEYQEYEEGYYGRVTLSGLLNFVDGLWSSFGDERIIVFTTNHKERLDPALLRPGRMDMHINMSYCTGLGFRTLVSNYLGLGGLNHPLCEEIEALIDSTEVTPAELAEELMQEDDTDVVLRGVVSFVENRKVEISKTKELEGSTCRKLDGDDKHNVSSTNDLKKTKKKKKGGKGKAKGN

SEQ ID NO: 70373 - protein, 966 aa, Arabidopsis thaliana
  peptide (1)..(966): Ceres Seq. ID no. 2705658
  misc_feature (718)..(848): Pfam Name: ATPase family associated with various cellular Pfam Description: ATPase family associated with various cellular
  misc_feature (473)..(966): Homolog of NCBI NO: 30680264 NR Description: AAA-type ATPase family [Arabidopsis thaliana]
  misc_feature (1)..(459): Homolog of NCBI NO: 30680274 NR Description: AAA-type ATPase family [Arabidopsis thaliana]
  misc_feature (1)..(454): Homolog of NCBI NO: 30680264 NR Description: AAA-type ATPase family [Arabidopsis thaliana]
  misc_feature (473)..(965): Homolog of NCBI NO: 30680274 NR Description: AAA-type ATPase family [Arabidopsis thaliana]
  misc_feature (1)..(422): Homolog of NCBI NO: 30686502 NR Description: BCS1 - like protein [Arabidopsis thaliana]
  misc_feature (1)..(417): Homolog of NCBI NO: 30693380 NR Description: AAA-type ATPase family [Arabidopsis thaliana]
  misc_feature (1)..(417): Homolog of NCBI NO: 39104562 NR Description: putative BCS1 protein [Arabidopsis thaliana]
  misc_feature (1)..(292): Homolog of NCBI NO: 7485704 NR Description: hypothetical protein F18B3.220 - Arabidopsis >gi|4835245|emb|CAB42923.1| putative mitochondrial protein
  misc_feature (801)..(925): Homolog of NCBI NO: 7485704 NR Description: hypothetical protein F18B3.220 - Arabidopsis >gi|4835245|emb|CAB42923.1| putative mitochondrial protein
  misc_feature (295)..(417): Homolog of NCBI NO: 7485704 NR Description: hypothetical protein F18B3.220 - Arabidopsis >gi|4835245|emb|CAB42923.1| putative mitochondrial protein
MLHDFVPEKLRSYFSSLLDRFFTPKSKYLTVIIDENFGLNRNQVFDAAEMYLRSKIGPETERLRVGKIPKQKHFTISIERGEEILDTFEESEVKWSYVQSENEKGDKVKRYYELTFEKKLRDKVLNSYLTHVVAESEEIKRNLRVVKLYSRDVYASDDDDGMAGGNWGCINLEHPSTFDTLAMDPNAKKKIIDDLERFLKRKEFYKRVGKAWKRGYLLYGPPGTGKSSLIAAMANYLKFDVFDLELSSIYDNGELKRVLLSTTNRSILVIEDIDCNAEVRDREAENQEDEQIKGKVTLSGILNFIDGLWSSFGDERIIVFTTNHKERLDPALLRPGRMDVHINMSYCTGLGFRTLVSNYLGLDGLNHPLCEEIEALVDSTEVTPAELAEELMQDDDTDVVLRGVISFVEKRKVERSKTKKEVSICKATDDDEKQNGSLGCVKKKKKGGKQKGKGKARSKEIPQDNCGFRLTEMFPSISNISLSPSSLFTAYASLTGFLMLFRSLFNDEVPERLRSYITDLLNRFFTPKSKNLTMVIDEIIGFKRNQVFDAAEVYLRNKIGPETARLRVGKLPKQKHFTIYIEKGEEILDTFENSELRWTYVESENEASQKEKRYYELTFEKKLRDKVMNSYLSHVVAESEETKRDLRAVKLYSRDVRASKDDDGMAGAGWGCINLEHPSTFETLAMDPGAKKKIIDDMERFLKRREFYKRVGKAWKRGYLLYGPPGTGKSSLIAAMANYLKFDVFDLELSSIYENAQLKSILLSTTNRSILVIEDIDCSSAEVVDREADEYQEYEEGYYGRVTLSGLLNFVDGLWSSFGDERIIVFTTNHKERLDPALLRPGRMDMHINMSYCTGLGFRTLVSNYLGLGGLNHPLCEEIEALIDSTEVTPAELAEELMQEDDTDVVLRGVVSFVENRKVEISKTKELEGSTCRKLDGDDKHNVSSTNDLKKTKKKKKGGKGKAKGN

SEQ ID NO: 70374 - DNA, 2361 bp, Arabidopsis thaliana
  misc_feature (1)..(2361): Ceres Seq. ID no. 2705693
  misc_feature: MA Experiment ID: 20000306 Result: Down-regulated in Transcription
  misc_feature: MA Experiment 20000306 PARAMETER Experiment Name: At_Germinating_Seeds_Sub_P Parameter: Age (hr) Value: 6 vs. 0
  misc_feature: MA Experiment 20000306 PARAMETER Experiment Name: At_Germinating_Seeds_Sub_P Parameter: Organism Value: A. thaliana
  misc_feature: MA Experiment 20000306 PARAMETER Experiment Name: At_Germinating_Seeds_Sub_P Parameter: Plant Line Value: WS
  misc_feature: MA Experiment 20000306 PARAMETER Experiment Name: At_Germinating_Seeds_Sub_P Parameter: Tissue Value: Germinating Seeds
  misc_feature: MA Experiment ID: 20000307 Result: Down-regulated in Transcription
  misc_feature: MA Experiment 20000307 PARAMETER Experiment Name: At_Germinating_Seeds_Sub_P Parameter: Age (hr) Value: 24 vs. 0
  misc_feature: MA Experiment 20000307 PARAMETER Experiment Name: At_Germinating_Seeds_Sub_P Parameter: Organism Value: A. thaliana
  misc_feature: MA Experiment 20000307 PARAMETER Experiment Name: At_Germinating_Seeds_Sub_P Parameter: Plant Line Value: WS
  misc_feature: MA Experiment 20000307 PARAMETER Experiment Name: At_Germinating_Seeds_Sub_P Parameter: Tissue Value: Germinating Seeds
atggatgctccggttccactctctttatctactctgttagaactctgcaccaatctcttgcaaaaatctgtaaacaagtccaatggtcgtttcacagcgcaattggttcattgccgtgttatcaaatcgggtcttatgttcagcgtctacctgatgaataatctcatgaacgtctactcaaaaactggttatgctcttcacgcacgcaagctgttcgacgaaatgcctctaagaacagctttttcatggaacacggttctttcggcttattctaaacgaggagatatggattcgacttgtgagttctttgatcagttgcctcaaagggattcggtttcgtggactacgatgattgttgggtataagaacattggtcaatatcataaggctataagagttatgggggatatggtcaaggaagggattgagccgacgcagtttacgcttacgaatgtgcttgcatcggtggctgcaacgcggtgtatggaaacaggtaaaaaggttcattctttcatcgttaagcttggtcttcgcggtaacgtttctgtgtcgaattcactgcttaatatgtatgcaaaatgtggtgatccaatgatggcaaaatttgttttcgatagaatggttgttagagatatctcaagctggaatgctatgattgcgttacatatgcaggtcggtcaaatggatcttgctatggcgcagttcgagcaaatggctgagcgagatatagtcacttggaattctatgatttctggtttcaatcagagagggtatgatctcagagctctagatatcttttcgaagatgctgagggattctctgttgtcgccggatagattcactctggcgagtgtgttatctgcttgtgccaatcttgagaaactttgtattgggaagcagattcattcgcacattgttactacagggtttgatatttccggaatcgtgttaaatgcattgatctcgatgtattcgaggtgtggaggggtcgagactgcccggagactgatagaacaaagaggaaccaaagatctcaagattgaaggttttacagctttacttgatgggtacattaagcttggagatatgaatcaagctaagaatatatttgtttcgttgaaagatcgtgatgtagtcgcatggaccgccatgattgtaggatatgagcaacacggttcgtatggtgaagctataaaccttttcagatcaatggttggaggagggcagagaccaaacagttacactcttgcagcaatgttaagtgtagcttcaagtttggcatcattgagccatggcaagcaaatccatgggagtgctgtaaagtcaggggaaatttattcagtttctgtcagcaatgcattgataacaatgtatgcaaaggcgggtaacattacatcggcaagccgggcatttgatttgatacgctgtgagagggatacagtatcgtggacatccatgattatcgcgttggcacagcacggtcacgcagaagaagcacttgagctttttgagacaatgctgatggaaggactaagacctgatcacataacatatgttggtgttttctctgcctgtactcatgccggtttggtcaaccaaggtcgtcaatacttcgatatgatgaaggacgttgataagattatacctacccttagccactatgcttgtatggtggacctgtttggacgtgctggtttattgcaggaagcacaagagttcatcgaaaagatgcctattgagcctgatgtagtgacatggggttcactgctttctgcttgcagagttcacaagaacatcgatcttgggaaagttgcagcagagagattgcttcttctcgagccagagaacagcggggcatactcagccttggctaacttatactcagcttgtggaaaatgggaagaagctgctaagataagaaaatcaatgaaagatggaagagtaaagaaggaacaagggtttagctggattgaagtgaagcataaagtccatgtctttggagtggaagacgggactcatccagagaagaacgagatctacatgaccatgaagaagatttgggacgagatcaagaaaatgggttatgttcccgacacagcttctgtactacacgacctcgaagaagaggttaaagaacagattctaaggcaccacagcgagaaactagcaatcgcatttggactaattagcactccggataaaaccacattgaggatcatgaagaatctcagagtgtgcaatgattgccacacggctataaagttcatttccaagcttgtgggaagggaaatcatagtgagagatacaacaagatttcaccatttcaaagatgggttttgttcttgccgagattattggtga

SEQ ID NO: 70375 - protein, 786 aa, Arabidopsis thaliana
  peptide (1)..(786): Ceres Seq. ID no. 2705694
  misc_feature (552)..(586): Pfam Name: PPR repeat Pfam Description: PPR repeat
  misc_feature (12)..(786): Homolog of NCBI NO: 34896896 NR Description: hypothetical protein [Oryza sativa (japonica group)] >gi|24899461|gb|AAN65031.1| hypothetical protein [Oryza
  misc_feature (13)..(786): Homolog of NCBI NO: 15222566 NR Description: hypothetical protein; protein id: At1g25360.1
  misc_feature (36)..(786): Homolog of NCBI NO: 34393605 NR Description: pentatricopeptide (PPR) repeat-containing
  misc_feature (351)..(786): Homolog of NCBI NO: 15226200 NR Description: putative selenium-binding protein; protein id:
  misc_feature (163)..(374): Homolog of NCBI NO: 15226200 NR Description: putative selenium-binding protein; protein id:
  misc_feature (60)..(786): Homolog of NCBI NO: 15223802 NR Description: hypothetical protein; protein id: At1g20230.1
  misc_feature (344)..(786): Homolog of NCBI NO: 37535570 NR Description: hypothetical protein [Oryza sativa (japonica group)] >gi|16905194|gb|AAL31064.1| hypothetical protein [Oryza >gi|31432781|gb|AAP54374.1| hypothetical protein [Oryza sativa
  misc_feature (61)..(244): Homolog of NCBI NO: 37535570 NR Description: hypothetical protein [Oryza sativa (japonica group)] >gi|16905194|gb|AAL31064.1| hypothetical protein [Oryza >gi|31432781|gb|AAP54374.1| hypothetical protein [Oryza sativa
  misc_feature (83)..(786): Homolog of NCBI NO: 15235498 NR Description: hypothetical protein; protein id: At4g02750.1
  misc_feature (205)..(786): Homolog of NCBI NO: 15239745 NR Description: selenium-binding protein-like; protein id:
MDAPVPLSLSTLLELCTNLLQKSVNKSNGRFTAQLVHCRVIKSGLMFSVYLMNNLMNVYSKTGYALHARKLFDEMPLRTAFSWNTVLSAYSKRGDMDSTCEFFDQLPQRDSVSWTTMIVGYKNIGQYHKAIRVMGDMVKEGIEPTQFTLTNVLASVAATRCMETGKKVHSFIVKLGLRGNVSVSNSLLNMYAKCGDPMMAKFVFDRMVVRDISSWNAMIALHMQVGQMDLAMAQFEQMAERDIVTWNSMISGFNQRGYDLRALDIFSKMLRDSLLSPDRFTLASVLSACANLEKLCIGKQIHSHIVTTGFDISGIVLNALISMYSRCGGVETARRLIEQRGTKDLKIEGFTALLDGYIKLGDMNQAKNIFVSLKDRDVVAWTAMIVGYEQHGSYGEAINLFRSMVGGGQRPNSYTLAAMLSVASSLASLSHGKQIHGSAVKSGEIYSVSVSNALITMYAKAGNITSASRAFDLIRCERDTVSWTSMIIALAQHGHAEEALELFETMLMEGLRPDHITYVGVFSACTHAGLVNQGRQYFDMMKDVDKIIPTLSHYACMVDLFGRAGLLQEAQEFIEKMPIEPDVVTWGSLLSACRVHKNIDLGKVAAERLLLLEPENSGAYSALANLYSACGKWEEAAKIRKSMKDGRVKKEQGFSWIEVKHKVHVFGVEDGTHPEKNEIYMTMKKIWDEIKKMGYVPDTASVLHDLEEEVKEQILRHHSEKLAIAFGLISTPDKTTLRIMKNLRVCNDCHTAIKFISKLVGREIIVRDTTRFHHFKDGFCSCRDYW

SEQ ID NO: 70376 - protein, 741 aa, Arabidopsis thaliana
  peptide (1)..(741): Ceres Seq. ID no. 2705695
  misc_feature (507)..(541): Pfam Name: PPR repeat Pfam Description: PPR repeat
  misc_feature (1)..(741): Homolog of NCBI NO: 34896896 NR Description: hypothetical protein [Oryza sativa (japonica group)] >gi|24899461|gb|AAN65031.1| hypothetical protein [Oryza
  misc_feature (1)..(741): Homolog of NCBI NO: 15222566 NR Description: hypothetical protein; protein id: At1g25360.1
  misc_feature (1)..(741): Homolog of NCBI NO: 34393605 NR Description: pentatricopeptide (PPR) repeat-containing
  misc_feature (306)..(741): Homolog of NCBI NO: 15226200 NR Description: putative selenium-binding protein; protein id:
  misc_feature (118)..(329): Homolog of NCBI NO: 15226200 NR Description: putative selenium-binding protein; protein id:
  misc_feature (15)..(741): Homolog of NCBI NO: 15223802 NR Description: hypothetical protein; protein id: At1g20230.1
  misc_feature (299)..(741): Homolog of NCBI NO: 37535570 NR Description: hypothetical protein [Oryza sativa (japonica group)] >gi|16905194|gb|AAL31064.1| hypothetical protein [Oryza >gi|31432781|gb|AAP54374.1| hypothetical protein [Oryza sativa
  misc_feature (16)..(199): Homolog of NCBI NO: 37535570 NR Description: hypothetical protein [Oryza sativa (japonica group)] >gi|16905194|gb|AAL31064.1| hypothetical protein [Oryza >gi|31432781|gb|AAP54374.1| hypothetical protein [Oryza sativa
  misc_feature (38)..(741): Homolog of NCBI NO: 15235498 NR Description: hypothetical protein; protein id: At4g02750.1
  misc_feature (160)..(741): Homolog of NCBI NO: 15239745 NR Description: selenium-binding protein-like; protein id:
MFSVYLMNNLMNVYSKTGYALHARKLFDEMPLRTAFSWNTVLSAYSKRGDMDSTCEFFDQLPQRDSVSWTTMIVGYKNIGQYHKAIRVMGDMVKEGIEPTQFTLTNVLASVAATRCMETGKKVHSFIVKLGLRGNVSVSNSLLNMYAKCGDPMMAKFVFDRMVVRDISSWNAMIALHMQVGQMDLAMAQFEQMAERDIVTWNSMISGFNQRGYDLRALDIFSKMLRDSLLSPDRFTLASVLSACANLEKLCIGKQIHSHIVTTGFDISGIVLNALISMYSRCGGVETARRLIEQRGTKDLKIEGFTALLDGYIKLGDMNQAKNIFVSLKDRDVVAWTAMIVGYEQHGSYGEAINLFRSMVGGGQRPNSYTLAAMLSVASSLASLSHGKQIHGSAVKSGEIYSVSVSNALITMYAKAGNITSASRAFDLIRCERDTVSWTSMIIALAQHGHAEEALELFETMLMEGLRPDHITYVGVFSACTHAGLVNQGRQYFDMMKDVDKIIPTLSHYACMVDLFGRAGLLQEAQEFIEKMPIEPDVVTWGSLLSACRVHKNIDLGKVAAERLLLLEPENSGAYSALANLYSACGKWEEAAKIRKSMKDGRVKKEQGFSWIEVKHKVHVFGVEDGTHPEKNEIYMTMKKIWDEIKKMGYVPDTASVLHDLEEEVKEQILRHHSEKLAIAFGLISTPDKTTLRIMKNLRVCNDCHTAIKFISKLVGREIIVRDTTRFHHFKDGFCSCRDYW

SEQ ID NO: 70377 - protein, 735 aa, Arabidopsis thaliana
  peptide (1)..(735): Ceres Seq. ID no. 2705696
  misc_feature (501)..(535): Pfam Name: PPR repeat Pfam Description: PPR repeat
  misc_feature (1)..(735): Homolog of NCBI NO: 34896896 NR Description: hypothetical protein [Oryza sativa (japonica group)] >gi|24899461|gb|AAN65031.1| hypothetical protein [Oryza
  misc_feature (1)..(735): Homolog of NCBI NO: 15222566 NR Description: hypothetical protein; protein id: At1g25360.1
  misc_feature (1)..(735): Homolog of NCBI NO: 34393605 NR Description: pentatricopeptide (PPR) repeat-containing
  misc_feature (300)..(735): Homolog of NCBI NO: 15226200 NR Description: putative selenium-binding protein; protein id:
  misc_feature (112)..(323): Homolog of NCBI NO: 15226200 NR Description: putative selenium-binding protein; protein id:
  misc_feature (9)..(735): Homolog of NCBI NO: 15223802 NR Description: hypothetical protein; protein id: At1g20230.1
  misc_feature (293)..(735): Homolog of NCBI NO: 37535570 NR Description: hypothetical protein [Oryza sativa (japonica group)] >gi|16905194|gb|AAL31064.1| hypothetical protein [Oryza >gi|31432781|gb|AAP54374.1| hypothetical protein [Oryza sativa
  misc_feature (10)..(193): Homolog of NCBI NO: 37535570 NR Description: hypothetical protein [Oryza sativa (japonica group)] >gi|16905194|gb|AAL31064.1| hypothetical protein [Oryza >gi|31432781|gb|AAP54374.1| hypothetical protein [Oryza sativa
  misc_feature (32)..(735): Homolog of NCBI NO: 15235498 NR Description: hypothetical protein; protein id: At4g02750.1
  misc_feature (154)..(735): Homolog of NCBI NO: 15239745 NR Description: selenium-binding protein-like; protein id:
MNNLMNVYSKTGYALHARKLFDEMPLRTAFSWNTVLSAYSKRGDMDSTCEFFDQLPQRDSVSWTTMIVGYKNIGQYHKAIRVMGDMVKEGIEPTQFTLTNVLASVAATRCMETGKKVHSFIVKLGLRGNVSVSNSLLNMYAKCGDPMMAKFVFDRMVVRDISSWNAMIALHMQVGQMDLAMAQFEQMAERDIVTWNSMISGFNQRGYDLRALDIFSKMLRDSLLSPDRFTLASVLSACANLEKLCIGKQIHSHIVTTGFDISGIVLNALISMYSRCGGVETARRLIEQRGTKDLKIEGFTALLDGYIKLGDMNQAKNIFVSLKDRDVVAWTAMIVGYEQHGSYGEAINLFRSMVGGGQRPNSYTLAAMLSVASSLASLSHGKQIHGSAVKSGEIYSVSVSNALITMYAKAGNITSASRAFDLIRCERDTVSWTSMIIALAQHGHAEEALELFETMLMEGLRPDHITYVGVFSACTHAGLVNQGRQYFDMMKDVDKIIPTLSHYACMVDLFGRAGLLQEAQEFIEKMPIEPDVVTWGSLLSACRVHKNIDLGKVAAERLLLLEPENSGAYSALANLYSACGKWEEAAKIRKSMKDGRVKKEQGFSWIEVKHKVHVFGVEDGTHPEKNEIYMTMKKIWDEIKKMGYVPDTASVLHDLEEEVKEQILRHHSEKLAIAFGLISTPDKTTLRIMKNLRVCNDCHTAIKFISKLVGREIIVRDTTRFHHFKDGFCSCRDYW

SEQ ID NO: 70378 - DNA, 2148 bp, Arabidopsis thaliana
  misc_feature (1)..(2148): Ceres Seq. ID no. 2705789
  misc_feature: MA Experiment ID: 20000355 Result: Down-regulated in Transcription
  misc_feature: MA Experiment 20000355 PARAMETER Experiment Name: At_Siliques_Sub_P Parameter: Age (day) Value: 21
  misc_feature: MA Experiment 20000355 PARAMETER Experiment Name: At_Siliques_Sub_P Parameter: Organism Value: A. thaliana
  misc_feature: MA Experiment 20000355 PARAMETER Experiment Name: At_Siliques_Sub_P Parameter: Plant Line Value: WS
  misc_feature: MA Experiment 20000355 PARAMETER Experiment Name: At_Siliques_Sub_P Parameter: Tissue Value: Less Than 5mm Siliques vs. Whole Plant
atggaggagaaagaagaagcgtctgagcaacaaaccggatccgaatccgaatcggcgtctttgactccttctcttcctcctccttcgcagcaacaacaacaacagcagcaacagccgcaggtaacggcggtggttggtccgagatgtgcgccaacgtattcggttgtgaatgctataatcgagaagaaagaagatggtcctggtcctagatgtggacatacgctgacggcggttcctgctgttggtgaagaagggacgtcttcttatattggcccgagactgatcttgtttggtggtgctactgctcttgagggtaattctggaggaacgggaacacctacttcaagtaatgtttcctatgcagggttagctggtgcaaccgctgatgttcattgttatgatgttctttctaataagtggtcgaggcttacaccttatggagaaccacctagtccaagagctgctcatgttgctactgctgttgggaccatggtagtaattcaggggggaataggtcctgctggtttatcagctgaggatcttcacgttcttgatctcacacagcaacggccacgatggcacagggttgttgttcagggtcctggaccaggaccacgttatggacatgtcatggcactggtaggacagaggtatctcatgcccctagcaagtgcatatggacttgccaagcacagagatggacgttgggaatgggccatagccccaggtgtctccccttctgccagataccagcatgctgcagtctttgtaaatgcaagactccatgtctctggtggggcacttggtggtggacgcatggtagaagactcgtccagtgttgcaggagttttacttgatgacctattggttgctgaagatcttgctgcagcggaaacaacatctgctgcctctcatgctgctgctgcagcagcagcaacaaacacgccacctggccgttcacctggaagatatggattttctgatgaaaggacaggggagctaccagaatcagctcctgacgctgtggtgctgggaagccctgttgcaccccctgctacgcccagtggaaaaccttcattatcattgattaagcctgattctgcagtaccaaatagtgttattcctgcaggggttcgacttcatcatagagctgtgactcatcttttgaagcctcgggggtggaagcctccagttcgtcgccagtttttcttggattgcaatgaaatagctgatctttgcgacagtgcagaacgtatcttctcaagcgaacctactgtgttacagcttaaagctcctattaagatatttggtgatttgcatggccagtttggggatctcatgcgcctttttgatgaatatggttcaccatcaacagctggagacatatcatacatcgattacctcttcttaggagactatgttgatcggggtcaacacagcctagagacaattacacttctgcttgctttaaaggttgaataccaacataacgtacacctgattcgtggaaatcatgaagctgccgacattaatgcactttttggtttccggatagagtgtattgagcgaatgggtgaacgtgatgggatctgggtgtggcatcgaataaaccgtttattcaattggctacctctggctgcactgattgagaagaaaatcatctgtatgcatgggggaattggtcggtcgataaatcatgtggagcagatagaaaatatccaacgtccaattacgatggaagcaggctcaattgtacttatggatttattatggtcggatccaactgaaaatgacagtgtcgaaggtttaaggcccaatgctagaggccctgggttggttacttttgggcctgaccgtgtcatggagttttgcaacaacaatgatctgcaattgattgtacgtgcgcatgaatgcgtgatggacggatttgagcgttttgcccaaggtcatttgataacgctcttttcggcaacaaattattgtggtaccgcaaacaatgccggggctatcttggtgttggggagagatcttgtggtggttcctaagcttatccatccattgcctccagcgataacctcacctgaaacttcaccagaaagacatatagaggatacatggatgcaggtttttatctcaaacagatactaa

SEQ ID NO: 70379 - protein, 715 aa, Arabidopsis thaliana
  peptide (1)..(715): Ceres Seq. ID no. 2705790
  misc_feature (431)..(640): Pfam Name: Calcineurin-like phosphoesterase Pfam Description: Calcineurin-like phosphoesterase
  misc_feature (383)..(714): Homolog of NCBI NO: 15223207 NR Description: protein serine/threonine phosphatase alpha,
  misc_feature (2)..(246): Homolog of NCBI NO: 15223207 NR Description: protein serine/threonine phosphatase alpha,
  misc_feature (352)..(405): Homolog of NCBI NO: 15223207 NR Description: protein serine/threonine phosphatase alpha,
  misc_feature (122)..(714): Homolog of NCBI NO: 30683436 NR Description: phospho protein phosphatase -related [Arabidopsis
  misc_feature (486)..(714): Homolog of NCBI NO: 25513585 NR Description: probable phosphoprotein phosphatase (EC 3.1.3.16) - Arabidopsis thaliana >gi|6664307|gb|AAF22889.1|AC006932_6
  misc_feature (122)..(311): Homolog of NCBI NO: 25513585 NR Description: probable phosphoprotein phosphatase (EC 3.1.3.16) - Arabidopsis thaliana >gi|6664307|gb|AAF22889.1|AC006932_6
  misc_feature (2)..(143): Homolog of NCBI NO: 25513585 NR Description: probable phosphoprotein phosphatase (EC 3.1.3.16) - Arabidopsis thaliana >gi|6664307|gb|AAF22889.1|AC006932_6
  misc_feature (383)..(492): Homolog of NCBI NO: 25513585 NR Description: probable phosphoprotein phosphatase (EC 3.1.3.16) - Arabidopsis thaliana >gi|6664307|gb|AAF22889.1|AC006932_6
  misc_feature (352)..(386): Homolog of NCBI NO: 25513585 NR Description: probable phosphoprotein phosphatase (EC 3.1.3.16) - Arabidopsis thaliana >gi|6664307|gb|AAF22889.1|AC006932_6
  misc_feature (147)..(369): Homolog of NCBI NO: 25513585 NR Description: probable phosphoprotein phosphatase (EC 3.1.3.16) - Arabidopsis thaliana >gi|6664307|gb|AAF22889.1|AC006932_6
MEEKEEASEQQTGSESESASLTPSLPPPSQQQQQQQQQPQVTAVVGPRCAPTYSVVNAIIEKKEDGPGPRCGHTLTAVPAVGEEGTSSYIGPRLILFGGATALEGNSGGTGTPTSSNVSYAGLAGATADVHCYDVLSNKWSRLTPYGEPPSPRAAHVATAVGTMVVIQGGIGPAGLSAEDLHVLDLTQQRPRWHRVVVQGPGPGPRYGHVMALVGQRYLMPLASAYGLAKHRDGRWEWAIAPGVSPSARYQHAAVFVNARLHVSGGALGGGRMVEDSSSVAGVLLDDLLVAEDLAAAETTSAASHAAAAAAATNTPPGRSPGRYGFSDERTGELPESAPDAVVLGSPVAPPATPSGKPSLSLIKPDSAVPNSVIPAGVRLHHRAVTHLLKPRGWKPPVRRQFFLDCNEIADLCDSAERIFSSEPTVLQLKAPIKIFGDLHGQFGDLMRLFDEYGSPSTAGDISYIDYLFLGDYVDRGQHSLETITLLLALKVEYQHNVHLIRGNHEAADINALFGFRIECIERMGERDGIWVWHRINRLFNWLPLAALIEKKIICMHGGIGRSINHVEQIENIQRPITMEAGSIVLMDLLWSDPTENDSVEGLRPNARGPGLVTFGPDRVMEFCNNNDLQLIVRAHECVMDGFERFAQGHLITLFSATNYCGTANNAGAILVLGRDLVVVPKLIHPLPPAITSPETSPERHIEDTWMQVFISNRY

SEQ ID NO: 70380 - protein, 552 aa, Arabidopsis thaliana
  peptide (1)..(552): Ceres Seq. ID no. 2705791
  misc_feature (268)..(477): Pfam Name: Calcineurin-like phosphoesterase Pfam Description: Calcineurin-like phosphoesterase
  misc_feature (220)..(551): Homolog of NCBI NO: 15223207 NR Description: protein serine/threonine phosphatase alpha,
  misc_feature (1)..(83): Homolog of NCBI NO: 15223207 NR Description: protein serine/threonine phosphatase alpha,
  misc_feature (189)..(242): Homolog of NCBI NO: 15223207 NR Description: protein serine/threonine phosphatase alpha,
  misc_feature (1)..(551): Homolog of NCBI NO: 30683436 NR Description: phospho protein phosphatase -related [Arabidopsis
  misc_feature (323)..(551): Homolog of NCBI NO: 25513585 NR Description: probable phosphoprotein phosphatase (EC 3.1.3.16) - Arabidopsis thaliana >gi|6664307|gb|AAF22889.1|AC006932_6
  misc_feature (1)..(148): Homolog of NCBI NO: 25513585 NR Description: probable phosphoprotein phosphatase (EC 3.1.3.16) - Arabidopsis thaliana >gi|6664307|gb|AAF22889.1|AC006932_6
  misc_feature (220)..(329): Homolog of NCBI NO: 25513585 NR Description: probable phosphoprotein phosphatase (EC 3.1.3.16) - Arabidopsis thaliana >gi|6664307|gb|AAF22889.1|AC006932_6
  misc_feature (189)..(223): Homolog of NCBI NO: 25513585 NR Description: probable phosphoprotein phosphatase (EC 3.1.3.16) - Arabidopsis thaliana >gi|6664307|gb|AAF22889.1|AC006932_6
  misc_feature (1)..(206): Homolog of NCBI NO: 25513585 NR Description: probable phosphoprotein phosphatase (EC 3.1.3.16) - Arabidopsis thaliana >gi|6664307|gb|AAF22889.1|AC006932_6
  misc_feature (1)..(59): Homolog of NCBI NO: 25513585 NR Description: probable phosphoprotein phosphatase (EC 3.1.3.16) - Arabidopsis thaliana >gi|6664307|gb|AAF22889.1|AC006932_6
MVVIQGGIGPAGLSAEDLHVLDLTQQRPRWHRVVVQGPGPGPRYGHVMALVGQRYLMPLASAYGLAKHRDGRWEWAIAPGVSPSARYQHAAVFVNARLHVSGGALGGGRMVEDSSSVAGVLLDDLLVAEDLAAAETTSAASHAAAAAAATNTPPGRSPGRYGFSDERTGELPESAPDAVVLGSPVAPPATPSGKPSLSLIKPDSAVPNSVIPAGVRLHHRAVTHLLKPRGWKPPVRRQFFLDCNEIADLCDSAERIFSSEPTVLQLKAPIKIFGDLHGQFGDLMRLFDEYGSPSTAGDISYIDYLFLGDYVDRGQHSLETITLLLALKVEYQHNVHLIRGNHEAADINALFGFRIECIERMGERDGIWVWHRINRLFNWLPLAALIEKKIICMHGGIGRSINHVEQIENIQRPITMEAGSIVLMDLLWSDPTENDSVEGLRPNARGPGLVTFGPDRVMEFCNNNDLQLIVRAHECVMDGFERFAQGHLITLFSATNYCGTANNAGAILVLGRDLVVVPKLIHPLPPAITSPETSPERHIEDTWMQVFISNRY

SEQ ID NO: 70381 - protein, 505 aa, Arabidopsis thaliana
  peptide (1)..(505): Ceres Seq. ID no. 2705792
  misc_feature (221)..(430): Pfam Name: Calcineurin-like phosphoesterase Pfam Description: Calcineurin-like phosphoesterase
  misc_feature (173)..(504): Homolog of NCBI NO: 15223207 NR Description: protein serine/threonine phosphatase alpha,
  misc_feature (1)..(36): Homolog of NCBI NO: 15223207 NR Description: protein serine/threonine phosphatase alpha,
  misc_feature (142)..(195): Homolog of NCBI NO: 15223207 NR Description: protein serine/threonine phosphatase alpha,
  misc_feature (1)..(504): Homolog of NCBI NO: 30683436 NR Description: phospho protein phosphatase -related [Arabidopsis
  misc_feature (276)..(504): Homolog of NCBI NO: 25513585 NR Description: probable phosphoprotein phosphatase (EC 3.1.3.16) - Arabidopsis thaliana >gi|6664307|gb|AAF22889.1|AC006932_6
  misc_feature (1)..(101): Homolog of NCBI NO: 25513585 NR Description: probable phosphoprotein phosphatase (EC 3.1.3.16) - Arabidopsis thaliana >gi|6664307|gb|AAF22889.1|AC006932_6
  misc_feature (173)..(282): Homolog of NCBI NO: 25513585 NR Description: probable phosphoprotein phosphatase (EC 3.1.3.16) - Arabidopsis thaliana >gi|6664307|gb|AAF22889.1|AC006932_6
  misc_feature (142)..(176): Homolog of NCBI NO: 25513585 NR Description: probable phosphoprotein phosphatase (EC 3.1.3.16) - Arabidopsis thaliana >gi|6664307|gb|AAF22889.1|AC006932_6
  misc_feature (1)..(159): Homolog of NCBI NO: 25513585 NR Description: probable phosphoprotein phosphatase (EC 3.1.3.16) - Arabidopsis thaliana >gi|6664307|gb|AAF22889.1|AC006932_6
  misc_feature (1)..(12): Homolog of NCBI NO: 25513585 NR Description: probable phosphoprotein phosphatase (EC 3.1.3.16) - Arabidopsis thaliana >gi|6664307|gb|AAF22889.1|AC006932_6
MALVGQRYLMPLASAYGLAKHRDGRWEWAIAPGVSPSARYQHAAVFVNARLHVSGGALGGGRMVEDSSSVAGVLLDDLLVAEDLAAAETTSAASHAAAAAAATNTPPGRSPGRYGFSDERTGELPESAPDAVVLGSPVAPPATPSGKPSLSLIKPDSAVPNSVIPAGVRLHHRAVTHLLKPRGWKPPVRRQFFLDCNEIADLCDSAERIFSSEPTVLQLKAPIKIFGDLHGQFGDLMRLFDEYGSPSTAGDISYIDYLFLGDYVDRGQHSLETITLLLALKVEYQHNVHLIRGNHEAADINALFGFRIECIERMGERDGIWVWHRINRLFNWLPLAALIEKKIICMHGGIGRSINHVEQIENIQRPITMEAGSIVLMDLLWSDPTENDSVEGLRPNARGPGLVTFGPDRVMEFCNNNDLQLIVRAHECVMDGFERFAQGHLITLFSATNYCGTANNAGAILVLGRDLVVVPKLIHPLPPAITSPETSPERHIEDTWMQVFISNRY

SEQ ID NO: 70382 - DNA, 2148 bp, Arabidopsis thaliana
  misc_feature (1)..(2148): Ceres Seq. ID no. 2705971
  misc_feature: MA Experiment ID: 20000265 Result: Up-regulated in Transcription
  misc_feature: MA Experiment 20000265 PARAMETER Experiment Name: At_Open_Flower_P Parameter: Age (day) Value: 21
  misc_feature: MA Experiment 20000265 PARAMETER Experiment Name: At_Open_Flower_P Parameter: Plant Line Value: WS
  misc_feature: MA Experiment 20000265 PARAMETER Experiment Name: At_Open_Flower_P Parameter: Tissue Value: Closed Flower vs. Whole Plant
  misc_feature: MA Experiment ID: 20001248 Result: Down-regulated in Transcription
  misc_feature: MA Experiment 20001248 PARAMETER Experiment Name: At_Far-red-induction_P Parameter: Age (day) Value: 7
  misc_feature: MA Experiment 20001248 PARAMETER Experiment Name: At_Far-red-induction_P Parameter: Light Value: Far-red vs. White
  misc_feature: MA Experiment 20001248 PARAMETER Experiment Name: At_Far-red-induction_P Parameter: Organism Value: A. thaliana
  misc_feature: MA Experiment 20001248 PARAMETER Experiment Name: At_Far-red-induction_P Parameter: Plant Line Value: Columbia
  misc_feature: MA Experiment 20001248 PARAMETER Experiment Name: At_Far-red-induction_P Parameter: Timepoint (hr) Value: 4
  misc_feature: MA Experiment 20001248 PARAMETER Experiment Name: At_Far-red-induction_P Parameter: Tissue Value: Whole Plant
atggctgtttcactaccattgtttcaatttatactctttcttcttcttcttcttctttcaagaacggtttatgcatacttaatcggagtcggaagctatgacatcactggtcctgccgctgatgtcaacatgatgggctacgcaaactcagatcaaatcgcttccggtattcatttccggttacgagctcgtgccttcatcgtcgctgagcctcaagagaagaatgtagcaataagtggaattcacacacatgctggaccaggaggatatcttcaatacgtcacatatattgtgacgtctcttggatttgttcgtcaatcttttgacgttgttgttaacggcattgagcaaagcattgtccaagcacacgaaagcctacgtcctggttctgcttttgttaacaaaggggatcttttggatgctggtgtgaatcgaagtccgagttcttatctgaacaatcctgcagctgagaggagtaaatataagtatgatgttgataaggaaatgactcttgttaagtttgttgattctcagttgggacctactggtagttttaactggtttgctactcatgggacttccatgagtcggactaactcgttgattagtggagataacaaaggcgctgcagctcggtttatggaggattggtttgagaatggacagaagaattctgttagctctagaaacatccctcggagagtatcaaccattgtttctgatttcagtagaaaccagagtagacttttggatattgcggctacttataagtcatctagaggacattctgtggataagtcccttgatgttaaaacccgagtaagaaacggttcgaagcgtaaatttgtctctgccttctgtcaatcaaactgtggtgatgtgagtccaaatactcttggtaccttttgcattgacactggactgccttgtgatttcaatcacagtacctgcaatggacagaacgagttgtgctatggccgtggtccgggctaccctgatgaatttgagagtacacgtatcattggagaaaagcaattcaaaatggctgtggaactttttaacaaagctacagagaagctgcaggggaaaattggttaccaacatgcgtatctagatttctcgaatcttgatgtcacagttcctaaagcaggcggtggctctgagacggttaagacatgtccagctgcaatggggtttggttttgctgctggaacaactgatggtccaggtgcttttgatttcaaacaaggagatgatcagggtaatgtgttttggagactagtgaggaatgtgttaagaactcctggtccagaacaggtccaatgccaaaaaccaaaacccattttacttgacactggtgagatgaaagaaccatatgactgggcgatacttcgcattggccaattagtcatcctcagtgttcccggagagttcacaacaatggctggaagacgtctccgtgacgctatcaagtcttttctcatttcttcggaccccaaggaattcagcaacaacatgcatgtcgtaatcgcaggtctcaccaacacctattctcagtacatcgccactttcgaagagtacgaggttcaaagatacgagggcgcctcaacgttatacggacgacacacactcactgcttatatccaagagttcaagaaactagccacagctttagttaacggtctaacactcccacgtggtccgcaacctcctgaccttttagacaaacagatcagtttactatcccctgtggttgtagactcaactcctctaggagtcaaattcggtgacgtcaaagctgatgtacctccaaagtcaacgttcaggagaggtcaacaagttaacgcaacgttttggtcaggatgtcctcgaaatgatttgatgactgaaggatcattcgctgtggtggagacgctgcgtgagggagggaaatgggctccggtgtatgatgacgatgacttcagtttgaagttcaagtggtcgagaccggcaaagctgagttcggagagccaagccacgattgagtggagggtaccggaatctgcggtagccggagtttatagaataagacattatggagcttctaagtcgttgtttggatccattagtagcttctctggttcttctagtgcctttgtagttgtatga

SEQ ID NO: 70383 - protein, 715 aa, Arabidopsis thaliana
  peptide (1)..(715): Ceres Seq. ID no. 2705972
  misc_feature (26)..(81): Pfam Name: Neutral/alkaline non-lysosomal ceramidase Pfam Description: Neutral/alkaline non-lysosomal ceramidase
  misc_feature (73)..(714): Homolog of NCBI NO: 34912830 NR Description: P0501G01.24 [Oryza sativa (japonica
  misc_feature (11)..(81): Homolog of NCBI NO: 34912830 NR Description: P0501G01.24 [Oryza sativa (japonica
  misc_feature (73)..(714): Homolog of NCBI NO: 15222380 NR Description: unknown protein; protein id: At1g07380.1
  misc_feature (6)..(76): Homolog of NCBI NO: 15222380 NR Description: unknown protein; protein id: At1g07380.1
  misc_feature (73)..(700): Homolog of NCBI NO: 25333800 NR Description: protein F22G5.28 [imported] - Arabidopsis >gi|8778548|gb|AAF79556.1|AC022464_14 F22G5.28 [Arabidopsis
  misc_feature (6)..(76): Homolog of NCBI NO: 25333800 NR Description: protein F22G5.28 [imported] - Arabidopsis >gi|8778548|gb|AAF79556.1|AC022464_14 F22G5.28 [Arabidopsis
  misc_feature (2)..(714): Homolog of NCBI NO: 9759229 NR Description: neutral ceramidase [Arabidopsis thaliana]
  misc_feature (205)..(714): Homolog of NCBI NO: 15237790 NR Description: random slug protein - like; protein id:
  misc_feature (2)..(129): Homolog of NCBI NO: 15237790 NR Description: random slug protein - like; protein id:
  misc_feature (279)..(714): Homolog of NCBI NO: 31200435 NR Description: ENSANGP00000018598 [Anopheles gambiae]
MAVSLPLFQFILFLLLLLLSRTVYAYLIGVGSYDITGPAADVNMMGYANSDQIASGIHFRLRARAFIVAEPQEKNVAISGIHTHAGPGGYLQYVTYIVTSLGFVRQSFDVVVNGIEQSIVQAHESLRPGSAFVNKGDLLDAGVNRSPSSYLNNPAAERSKYKYDVDKEMTLVKFVDSQLGPTGSFNWFATHGTSMSRTNSLISGDNKGAAARFMEDWFENGQKNSVSSRNIPRRVSTIVSDFSRNQSRLLDIAATYKSSRGHSVDKSLDVKTRVRNGSKRKFVSAFCQSNCGDVSPNTLGTFCIDTGLPCDFNHSTCNGQNELCYGRGPGYPDEFESTRIIGEKQFKMAVELFNKATEKLQGKIGYQHAYLDFSNLDVTVPKAGGGSETVKTCPAAMGFGFAAGTTDGPGAFDFKQGDDQGNVFWRLVRNVLRTPGPEQVQCQKPKPILLDTGEMKEPYDWAILRIGQLVILSVPGEFTTMAGRRLRDAIKSFLISSDPKEFSNNMHVVIAGLTNTYSQYIATFEEYEVQRYEGASTLYGRHTLTAYIQEFKKLATALVNGLTLPRGPQPPDLLDKQISLLSPVVVDSTPLGVKFGDVKADVPPKSTFRRGQQVNATFWSGCPRNDLMTEGSFAVVETLREGGKWAPVYDDDDFSLKFKWSRPAKLSSESQATIEWRVPESAVAGVYRIRHYGASKSLFGSISSFSGSSSAFVVV

SEQ ID NO: 70384 - protein, 672 aa, Arabidopsis thaliana
  peptide (1)..(672): Ceres Seq. ID no. 2705973
  misc_feature (30)..(671): Pfam Name: Neutral/alkaline non-lysosomal ceramidase Pfam Description: Neutral/alkaline non-lysosomal ceramidase
  misc_feature (30)..(671): Homolog of NCBI NO: 34912830 NR Description: P0501G01.24 [Oryza sativa (japonica
  misc_feature (1)..(38): Homolog of NCBI NO: 34912830 NR Description: P0501G01.24 [Oryza sativa (japonica
  misc_feature (30)..(671): Homolog of NCBI NO: 15222380 NR Description: unknown protein; protein id: At1g07380.1
  misc_feature (1)..(33): Homolog of NCBI NO: 15222380 NR Description: unknown protein; protein id: At1g07380.1
  misc_feature (30)..(657): Homolog of NCBI NO: 25333800 NR Description: protein F22G5.28 [imported] - Arabidopsis >gi|8778548|gb|AAF79556.1|AC022464_14 F22G5.28 [Arabidopsis
  misc_feature (1)..(33): Homolog of NCBI NO: 25333800 NR Description: protein F22G5.28 [imported] - Arabidopsis >gi|8778548|gb|AAF79556.1|AC022464_14 F22G5.28 [Arabidopsis
  misc_feature (1)..(671): Homolog of NCBI NO: 9759229 NR Description: neutral ceramidase [Arabidopsis thaliana]
  misc_feature (162)..(671): Homolog of NCBI NO: 15237790 NR Description: random slug protein - like; protein id:
  misc_feature (1)..(86): Homolog of NCBI NO: 15237790 NR Description: random slug protein - like; protein id:
  misc_feature (236)..(671): Homolog of NCBI NO: 31200435 NR Description: ENSANGP00000018598 [Anopheles gambiae]
MMGYANSDQIASGIHFRLRARAFIVAEPQEKNVAISGIHTHAGPGGYLQYVTYIVTSLGFVRQSFDVVVNGIEQSIVQAHESLRPGSAFVNKGDLLDAGVNRSPSSYLNNPAAERSKYKYDVDKEMTLVKFVDSQLGPTGSFNWFATHGTSMSRTNSLISGDNKGAAARFMEDWFENGQKNSVSSRNIPRRVSTIVSDFSRNQSRLLDIAATYKSSRGHSVDKSLDVKTRVRNGSKRKFVSAFCQSNCGDVSPNTLGTFCIDTGLPCDFNHSTCNGQNELCYGRGPGYPDEFESTRIIGEKQFKMAVELFNKATEKLQGKIGYQHAYLDFSNLDVTVPKAGGGSETVKTCPAAMGFGFAAGTTDGPGAFDFKQGDDQGNVFWRLVRNVLRTPGPEQVQCQKPKPILLDTGEMKEPYDWAILRIGQLVILSVPGEFTTMAGRRLRDAIKSFLISSDPKEFSNNMHVVIAGLTNTYSQYIATFEEYEVQRYEGASTLYGRHTLTAYIQEFKKLATALVNGLTLPRGPQPPDLLDKQISLLSPVVVDSTPLGVKFGDVKADVPPKSTFRRGQQVNATFWSGCPRNDLMTEGSFAVVETLREGGKWAPVYDDDDFSLKFKWSRPAKLSSESQATIEWRVPESAVAGVYRIRHYGASKSLFGSISSFSGSSSAFVVV

SEQ ID NO: 70385 - protein, 671 aa, Arabidopsis thaliana
  peptide (1)..(671): Ceres Seq. ID no. 2705974
  misc_feature (29)..(670): Pfam Name: Neutral/alkaline non-lysosomal ceramidase Pfam Description: Neutral/alkaline non-lysosomal ceramidase
  misc_feature (29)..(670): Homolog of NCBI NO: 34912830 NR Description: P0501G01.24 [Oryza sativa (japonica
  misc_feature (1)..(37): Homolog of NCBI NO: 34912830 NR Description: P0501G01.24 [Oryza sativa (japonica
  misc_feature (29)..(670): Homolog of NCBI NO: 15222380 NR Description: unknown protein; protein id: At1g07380.1
  misc_feature (1)..(32): Homolog of NCBI NO: 15222380 NR Description: unknown protein; protein id: At1g07380.1
  misc_feature (29)..(656): Homolog of NCBI NO: 25333800 NR Description: protein F22G5.28 [imported] - Arabidopsis >gi|8778548|gb|AAF79556.1|AC022464_14 F22G5.28 [Arabidopsis
  misc_feature (1)..(32): Homolog of NCBI NO: 25333800 NR Description: protein F22G5.28 [imported] - Arabidopsis >gi|8778548|gb|AAF79556.1|AC022464_14 F22G5.28 [Arabidopsis
  misc_feature (1)..(670): Homolog of NCBI NO: 9759229 NR Description: neutral ceramidase [Arabidopsis thaliana]
  misc_feature (161)..(670): Homolog of NCBI NO: 15237790 NR Description: random slug protein - like; protein id:
  misc_feature (1)..(85): Homolog of NCBI NO: 15237790 NR Description: random slug protein - like; protein id:
  misc_feature (235)..(670): Homolog of NCBI NO: 31200435 NR Description: ENSANGP00000018598 [Anopheles gambiae]
MGYANSDQIASGIHFRLRARAFIVAEPQEKNVAISGIHTHAGPGGYLQYVTYIVTSLGFVRQSFDVVVNGIEQSIVQAHESLRPGSAFVNKGDLLDAGVNRSPSSYLNNPAAERSKYKYDVDKEMTLVKFVDSQLGPTGSFNWFATHGTSMSRTNSLISGDNKGAAARFMEDWFENGQKNSVSSRNIPRRVSTIVSDFSRNQSRLLDIAATYKSSRGHSVDKSLDVKTRVRNGSKRKFVSAFCQSNCGDVSPNTLGTFCIDTGLPCDFNHSTCNGQNELCYGRGPGYPDEFESTRIIGEKQFKMAVELFNKATEKLQGKIGYQHAYLDFSNLDVTVPKAGGGSETVKTCPAAMGFGFAAGTTDGPGAFDFKQGDDQGNVFWRLVRNVLRTPGPEQVQCQKPKPILLDTGEMKEPYDWAILRIGQLVILSVPGEFTTMAGRRLRDAIKSFLISSDPKEFSNNMHVVIAGLTNTYSQYIATFEEYEVQRYEGASTLYGRHTLTAYIQEFKKLATALVNGLTLPRGPQPPDLLDKQISLLSPVVVDSTPLGVKFGDVKADVPPKSTFRRGQQVNATFWSGCPRNDLMTEGSFAVVETLREGGKWAPVYDDDDFSLKFKWSRPAKLSSESQATIEWRVPESAVAGVYRIRHYGASKSLFGSISSFSGSSSAFVVV

SEQ ID NO: 70386 - DNA, 1686 bp, Arabidopsis thaliana
  misc_feature (1)..(1686): Ceres Seq. ID no. 2705983
  misc_feature: MA Experiment ID: 20000171 Result: Up-regulated in Transcription
  misc_feature: MA Experiment 20000171 PARAMETER Experiment Name: At_42deg_Heat_P Parameter: Age (day) Value: 14
  misc_feature: MA Experiment 20000171 PARAMETER Experiment Name: At_42deg_Heat_P Parameter: Organism Value: A. thaliana
  misc_feature: MA Experiment 20000171 PARAMETER Experiment Name: At_42deg_Heat_P Parameter: Plant Line Value: WS
  misc_feature: MA Experiment 20000171 PARAMETER Experiment Name: At_42deg_Heat_P Parameter: Temperature (deg C) Value: 42 vs. 22
  misc_feature: MA Experiment 20000171 PARAMETER Experiment Name: At_42deg_Heat_P Parameter: Timepoint (hr) Value: 1
  misc_feature: MA Experiment 20000171 PARAMETER Experiment Name: At_42deg_Heat_P Parameter: Tissue Value: Aerial
  misc_feature: MA Experiment ID: 20000185 Result: Up-regulated in Transcription
  misc_feature: MA Experiment 20000185 PARAMETER Experiment Name: At_Roots__P Parameter: Age (day) Value: 7 vs. 21
  misc_feature: MA Experiment 20000185 PARAMETER Experiment Name: At_Roots__P Parameter: Organism Value: A. thaliana
  misc_feature: MA Experiment 20000185 PARAMETER Experiment Name: At_Roots__P Parameter: Tissue Value: Roots vs. Whole Plant
  misc_feature: MA Experiment ID: 20000265 Result: Up-regulated in Transcription
  misc_feature: MA Experiment 20000265 PARAMETER Experiment Name: At_Open_Flower_P Parameter: Age (day) Value: 21
  misc_feature: MA Experiment 20000265 PARAMETER Experiment Name: At_Open_Flower_P Parameter: Plant Line Value: WS
  misc_feature: MA Experiment 20000265 PARAMETER Experiment Name: At_Open_Flower_P Parameter: Tissue Value: Closed Flower vs. Whole Plant
  misc_feature: MA Experiment ID: 20000439 Result: Up-regulated in Transcription
  misc_feature: MA Experiment 20000439 PARAMETER Experiment Name: At_Roots__P Parameter: Age (day) Value: 14 vs. 21
  misc_feature: MA Experiment 20000439 PARAMETER Experiment Name: At_Roots__P Parameter: Organism Value: A. thaliana
  misc_feature: MA Experiment 20000439 PARAMETER Experiment Name: At_Roots__P Parameter: Tissue Value: Roots vs. Whole Plant
  misc_feature: MA Experiment ID: 20001910 Result: Down-regulated in Transcription
  misc_feature: MA Experiment 20001910 PARAMETER Experiment Name: At_Drought_Reproduction_P Parameter: Age (day) Value: 37
  misc_feature: MA Experiment 20001910 PARAMETER Experiment Name: At_Drought_Reproduction_P Parameter: Organism Value: A. thaliana
  misc_feature: MA Experiment 20001910 PARAMETER Experiment Name: At_Drought_Reproduction_P Parameter: Plant Line Value: WS
  misc_feature: MA Experiment 20001910 PARAMETER Experiment Name: At_Drought_Reproduction_P Parameter: Timepoint (day) Value: 7
  misc_feature: MA Experiment 20001910 PARAMETER Experiment Name: At_Drought_Reproduction_P Parameter: Tissue Value: Flowers
  misc_feature: MA Experiment 20001910 PARAMETER Experiment Name: At_Drought_Reproduction_P Parameter: Treatment Value: Drought vs. No Drought
atggcgacagtaggatccctgaaacctctgcaccattcctcatgttcatcgagtttccctcggaatccgatcgtaaaccggaaagcccttcttggttttgtgtttgattctgcccggaaaaaccagattcgatgtgagaatttacgatattcatcggaaagcgatgggaagagaagaaatgcggcggcgaagaagaggaatcaatccccggaaagatgtgcggcggagggagtactgaccggaggaggggggtcggaggcgattgcggaggtgaggacgatgatgcctgagaggattaaggtagtgatattgacggcgtgcatgatgtgtctatgtaacgccgacagagttgttatgtccgtcgcggtggttccactcgccgataagcttggctggtcgagttctttcttaggggtagttcagtcctccttcctatggggttacattttttcatccgttatcggaggggcattggtggatcggtatggaggaaaaagagtgttggcttggggtgtggcattgtggtccttagccactctactcactccttgggcagctgcacactcgaccttagccttattgtgtgtccgcgccttttttggcctcgctgaaggcgttgcaatgccctccatgaccaccctactctctcggtggtttccaatggatgaacgagcgagtgcggttggtatatctatggccgggtttcacatgggaaatgttgtgggacttctgttgacgccactcatgttatcttccataggaatctctggtccatttattctttttgcatccttaggtctattgtgggtatccacttggtcaagcggagttacaaacaaccctcaggacagtcctttcatcactaggtcagaactcaggcttatccaggctggaaaaccagttcaaccgtcaaccatttcgccgaaaccaaacccatctttgcgacttcttttgtcgaaattgcctacttgggcgatcatttttgctaatgtgactaacaactggggatactttgttcttctctcatggatgcctgtttacttccagacggtgtttaatgtgaatttgaagcaagcagcttggtttagcgctcttccatgggcgacaatggcgatctcaggttactatgcaggagcagcatcggacttcttgataagaactggtcactctgtaacctcagtacgaaagatcatgcaatctattggatttatgggtcccgggctgtctctgctctgcctcaacttcgcaaagtcgccttcttgtgcagcggttttcatgaccattgcattgagcttgagttcctttagccaagctggatttctcctcaatatgcaagacatcgcaccgcaatatgctggtttcctgcacggtaataatgttatcagatggtggatcttttcttcttcttcttttgcatcgattttgtttcttgctgaaaaagttagggtttgtatatctggtgtgcgagacaggtatttcgaattgtgcgggtacgttggctgcgatcgtaagtacaatagggacgggatattttgtgcagtggctcggctcttttcaggcgttcttgacggttacggcctttctttactttgcaaccaccgtgttttggctcctctttgcaaccggagaacgagtcttctagatccaaaacgctctccttggacactttactgtttagagctttga

SEQ ID NO: 70387 - protein, 561 aa, Arabidopsis thaliana
  peptide (1)..(561): Ceres Seq. ID no. 2705984
  misc_feature (133)..(354): Pfam Name: Bacterial protein of unknown function (DUF894) Pfam Description: Bacterial protein of unknown function (DUF894)
  misc_feature (1)..(561): Homolog of NCBI NO: 15224438 NR Description: putative Na+-dependent inorganic phosphate protein id: At2g38060.1 [Arabidopsis thaliana]
  misc_feature (1)..(457): Homolog of NCBI NO: 34908356 NR Description: P0529H11.31 [Oryza sativa (japonica
  misc_feature (58)..(457): Homolog of NCBI NO: 17064732 NR Description: putative protein [Arabidopsis thaliana]
  misc_feature (58)..(457): Homolog of NCBI NO: 22331630 NR Description: putative protein; protein id: At3g46980.1,
  misc_feature (58)..(457): Homolog of NCBI NO: 11357408 NR Description: hypothetical protein F13I12.30 - Arabidopsis >gi|6522579|emb|CAB61944.1| putative protein [Arabidopsis
  misc_feature (74)..(457): Homolog of NCBI NO: 30678625 NR Description: expressed protein [Arabidopsis thaliana]
  misc_feature (86)..(457): Homolog of NCBI NO: 34903342 NR Description: unnamed protein product [Oryza sativa (japonica group)] >gi|6498428|dbj|BAA87831.1| unnamed protein product
  misc_feature (96)..(457): Homolog of NCBI NO: 17064976 NR Description: putative Na+-dependent inorganic phosphate
  misc_feature (96)..(457): Homolog of NCBI NO: 15227589 NR Description: putative Na+-dependent inorganic phosphate protein id: At2g29650.1, supported by cDNA: gi_17064975
  misc_feature (96)..(398): Homolog of NCBI NO: 30684317 NR Description: inorganic phosphate transporter, putative
MATVGSLKPLHHSSCSSSFPRNPIVNRKALLGFVFDSARKNQIRCENLRYSSESDGKRRNAAAKKRNQSPERCAAEGVLTGGGGSEAIAEVRTMMPERIKVVILTACMMCLCNADRVVMSVAVVPLADKLGWSSSFLGVVQSSFLWGYIFSSVIGGALVDRYGGKRVLAWGVALWSLATLLTPWAAAHSTLALLCVRAFFGLAEGVAMPSMTTLLSRWFPMDERASAVGISMAGFHMGNVVGLLLTPLMLSSIGISGPFILFASLGLLWVSTWSSGVTNNPQDSPFITRSELRLIQAGKPVQPSTISPKPNPSLRLLLSKLPTWAIIFANVTNNWGYFVLLSWMPVYFQTVFNVNLKQAAWFSALPWATMAISGYYAGAASDFLIRTGHSVTSVRKIMQSIGFMGPGLSLLCLNFAKSPSCAAVFMTIALSLSSFSQAGFLLNMQDIAPQYAGFLHGNNVIRWWIFSSSSFASILFLAEKVRVCISGVRDRYFELCGYVGCDRKYNRDGIFCAVARLFSGVLDGYGLSLLCNHRVLAPLCNRRTSLLDPKRSPWTLYCLEL

SEQ ID NO: 70388 - protein, 468 aa, Arabidopsis thaliana
  peptide (1)..(468): Ceres Seq. ID no. 2705985
  misc_feature (40)..(261): Pfam Name: Bacterial protein of unknown function (DUF894) Pfam Description: Bacterial protein of unknown function (DUF894)
  misc_feature (1)..(468): Homolog of NCBI NO: 15224438 NR Description: putative Na+-dependent inorganic phosphate protein id: At2g38060.1 [Arabidopsis thaliana]
  misc_feature (1)..(364): Homolog of NCBI NO: 34908356 NR Description: P0529H11.31 [Oryza sativa (japonica
  misc_feature (1)..(364): Homolog of NCBI NO: 17064732 NR Description: putative protein [Arabidopsis thaliana]
  misc_feature (1)..(364): Homolog of NCBI NO: 22331630 NR Description: putative protein; protein id: At3g46980.1,
  misc_feature (1)..(364): Homolog of NCBI NO: 11357408 NR Description: hypothetical protein F13I12.30 - Arabidopsis >gi|6522579|emb|CAB61944.1| putative protein [Arabidopsis
  misc_feature (1)..(364): Homolog of NCBI NO: 30678625 NR Description: expressed protein [Arabidopsis thaliana]
  misc_feature (1)..(364): Homolog of NCBI NO: 34903342 NR Description: unnamed protein product [Oryza sativa (japonica group)] >gi|6498428|dbj|BAA87831.1| unnamed protein product
  misc_feature (3)..(364): Homolog of NCBI NO: 17064976 NR Description: putative Na+-dependent inorganic phosphate
  misc_feature (3)..(364): Homolog of NCBI NO: 15227589 NR Description: putative Na+-dependent inorganic phosphate protein id: At2g29650.1, supported by cDNA: gi_17064975
  misc_feature (3)..(305): Homolog of NCBI NO: 30684317 NR Description: inorganic phosphate transporter, putative
MMPERIKVVILTACMMCLCNADRVVMSVAVVPLADKLGWSSSFLGVVQSSFLWGYIFSSVIGGALVDRYGGKRVLAWGVALWSLATLLTPWAAAHSTLALLCVRAFFGLAEGVAMPSMTTLLSRWFPMDERASAVGISMAGFHMGNVVGLLLTPLMLSSIGISGPFILFASLGLLWVSTWSSGVTNNPQDSPFITRSELRLIQAGKPVQPSTISPKPNPSLRLLLSKLPTWAIIFANVTNNWGYFVLLSWMPVYFQTVFNVNLKQAAWFSALPWATMAISGYYAGAASDFLIRTGHSVTSVRKIMQSIGFMGPGLSLLCLNFAKSPSCAAVFMTIALSLSSFSQAGFLLNMQDIAPQYAGFLHGNNVIRWWIFSSSSFASILFLAEKVRVCISGVRDRYFELCGYVGCDRKYNRDGIFCAVARLFSGVLDGYGLSLLCNHRVLAPLCNRRTSLLDPKRSPWTLYCLEL

SEQ ID NO: 70389 - protein, 467 aa, Arabidopsis thaliana
  peptide (1)..(467): Ceres Seq. ID no. 2705986
  misc_feature (39)..(260): Pfam Name: Bacterial protein of unknown function (DUF894) Pfam Description: Bacterial protein of unknown function (DUF894)
  misc_feature (1)..(467): Homolog of NCBI NO: 15224438 NR Description: putative Na+-dependent inorganic phosphate protein id: At2g38060.1 [Arabidopsis thaliana]
  misc_feature (1)..(363): Homolog of NCBI NO: 34908356 NR Description: P0529H11.31 [Oryza sativa (japonica
  misc_feature (1)..(363): Homolog of NCBI NO: 17064732 NR Description: putative protein [Arabidopsis thaliana]
  misc_feature (1)..(363): Homolog of NCBI NO: 22331630 NR Description: putative protein; protein id: At3g46980.1,
  misc_feature (1)..(363): Homolog of NCBI NO: 11357408 NR Description: hypothetical protein F13I12.30 - Arabidopsis >gi|6522579|emb|CAB61944.1| putative protein [Arabidopsis
  misc_feature (1)..(363): Homolog of NCBI NO: 30678625 NR Description: expressed protein [Arabidopsis thaliana]
  misc_feature (1)..(363): Homolog of NCBI NO: 34903342 NR Description: unnamed protein product [Oryza sativa (japonica group)] >gi|6498428|dbj|BAA87831.1| unnamed protein product
  misc_feature (2)..(363): Homolog of NCBI NO: 17064976 NR Description: putative Na+-dependent inorganic phosphate
  misc_feature (2)..(363): Homolog of NCBI NO: 15227589 NR Description: putative Na+-dependent inorganic phosphate protein id: At2g29650.1, supported by cDNA: gi_17064975
  misc_feature (2)..(304): Homolog of NCBI NO: 30684317 NR Description: inorganic phosphate transporter, putative
MPERIKVVILTACMMCLCNADRVVMSVAVVPLADKLGWSSSFLGVVQSSFLWGYIFSSVIGGALVDRYGGKRVLAWGVALWSLATLLTPWAAAHSTLALLCVRAFFGLAEGVAMPSMTTLLSRWFPMDERASAVGISMAGFHMGNVVGLLLTPLMLSSIGISGPFILFASLGLLWVSTWSSGVTNNPQDSPFITRSELRLIQAGKPVQPSTISPKPNPSLRLLLSKLPTWAIIFANVTNNWGYFVLLSWMPVYFQTVFNVNLKQAAWFSALPWATMAISGYYAGAASDFLIRTGHSVTSVRKIMQSIGFMGPGLSLLCLNFAKSPSCAAVFMTIALSLSSFSQAGFLLNMQDIAPQYAGFLHGNNVIRWWIFSSSSFASILFLAEKVRVCISGVRDRYFELCGYVGCDRKYNRDGIFCAVARLFSGVLDGYGLSLLCNHRVLAPLCNRRTSLLDPKRSPWTLYCLEL

SEQ ID NO: 70390 - DNA, 966 bp, Arabidopsis thaliana
  misc_feature (1)..(966): Ceres Seq. ID no. 2706071
  misc_feature: MA Experiment ID: 20001451 Result: Up-regulated in Transcription
  misc_feature: MA Experiment 20001451 PARAMETER Experiment Name: At_Far-red-induction_P Parameter: Age (day) Value: 7
  misc_feature: MA Experiment 20001451 PARAMETER Experiment Name: At_Far-red-induction_P Parameter: Light Value: Far-red vs. White
  misc_feature: MA Experiment 20001451 PARAMETER Experiment Name: At_Far-red-induction_P Parameter: Organism Value: A. thaliana
  misc_feature: MA Experiment 20001451 PARAMETER Experiment Name: At_Far-red-induction_P Parameter: Plant Line Value: Columbia
  misc_feature: MA Experiment 20001451 PARAMETER Experiment Name: At_Far-red-induction_P Parameter: Timepoint (hr) Value: 24
  misc_feature: MA Experiment 20001451 PARAMETER Experiment Name: At_Far-red-induction_P Parameter: Tissue Value: Whole Plant
atggcttcttcgaatagacactggccaagcatgttcaagtccaaacctcatccccatcaatggcaacatgacatcaactctcctctcttgccttctgcttctcaccgatcttctcctttctcttcaggatgtgaagtggagaggagtccagagccaaaaccaagatggaatccaaagccagagcagattcggatacttgaagcaatctttaactccgggatggtgaatcctccaagagaggagatcaggaggattagggctcagcttcaagaatacggccaagtcggtgatgctaacgtcttctactggttccaaaaccgtaagtcccgtagtaaacacaaactccgcctcctccacaaccactccaaacactctctccctcaaacgcaaccgcagccgcagccgcaaccttcggcttcctcttcctcttcctcctcctcttcctcctccaaatccaccaaaccccgaaaaagcaagaacaagaacaacactaatctctctttgggtggtagtcaaatgatggggatgtttccaccggaaccggcgtttctcttcccggtctccactgtcggagggtttgaaggtatcaccgtctcatcccaattagggtttctctccggtgatatgattgagcaacaaaaaccggctccaacgtgtaccggactcctgctgagtgagatcatgaacggtagtgtgagttatggaactcatcatcaacaacacttgagtgagaaagaagttgaagaaatgaggatgaagatgttgcaacagccacagactcagatttgttacgctaccactaatcatcaaatagcttcttacaacaacaacaacaacaacaataacatcatgcttcatattcctcccactacttctactgccaccactattactacttcgcattctctcgctactgtcccatcaacttcggaccagcttcaagttcaaggtaatgttaatatataa

SEQ ID NO: 70391 - protein, 321 aa, Arabidopsis thaliana
  peptide (1)..(321): Ceres Seq. ID no. 2706072
  misc_feature (52)..(115): Pfam Name: Homeobox domain Pfam Description: Homeobox domain
  misc_feature (1)..(321): Homolog of NCBI NO: 25408317 NR Description: probable homeodomain transcription factor - Arabidopsis thaliana >gi|2253582|gb|AAC69146.1| putative
  misc_feature (1)..(321): Homolog of NCBI NO: 30685885 NR Description: homeodomain transcription factor -related
  misc_feature (74)..(321): Homolog of NCBI NO: 26452030 NR Description: putative homeodomain transcription factor thaliana] >gi|28950873|gb|AAO63360.1| At2g33880 [Arabidopsis
  misc_feature (1)..(125): Homolog of NCBI NO: 15237353 NR Description: homeodomain protein; protein id: At5g45980.1 thaliana] >gi|9757718|dbj|BAB08243.1| contains similarity to
  misc_feature (1)..(125): Homolog of NCBI NO: 37955180 NR Description: WOX8 protein [Arabidopsis thaliana]
  misc_feature (1)..(116): Homolog of NCBI NO: 34910936 NR Description: OSJNBb0063G05.13 [Oryza sativa (japonica
  misc_feature (27)..(173): Homolog of NCBI NO: 15228599 NR Description: homeodomain protein; protein id: At3g03660.1 thaliana] >gi|6091768|gb|AAF03478.1|AC009327_17 hypothetical
  misc_feature (27)..(148): Homolog of NCBI NO: 37955223 NR Description: WOX11 protein [Arabidopsis thaliana]
  misc_feature (33)..(234): Homolog of NCBI NO: 9759058 NR Description: contains similarity to unknown
  misc_feature (33)..(234): Homolog of NCBI NO: 30686531 NR Description: homeodomain protein [Arabidopsis thaliana] unknown protein [Arabidopsis thaliana]
MASSNRHWPSMFKSKPHPHQWQHDINSPLLPSASHRSSPFSSGCEVERSPEPKPRWNPKPEQIRILEAIFNSGMVNPPREEIRRIRAQLQEYGQVGDANVFYWFQNRKSRSKHKLRLLHNHSKHSLPQTQPQPQPQPSASSSSSSSSSSSKSTKPRKSKNKNNTNLSLGGSQMMGMFPPEPAFLFPVSTVGGFEGITVSSQLGFLSGDMIEQQKPAPTCTGLLLSEIMNGSVSYGTHHQQHLSEKEVEEMRMKMLQQPQTQICYATTNHQIASYNNNNNNNNIMLHIPPTTSTATTITTSHSLATVPSTSDQLQVQGNVNI

SEQ ID NO: 70392 - protein, 311 aa, Arabidopsis thaliana
  peptide (1)..(311): Ceres Seq. ID no. 2706073
  misc_feature (42)..(105): Pfam Name: Homeobox domain Pfam Description: Homeobox domain
  misc_feature (1)..(311): Homolog of NCBI NO: 25408317 NR Description: probable homeodomain transcription factor - Arabidopsis thaliana >gi|2253582|gb|AAC69146.1| putative
  misc_feature (1)..(311): Homolog of NCBI NO: 30685885 NR Description: homeodomain transcription factor -related
  misc_feature (64)..(311): Homolog of NCBI NO: 26452030 NR Description: putative homeodomain transcription factor thaliana] >gi|28950873|gb|AAO63360.1| At2g33880 [Arabidopsis
  misc_feature (1)..(115): Homolog of NCBI NO: 15237353 NR Description: homeodomain protein; protein id: At5g45980.1 thaliana] >gi|9757718|dbj|BAB08243.1| contains similarity to
  misc_feature (1)..(115): Homolog of NCBI NO: 37955180 NR Description: WOX8 protein [Arabidopsis thaliana]
  misc_feature (1)..(106): Homolog of NCBI NO: 34910936 NR Description: OSJNBb0063G05.13 [Oryza sativa (japonica
  misc_feature (17)..(163): Homolog of NCBI NO: 15228599 NR Description: homeodomain protein; protein id: At3g03660.1 thaliana] >gi|6091768|gb|AAF03478.1|AC009327_17 hypothetical
  misc_feature (17)..(138): Homolog of NCBI NO: 37955223 NR Description: WOX11 protein [Arabidopsis thaliana]
  misc_feature (23)..(224): Homolog of NCBI NO: 9759058 NR Description: contains similarity to unknown
  misc_feature (23)..(224): Homolog of NCBI NO: 30686531 NR Description: homeodomain protein [Arabidopsis thaliana] unknown protein [Arabidopsis thaliana]
MFKSKPHPHQWQHDINSPLLPSASHRSSPFSSGCEVERSPEPKPRWNPKPEQIRILEAIFNSGMVNPPREEIRRIRAQLQEYGQVGDANVFYWFQNRKSRSKHKLRLLHNHSKHSLPQTQPQPQPQPSASSSSSSSSSSSKSTKPRKSKNKNNTNLSLGGSQMMGMFPPEPAFLFPVSTVGGFEGITVSSQLGFLSGDMIEQQKPAPTCTGLLLSEIMNGSVSYGTHHQQHLSEKEVEEMRMKMLQQPQTQICYATTNHQIASYNNNNNNNNIMLHIPPTTSTATTITTSHSLATVPSTSDQLQVQGNVNI

SEQ ID NO: 70393 - protein, 248 aa, Arabidopsis thaliana
  peptide (1)..(248): Ceres Seq. ID no. 2706074
  misc_feature (1)..(248): Homolog of NCBI NO: 25408317 NR Description: probable homeodomain transcription factor - Arabidopsis thaliana >gi|2253582|gb|AAC69146.1| putative
  misc_feature (1)..(248): Homolog of NCBI NO: 30685885 NR Description: homeodomain transcription factor -related
  misc_feature (1)..(248): Homolog of NCBI NO: 26452030 NR Description: putative homeodomain transcription factor thaliana] >gi|28950873|gb|AAO63360.1| At2g33880 [Arabidopsis
  misc_feature (1)..(52): Homolog of NCBI NO: 15237353 NR Description: homeodomain protein; protein id: At5g45980.1 thaliana] >gi|9757718|dbj|BAB08243.1| contains similarity to
  misc_feature (1)..(52): Homolog of NCBI NO: 37955180 NR Description: WOX8 protein [Arabidopsis thaliana]
  misc_feature (1)..(43): Homolog of NCBI NO: 34910936 NR Description: OSJNBb0063G05.13 [Oryza sativa (japonica
  misc_feature (1)..(100): Homolog of NCBI NO: 15228599 NR Description: homeodomain protein; protein id: At3g03660.1 thaliana] >gi|6091768|gb|AAF03478.1|AC009327_17 hypothetical
  misc_feature (1)..(75): Homolog of NCBI NO: 37955223 NR Description: WOX11 protein [Arabidopsis thaliana]
  misc_feature (1)..(161): Homolog of NCBI NO: 9759058 NR Description: contains similarity to unknown
  misc_feature (1)..(161): Homolog of NCBI NO: 30686531 NR Description: homeodomain protein [Arabidopsis thaliana] unknown protein [Arabidopsis thaliana]
MVNPPREEIRRIRAQLQEYGQVGDANVFYWFQNRKSRSKHKLRLLHNHSKHSLPQTQPQPQPQPSASSSSSSSSSSSKSTKPRKSKNKNNTNLSLGGSQMMGMFPPEPAFLFPVSTVGGFEGITVSSQLGFLSGDMIEQQKPAPTCTGLLLSEIMNGSVSYGTHHQQHLSEKEVEEMRMKMLQQPQTQICYATTNHQIASYNNNNNNNNIMLHIPPTTSTATTITTSHSLATVPSTSDQLQVQGNVNI

SEQ ID NO: 70394 - DNA, 1203 bp, Arabidopsis thaliana
  misc_feature (1)..(1203): Ceres Seq. ID no. 2706381
  misc_feature: MA Experiment ID: 20000438 Result: Down-regulated in Transcription
  misc_feature: MA Experiment 20000438 PARAMETER Experiment Name: At_Shoots__P Parameter: Age (day) Value: 14
  misc_feature: MA Experiment 20000438 PARAMETER Experiment Name: At_Shoots__P Parameter: Tissue Value: Shoots vs. Whole Plant
  misc_feature: MA Experiment ID: 20001248 Result: Up-regulated in Transcription
  misc_feature: MA Experiment 20001248 PARAMETER Experiment Name: At_Far-red-induction_P Parameter: Age (day) Value: 7
  misc_feature: MA Experiment 20001248 PARAMETER Experiment Name: At_Far-red-induction_P Parameter: Light Value: Far-red vs. White
  misc_feature: MA Experiment 20001248 PARAMETER Experiment Name: At_Far-red-induction_P Parameter: Organism Value: A. thaliana
  misc_feature: MA Experiment 20001248 PARAMETER Experiment Name: At_Far-red-induction_P Parameter: Plant Line Value: Columbia
  misc_feature: MA Experiment 20001248 PARAMETER Experiment Name: At_Far-red-induction_P Parameter: Timepoint (hr) Value: 4
  misc_feature: MA Experiment 20001248 PARAMETER Experiment Name: At_Far-red-induction_P Parameter: Tissue Value: Whole Plant
  misc_feature: MA Experiment ID: 20001458 Result: Up-regulated in Transcription
  misc_feature: MA Experiment 20001458 PARAMETER Experiment Name: At_50mM_NH4NO3_L-to-H_P Parameter: Age (day) Value: Undefined
  misc_feature: MA Experiment 20001458 PARAMETER Experiment Name: At_50mM_NH4NO3_L-to-H_P Parameter: Organism Value: Undefined
  misc_feature: MA Experiment 20001458 PARAMETER Experiment Name: At_50mM_NH4NO3_L-to-H_P Parameter: Plant Line Value: Undefined
  misc_feature: MA Experiment 20001458 PARAMETER Experiment Name: At_50mM_NH4NO3_L-to-H_P Parameter: Timepoint (hr) Value: 2
  misc_feature: MA Experiment 20001458 PARAMETER Experiment Name: At_50mM_NH4NO3_L-to-H_P Parameter: Tissue Value: Siliques
  misc_feature: MA Experiment 20001458 PARAMETER Experiment Name: At_50mM_NH4NO3_L-to-H_P Parameter: Treatment Value: 50mM NH4NO3 vs. 100mM Manitol
  misc_feature: MA Experiment ID: 20001557 Result: Up-regulated in Transcription
  misc_feature: MA Experiment 20001557 PARAMETER Experiment Name: At_Drought_Soil_Dry_P Parameter: Age (day) Value: 27
  misc_feature: MA Experiment 20001557 PARAMETER Experiment Name: At_Drought_Soil_Dry_P Parameter: Organism Value: A. thaliana
  misc_feature: MA Experiment 20001557 PARAMETER Experiment Name: At_Drought_Soil_Dry_P Parameter: Plant Line Value: WS
  misc_feature: MA Experiment 20001557 PARAMETER Experiment Name: At_Drought_Soil_Dry_P Parameter: Post Timepoint (hr) Value: 3
  misc_feature: MA Experiment 20001557 PARAMETER Experiment Name: At_Drought_Soil_Dry_P Parameter: Post-Treatment Value: Re-Water vs. No Drought
  misc_feature: MA Experiment 20001557 PARAMETER Experiment Name: At_Drought_Soil_Dry_P Parameter: Timepoint (day) Value: 13
  misc_feature: MA Experiment 20001557 PARAMETER Experiment Name: At_Drought_Soil_Dry_P Parameter: Treatment Value: Drought vs. No Drought
atgggattaaggatgtcagaatcagctaaaccttattttgcaatggtctgtcttcagttcggatacgcaggtatgaacttagtaactaaaaccgtcctagaccgcggtatgagccattacgttcttgttgcataccgcaacgcttttgccacagccgctatcgcacccttcgctcttctctccgaaaggaaagtgagatcaaagatgacgtttccaatattcatgcgaatatttcttcttgctcttctcgggccggtgattgatcagaacttatactatatcggtctaaaactcacatcaccaacgttttcctccgccgttagcaacatcgtgcctgcaattaccattatccttgccacacttttcaggatggagaaagtggagatgagaaaagtaagatgcctggtaaaagtgatggggacgttagtgacagtggttggatccatattgatgatattctacaaaggtcctttcattaatttcttccggtctcacctcacggccgcctcttcgccgccgacggctgactatcttaaggctgccgtcttcctactcctcgcttccctctcatgggcgtcgttctttgttcttcaggctgcgactttgaagaaatactcagcccatctctcaatgtcaacaatggtgtgtttcatgggaacgttacagtctttagccctagccttcgtaatggaacacaatccttctgctttgaacatcggttttgacatgaaccttctcgcttctgcctacgcgggaataatgtcgtcgagcatagcttactacgttcaaggacttatgatgcagcgaaaaggaccggtctttgtcactgcttttaaccctcttatcgttgtcattgtctccatcatgagcttcttcgttctcggtcaaggaatctaccttggagggtacgttaacaacaaccgggttattggagtggttgttttgatggtgggagtctacgccgtgttatggggcaaacatgtagatgatgacggcgaagaaacacgccatgaagataacgttgtagccgttaagtgttgtagtggcaataatggtctaacgataatgccgaaaatcgacgaagctgatgaggaggatgttgaaaccggaaaggctacgtcggagaaggagtcgtcagttccggaagtggtggtggtagttttttgtagtgaaaatgtgcatagcgtttcacgacctaactag

SEQ ID NO: 70395 - protein, 400 aa, Arabidopsis thaliana
  peptide (1)..(400): Ceres Seq. ID no. 2706382
  misc_feature (189)..(324): Pfam Name: Integral membrane protein DUF6 Pfam Description: Integral membrane protein DUF6
  misc_feature (1)..(400): Homolog of NCBI NO: 7487973 NR Description: probable integral membrane protein nodulin
  misc_feature (1)..(400): Homolog of NCBI NO: 30688451 NR Description: nodulin MtN21 family protein [Arabidopsis
  misc_feature (1)..(376): Homolog of NCBI NO: 15228980 NR Description: nodulin-like protein; protein id: At3g56620.1,
  misc_feature (5)..(376): Homolog of NCBI NO: 21592817 NR Description: nodulin-like protein [Arabidopsis thaliana]
  misc_feature (7)..(379): Homolog of NCBI NO: 34908998 NR Description: nodulin-like protein [Oryza sativa (japonica
  misc_feature (8)..(330): Homolog of NCBI NO: 15240683 NR Description: MtN21 nodulin protein-like; protein id:
  misc_feature (7)..(385): Homolog of NCBI NO: 2598575 NR Description: MtN21 [Medicago truncatula]
  misc_feature (1)..(380): Homolog of NCBI NO: 15219123 NR Description: nodulin-like protein; protein id: At1g21890.1,
  misc_feature (1)..(380): Homolog of NCBI NO: 17529004 NR Description: putative nodulin protein [Arabidopsis thaliana]
  misc_feature (1)..(380): Homolog of NCBI NO: 6552743 NR Description: T26F17.11 [Arabidopsis thaliana]
MGLRMSESAKPYFAMVCLQFGYAGMNLVTKTVLDRGMSHYVLVAYRNAFATAAIAPFALLSERKVRSKMTFPIFMRIFLLALLGPVIDQNLYYIGLKLTSPTFSSAVSNIVPAITIILATLFRMEKVEMRKVRCLVKVMGTLVTVVGSILMIFYKGPFINFFRSHLTAASSPPTADYLKAAVFLLLASLSWASFFVLQAATLKKYSAHLSMSTMVCFMGTLQSLALAFVMEHNPSALNIGFDMNLLASAYAGIMSSSIAYYVQGLMMQRKGPVFVTAFNPLIVVIVSIMSFFVLGQGIYLGGYVNNNRVIGVVVLMVGVYAVLWGKHVDDDGEETRHEDNVVAVKCCSGNNGLTIMPKIDEADEEDVETGKATSEKESSVPEVVVVVFCSENVHSVSRPN

SEQ ID NO: 70396 - protein, 396 aa, Arabidopsis thaliana
  peptide (1)..(396): Ceres Seq. ID no. 2706383
  misc_feature (185)..(320): Pfam Name: Integral membrane protein DUF6 Pfam Description: Integral membrane protein DUF6
  misc_feature (1)..(396): Homolog of NCBI NO: 7487973 NR Description: probable integral membrane protein nodulin
  misc_feature (1)..(396): Homolog of NCBI NO: 30688451 NR Description: nodulin MtN21 family protein [Arabidopsis
  misc_feature (1)..(372): Homolog of NCBI NO: 15228980 NR Description: nodulin-like protein; protein id: At3g56620.1,
  misc_feature (1)..(372): Homolog of NCBI NO: 21592817 NR Description: nodulin-like protein [Arabidopsis thaliana]
  misc_feature (3)..(375): Homolog of NCBI NO: 34908998 NR Description: nodulin-like protein [Oryza sativa (japonica
  misc_feature (4)..(326): Homolog of NCBI NO: 15240683 NR Description: MtN21 nodulin protein-like; protein id:
  misc_feature (3)..(381): Homolog of NCBI NO: 2598575 NR Description: MtN21 [Medicago truncatula]
  misc_feature (1)..(376): Homolog of NCBI NO: 15219123 NR Description: nodulin-like protein; protein id: At1g21890.1,
  misc_feature (1)..(376): Homolog of NCBI NO: 17529004 NR Description: putative nodulin protein [Arabidopsis thaliana]
  misc_feature (1)..(376): Homolog of NCBI NO: 6552743 NR Description: T26F17.11 [Arabidopsis thaliana]
MSESAKPYFAMVCLQFGYAGMNLVTKTVLDRGMSHYVLVAYRNAFATAAIAPFALLSERKVRSKMTFPIFMRIFLLALLGPVIDQNLYYIGLKLTSPTFSSAVSNIVPAITIILATLFRMEKVEMRKVRCLVKVMGTLVTVVGSILMIFYKGPFINFFRSHLTAASSPPTADYLKAAVFLLLASLSWASFFVLQAATLKKYSAHLSMSTMVCFMGTLQSLALAFVMEHNPSALNIGFDMNLLASAYAGIMSSSIAYYVQGLMMQRKGPVFVTAFNPLIVVIVSIMSFFVLGQGIYLGGYVNNNRVIGVVVLMVGVYAVLWGKHVDDDGEETRHEDNVVAVKCCSGNNGLTIMPKIDEADEEDVETGKATSEKESSVPEVVVVVFCSENVHSVSRPN

SEQ ID NO: 70397 - protein, 386 aa, Arabidopsis thaliana
  peptide (1)..(386): Ceres Seq. ID no. 2706384
  misc_feature (175)..(310): Pfam Name: Integral membrane protein DUF6 Pfam Description: Integral membrane protein DUF6
  misc_feature (1)..(386): Homolog of NCBI NO: 7487973 NR Description: probable integral membrane protein nodulin
  misc_feature (1)..(386): Homolog of NCBI NO: 30688451 NR Description: nodulin MtN21 family protein [Arabidopsis
  misc_feature (1)..(362): Homolog of NCBI NO: 15228980 NR Description: nodulin-like protein; protein id: At3g56620.1,
  misc_feature (1)..(362): Homolog of NCBI NO: 21592817 NR Description: nodulin-like protein [Arabidopsis thaliana]
  misc_feature (1)..(365): Homolog of NCBI NO: 34908998 NR Description: nodulin-like protein [Oryza sativa (japonica
  misc_feature (1)..(316): Homolog of NCBI NO: 15240683 NR Description: MtN21 nodulin protein-like; protein id:
  misc_feature (1)..(371): Homolog of NCBI NO: 2598575 NR Description: MtN21 [Medicago truncatula]
  misc_feature (1)..(366): Homolog of NCBI NO: 15219123 NR Description: nodulin-like protein; protein id: At1g21890.1,
  misc_feature (1)..(366): Homolog of NCBI NO: 17529004 NR Description: putative nodulin protein [Arabidopsis thaliana]
  misc_feature (1)..(366): Homolog of NCBI NO: 6552743 NR Description: T26F17.11 [Arabidopsis thaliana]
MVCLQFGYAGMNLVTKTVLDRGMSHYVLVAYRNAFATAAIAPFALLSERKVRSKMTFPIFMRIFLLALLGPVIDQNLYYIGLKLTSPTFSSAVSNIVPAITIILATLFRMEKVEMRKVRCLVKVMGTLVTVVGSILMIFYKGPFINFFRSHLTAASSPPTADYLKAAVFLLLASLSWASFFVLQAATLKKYSAHLSMSTMVCFMGTLQSLALAFVMEHNPSALNIGFDMNLLASAYAGIMSSSIAYYVQGLMMQRKGPVFVTAFNPLIVVIVSIMSFFVLGQGIYLGGYVNNNRVIGVVVLMVGVYAVLWGKHVDDDGEETRHEDNVVAVKCCSGNNGLTIMPKIDEADEEDVETGKATSEKESSVPEVVVVVFCSENVHSVSRPN

SEQ ID NO: 70398 - DNA, 1359 bp, Arabidopsis thaliana
  misc_feature (1)..(1359): Ceres Seq. ID no. 2706438
  misc_feature: MA Experiment ID: 20000184 Result: Up-regulated in Transcription
  misc_feature: MA Experiment 20000184 PARAMETER Experiment Name: At_Shoots__P Parameter: Age (day) Value: 7
  misc_feature: MA Experiment 20000184 PARAMETER Experiment Name: At_Shoots__P Parameter: Tissue Value: Shoots vs. Whole Plant
  misc_feature: MA Experiment ID: 20000185 Result: Up-regulated in Transcription
  misc_feature: MA Experiment 20000185 PARAMETER Experiment Name: At_Roots__P Parameter: Age (day) Value: 7 vs. 21
  misc_feature: MA Experiment 20000185 PARAMETER Experiment Name: At_Roots__P Parameter: Organism Value: A. thaliana
  misc_feature: MA Experiment 20000185 PARAMETER Experiment Name: At_Roots__P Parameter: Tissue Value: Roots vs. Whole Plant
  misc_feature: MA Experiment ID: 20000439 Result: Up-regulated in Transcription
  misc_feature: MA Experiment 20000439 PARAMETER Experiment Name: At_Roots__P Parameter: Age (day) Value: 14 vs. 21
  misc_feature: MA Experiment 20000439 PARAMETER Experiment Name: At_Roots__P Parameter: Organism Value: A. thaliana
  misc_feature: MA Experiment 20000439 PARAMETER Experiment Name: At_Roots__P Parameter: Tissue Value: Roots vs. Whole Plant
  misc_feature: MA Experiment ID: 20001757 Result: Down-regulated in Transcription
  misc_feature: MA Experiment 20001757 PARAMETER Experiment Name: At_50mM_NH4NO3_L-to-H_P Parameter: Timepoint (hr) Value: 6
  misc_feature: MA Experiment 20001757 PARAMETER Experiment Name: At_50mM_NH4NO3_L-to-H_P Parameter: Tissue Value: Leaf
  misc_feature: MA Experiment 20001757 PARAMETER Experiment Name: At_50mM_NH4NO3_L-to-H_P Parameter: Treatment Value: 50mM NH4NO3 vs 100mM Mannitol
atggcagagattcgccagagaagagtgttgatggtcccagcaccgttccaaggccatttaccttcgatgatgaatctagcgtcctacctttcttcccaaggcttttcaatcacaatcgttagaaacgaattcaatttcaaagatatctcccataatttccctggtataaaattcttcaccatcaaggacggcttgtcagaatctgacgtgaagtctctgggtctccttgaatttgtcctggagcttaactctgtctgtgaacccctattgaaagagtttctaaccaaccatgatgatgttgttgactttatcatttatgatgaatttgtttacttccctcgacgtgttgcggaagatatgaatctgccaaagatggtctttagcccttcttccgccgctacctcgatcagccggtgtgtgcttatggagaaccaatcaaatgggttacttcctccacaagacgcaagatctcaactagaagaaacggtgccagagtttcatccctttcgtttcaaagatctgccttttacagcttatggatctatggagagattaatgatactttacgagaatgtaagcaatagagcctcatcttctggcataatacacaactcttcggattgcttagagaactcattcataacaactgcacaagagaaatggggagttccggtatacccggttggtccactccatatgaccaattccgcaatgtcatgtccaagtttatttgaagaagaaagaaactgtcttgaatggcttgagaagcaagaaacaagctcagtgatctacataagcatggggagcttggcgatgacacaagatatagaggctgtggagatggccatgggatttgtccagagtaatcaacccttcttgtgggtgatccgaccaggctctataaacggacaagaatctttagacttcttaccggaacagttcaaccaaacggtgaccgatggaagaggttttgttgtgaaatgggccccacaaaaagaggtattaaggcatagagcagtgggagggttttggaaccatggtggatggaactcgtgcttggagagcataagcagtggtgtaccaatgatttgtaggccgtattctggtgatcagagggtgaatactcgacttatgtcacatgtttggcaaaccgcgtatgagatcgaaggtgaattggaaagaggagctgttgagatggccgtgaggaggctcattgtggatcaagaaggtcaggagatgagaatgagagccaccatattgaaggaagaggttgaagcctctgtcacaaccgaaggctcttctcacaattctttaaacaatttggtccatgcaataatgatgcaaattgacgaacaatga

SEQ ID NO: 70399 - protein, 452 aa, Arabidopsis thaliana
  peptide (1)..(452): Ceres Seq. ID no. 2706439
  misc_feature (7)..(449): Pfam Name: UDP-glucoronosyl and UDP-glucosyl transferase Pfam Description: UDP-glucoronosyl and UDP-glucosyl transferase
  misc_feature (1)..(452): Homolog of NCBI NO: 15225316 NR Description: putative glucosyltransferase; protein id: [Arabidopsis thaliana] >gi|7433891|pir||T00981 probable
  misc_feature (6)..(445): Homolog of NCBI NO: 11258169 NR Description: glucosyltransferase-like protein - Arabidopsis
  misc_feature (6)..(445): Homolog of NCBI NO: 18408251 NR Description: glucosyltransferase-like protein; protein id: supported by cDNA: gi_15081808 [Arabidopsis thaliana]
  misc_feature (6)..(447): Homolog of NCBI NO: 30697251 NR Description: glycosyltransferase family [Arabidopsis thaliana]
  misc_feature (7)..(443): Homolog of NCBI NO: 15232618 NR Description: glucosyltransferase-like protein; protein id: supported by cDNA: 120105. [Arabidopsis thaliana]
  misc_feature (7)..(443): Homolog of NCBI NO: 21537102 NR Description: glucosyltransferase-like protein [Arabidopsis
  misc_feature (3)..(445): Homolog of NCBI NO: 15238467 NR Description: glucuronosyl transferase - like protein; protein
  misc_feature (6)..(443): Homolog of NCBI NO: 15232619 NR Description: glucosyltransferase-like protein; protein id: [Arabidopsis thaliana] >gi|11258173|pir||T45605
  misc_feature (5)..(445): Homolog of NCBI NO: 15240822 NR Description: glucosyltransferase-like protein; protein id:
  misc_feature (79)..(446): Homolog of NCBI NO: 34900662 NR Description: glucuronosyl transferase-like protein [Oryza
MAEIRQRRVLMVPAPFQGHLPSMMNLASYLSSQGFSITIVRNEFNFKDISHNFPGIKFFTIKDGLSESDVKSLGLLEFVLELNSVCEPLLKEFLTNHDDVVDFIIYDEFVYFPRRVAEDMNLPKMVFSPSSAATSISRCVLMENQSNGLLPPQDARSQLEETVPEFHPFRFKDLPFTAYGSMERLMILYENVSNRASSSGIIHNSSDCLENSFITTAQEKWGVPVYPVGPLHMTNSAMSCPSLFEEERNCLEWLEKQETSSVIYISMGSLAMTQDIEAVEMAMGFVQSNQPFLWVIRPGSINGQESLDFLPEQFNQTVTDGRGFVVKWAPQKEVLRHRAVGGFWNHGGWNSCLESISSGVPMICRPYSGDQRVNTRLMSHVWQTAYEIEGELERGAVEMAVRRLIVDQEGQEMRMRATILKEEVEASVTTEGSSHNSLNNLVHAIMMQIDEQ

SEQ ID NO: 70400 - protein, 442 aa, Arabidopsis thaliana
  peptide (1)..(442): Ceres Seq. ID no. 2706440
  misc_feature (1)..(439): Pfam Name: UDP-glucoronosyl and UDP-glucosyl transferase Pfam Description: UDP-glucoronosyl and UDP-glucosyl transferase
  misc_feature (1)..(442): Homolog of NCBI NO: 15225316 NR Description: putative glucosyltransferase; protein id: [Arabidopsis thaliana] >gi|7433891|pir||T00981 probable
  misc_feature (1)..(435): Homolog of NCBI NO: 11258169 NR Description: glucosyltransferase-like protein - Arabidopsis
  misc_feature (1)..(435): Homolog of NCBI NO: 18408251 NR Description: glucosyltransferase-like protein; protein id: supported by cDNA: gi_15081808 [Arabidopsis thaliana]
  misc_feature (1)..(437): Homolog of NCBI NO: 30697251 NR Description: glycosyltransferase family [Arabidopsis thaliana]
  misc_feature (1)..(433): Homolog of NCBI NO: 15232618 NR Description: glucosyltransferase-like protein; protein id: supported by cDNA: 120105. [Arabidopsis thaliana]
  misc_feature (1)..(433): Homolog of NCBI NO: 21537102 NR Description: glucosyltransferase-like protein [Arabidopsis
  misc_feature (1)..(435): Homolog of NCBI NO: 15238467 NR Description: glucuronosyl transferase - like protein; protein
  misc_feature (1)..(433): Homolog of NCBI NO: 15232619 NR Description: glucosyltransferase-like protein; protein id: [Arabidopsis thaliana] >gi|11258173|pir||T45605
  misc_feature (1)..(435): Homolog of NCBI NO: 15240822 NR Description: glucosyltransferase-like protein; protein id:
  misc_feature (69)..(436): Homolog of NCBI NO: 34900662 NR Description: glucuronosyl transferase-like protein [Oryza
MVPAPFQGHLPSMMNLASYLSSQGFSITIVRNEFNFKDISHNFPGIKFFTIKDGLSESDVKSLGLLEFVLELNSVCEPLLKEFLTNHDDVVDFIIYDEFVYFPRRVAEDMNLPKMVFSPSSAATSISRCVLMENQSNGLLPPQDARSQLEETVPEFHPFRFKDLPFTAYGSMERLMILYENVSNRASSSGIIHNSSDCLENSFITTAQEKWGVPVYPVGPLHMTNSAMSCPSLFEEERNCLEWLEKQETSSVIYISMGSLAMTQDIEAVEMAMGFVQSNQPFLWVIRPGSINGQESLDFLPEQFNQTVTDGRGFVVKWAPQKEVLRHRAVGGFWNHGGWNSCLESISSGVPMICRPYSGDQRVNTRLMSHVWQTAYEIEGELERGAVEMAVRRLIVDQEGQEMRMRATILKEEVEASVTTEGSSHNSLNNLVHAIMMQIDEQ

SEQ ID NO: 70401 - protein, 430 aa, Arabidopsis thaliana
  peptide (1)..(430): Ceres Seq. ID no. 2706441
  misc_feature (1)..(427): Pfam Name: UDP-glucoronosyl and UDP-glucosyl transferase Pfam Description: UDP-glucoronosyl and UDP-glucosyl transferase
  misc_feature (1)..(430): Homolog of NCBI NO: 15225316 NR Description: putative glucosyltransferase; protein id: [Arabidopsis thaliana] >gi|7433891|pir||T00981 probable
  misc_feature (1)..(423): Homolog of NCBI NO: 11258169 NR Description: glucosyltransferase-like protein - Arabidopsis
  misc_feature (1)..(423): Homolog of NCBI NO: 18408251 NR Description: glucosyltransferase-like protein; protein id: supported by cDNA: gi_15081808 [Arabidopsis thaliana]
  misc_feature (1)..(425): Homolog of NCBI NO: 30697251 NR Description: glycosyltransferase family [Arabidopsis thaliana]
  misc_feature (1)..(421): Homolog of NCBI NO: 15232618 NR Description: glucosyltransferase-like protein; protein id: supported by cDNA: 120105. [Arabidopsis thaliana]
  misc_feature (1)..(421): Homolog of NCBI NO: 21537102 NR Description: glucosyltransferase-like protein [Arabidopsis
  misc_feature (1)..(423): Homolog of NCBI NO: 15238467 NR Description: glucuronosyl transferase - like protein; protein
  misc_feature (1)..(421): Homolog of NCBI NO: 15232619 NR Description: glucosyltransferase-like protein; protein id: [Arabidopsis thaliana] >gi|11258173|pir||T45605
  misc_feature (1)..(423): Homolog of NCBI NO: 15240822 NR Description: glucosyltransferase-like protein; protein id:
  misc_feature (57)..(424): Homolog of NCBI NO: 34900662 NR Description: glucuronosyl transferase-like protein [Oryza
MMNLASYLSSQGFSITIVRNEFNFKDISHNFPGIKFFTIKDGLSESDVKSLGLLEFVLELNSVCEPLLKEFLTNHDDVVDFIIYDEFVYFPRRVAEDMNLPKMVFSPSSAATSISRCVLMENQSNGLLPPQDARSQLEETVPEFHPFRFKDLPFTAYGSMERLMILYENVSNRASSSGIIHNSSDCLENSFITTAQEKWGVPVYPVGPLHMTNSAMSCPSLFEEERNCLEWLEKQETSSVIYISMGSLAMTQDIEAVEMAMGFVQSNQPFLWVIRPGSINGQESLDFLPEQFNQTVTDGRGFVVKWAPQKEVLRHRAVGGFWNHGGWNSCLESISSGVPMICRPYSGDQRVNTRLMSHVWQTAYEIEGELERGAVEMAVRRLIVDQEGQEMRMRATILKEEVEASVTTEGSSHNSLNNLVHAIMMQIDEQ

SEQ ID NO: 70402 - DNA, 1554 bp, Arabidopsis thaliana
  misc_feature (1)..(1554): Ceres Seq. ID no. 2706442
  misc_feature: MA Experiment ID: 20000171 Result: Down-regulated in Transcription
  misc_feature: MA Experiment 20000171 PARAMETER Experiment Name: At_42deg_Heat_P Parameter: Age (day) Value: 14
  misc_feature: MA Experiment 20000171 PARAMETER Experiment Name: At_42deg_Heat_P Parameter: Organism Value: A. thaliana
  misc_feature: MA Experiment 20000171 PARAMETER Experiment Name: At_42deg_Heat_P Parameter: Plant Line Value: WS
  misc_feature: MA Experiment 20000171 PARAMETER Experiment Name: At_42deg_Heat_P Parameter: Temperature (deg C) Value: 42 vs. 22
  misc_feature: MA Experiment 20000171 PARAMETER Experiment Name: At_42deg_Heat_P Parameter: Timepoint (hr) Value: 1
  misc_feature: MA Experiment 20000171 PARAMETER Experiment Name: At_42deg_Heat_P Parameter: Tissue Value: Aerial
  misc_feature: MA Experiment ID: 20000173 Result: Down-regulated in Transcription
  misc_feature: MA Experiment 20000173 PARAMETER Experiment Name: At_42deg_Heat_P Parameter: Age (day) Value: 14
  misc_feature: MA Experiment 20000173 PARAMETER Experiment Name: At_42deg_Heat_P Parameter: Organism Value: A. thaliana
  misc_feature: MA Experiment 20000173 PARAMETER Experiment Name: At_42deg_Heat_P Parameter: Plant Line Value: WS
  misc_feature: MA Experiment 20000173 PARAMETER Experiment Name: At_42deg_Heat_P Parameter: Temperature (deg C) Value: 42 vs. 22
  misc_feature: MA Experiment 20000173 PARAMETER Experiment Name: At_42deg_Heat_P Parameter: Timepoint (hr) Value: 6
  misc_feature: MA Experiment 20000173 PARAMETER Experiment Name: At_42deg_Heat_P Parameter: Tissue Value: Aerial
  misc_feature: MA Experiment ID: 20000180 Result: Down-regulated in Transcription
  misc_feature: MA Experiment 20000180 PARAMETER Experiment Name: At_Germinating_Seeds_P Parameter: Age (hr) Value: 24 vs. 0
  misc_feature: MA Experiment 20000180 PARAMETER Experiment Name: At_Germinating_Seeds_P Parameter: Tissue Value: Germinating Seeds
  misc_feature: MA Experiment ID: 20000184 Result: Down-regulated in Transcription
  misc_feature: MA Experiment 20000184 PARAMETER Experiment Name: At_Shoots__P Parameter: Age (day) Value: 7
  misc_feature: MA Experiment 20000184 PARAMETER Experiment Name: At_Shoots__P Parameter: Tissue Value: Shoots vs. Whole Plant
atgtgcggtaggactcgatgtactttaagacccgacgatgtccccagagcttctcaccgccacaccgttcctacccgatttcttcacctcgaccggtttatttctcttttctctttaatcaatttcaagttccaatttttaacctttgcaaagtctaaaactgttcctttctgttgtcaaatcagttatcgtccatcttacaatgttgcccctggatcctatatacctgttctacggagagacaatgaagaagttgttggtgatggtgttgttgttcattgtatgaagtggggattagtgccaagtttcactaagaaaactgataagcctgatttcttcaaaatgtttaatgctcggtctgaatctgtggctgagaaagcgtcttttcgtcgattgcttcccaagaataggtgccttgttgcagttgatgggttctatgagtggaagaaggaaggttcaaaaaagcaaccctactacatccattttgaggatgggagacctctcgtatttgctgctctttttgatacttggcagaactcaggaggtgagacactttacacctttacgattttgacaaccgcttcctcttcagccctccaatggctccatgacagaatgcctgtaattcttggtgataaggattcaatcgacacatggttagatgatccctcgacaacgaaactgcagccattactttcaccatatgaaaaatcggatttggtatggtatccagtaacctctgcaattggtaaaccaacgtttgatggaccagagtgtattcaacagataccgctaaagacttcacaaaatagcttgatctcgaagtttttctcaacaaagcagcccaaaacagatgaaggagacaaagaaaccaaatcaacagatgcaaatatcatagttgatttgaaaaaggaacctacggctgaaaaggacacgttttctgacagcattaagaaaattgaagaactagacggggagaaagatatgtcgaatgtagccaaaaatctggagtttcaagagattgtgaaagcagaaccatttgttgaagataactcagcagttgcgtcacttcctgaacctgtaaagaatgatgttcaggagggtacaaaggaagaaggcaaatccctaaagactggtcttactaaagaaacaggtgagagcagtgccagtataccggctgagtcctacatccttgatctccaaagaatctcaaaagaagaacccgagactcaaagccatcatttctttactgcagatgagagattgaatcagctgcatgaggctgtcgaagatattccaggaaatgaaaaccagaagacagttttaactagcccgacgacgaaggaaggtggcttagtgtttagcgaaaagagtgggacaaagcgagactatgaggtattctcagctcaagaaaagccacagaaacactatgagaggttgcaaaatgttaaaagcagtgggaaacaaggaaagatgcatggaatggggaaatctaacatcaagaaatctaaggagacgcagtctacattacatttctttttcgatgagaaatag

SEQ ID NO: 70403 - protein, 517 aa, Arabidopsis thaliana
  peptide (1)..(517): Ceres Seq. ID no. 2706443
  misc_feature (1)..(258): Pfam Name: Uncharacterised ACR, COG2135 Pfam Description: Uncharacterised ACR, COG2135
  misc_feature (1)..(517): Homolog of NCBI NO: 7487880 NR Description: hypothetical protein At2g26470 [imported] - thaliana >gi|2739372|gb|AAC14496.1| hypothetical protein
  misc_feature (54)..(517): Homolog of NCBI NO: 30683129 NR Description: expressed protein [Arabidopsis thaliana] unknown protein [Arabidopsis thaliana]
  misc_feature (1)..(33): Homolog of NCBI NO: 30683129 NR Description: expressed protein [Arabidopsis thaliana] unknown protein [Arabidopsis thaliana]
  misc_feature (64)..(263): Homolog of NCBI NO: 39995151 NR Description: conserved hypothetical protein [Geobacter PCA] >gi|39981913|gb|AAR33375.1| conserved hypothetical protein
  misc_feature (67)..(272): Homolog of NCBI NO: 17230686 NR Description: hypothetical protein [Nostoc sp. PCC 7120]
  misc_feature (67)..(271): Homolog of NCBI NO: 23124313 NR Description: hypothetical protein [Nostoc punctiforme]
  misc_feature (65)..(263): Homolog of NCBI NO: 37522067 NR Description: hypothetical protein gll2498 [Gloeobacter
  misc_feature (65)..(263): Homolog of NCBI NO: 22963055 NR Description: hypothetical protein [Rhodopseudomonas palustris]
  misc_feature (63)..(263): Homolog of NCBI NO: 23098326 NR Description: hypothetical protein [Oceanobacillus iheyensis >gi|22776552|dbj|BAC12827.1| hypothetical conserved protein
  misc_feature (52)..(322): Homolog of NCBI NO: 6323761 NR Description: Hypothetical ORF; Ymr114cp [Saccharomyces
MCGRTRCTLRPDDVPRASHRHTVPTRFLHLDRFISLFSLINFKFQFLTFAKSKTVPFCCQISYRPSYNVAPGSYIPVLRRDNEEVVGDGVVVHCMKWGLVPSFTKKTDKPDFFKMFNARSESVAEKASFRRLLPKNRCLVAVDGFYEWKKEGSKKQPYYIHFEDGRPLVFAALFDTWQNSGGETLYTFTILTTASSSALQWLHDRMPVILGDKDSIDTWLDDPSTTKLQPLLSPYEKSDLVWYPVTSAIGKPTFDGPECIQQIPLKTSQNSLISKFFSTKQPKTDEGDKETKSTDANIIVDLKKEPTAEKDTFSDSIKKIEELDGEKDMSNVAKNLEFQEIVKAEPFVEDNSAVASLPEPVKNDVQEGTKEEGKSLKTGLTKETGESSASIPAESYILDLQRISKEEPETQSHHFFTADERLNQLHEAVEDIPGNENQKTVLTSPTTKEGGLVFSEKSGTKRDYEVFSAQEKPQKHYERLQNVKSSGKQGKMHGMGKSNIKKSKETQSTLHFFFDEK

SEQ ID NO: 70404 - protein, 423 aa, Arabidopsis thaliana
  peptide (1)..(423): Ceres Seq. ID no. 2706444
  misc_feature (1)..(164): Pfam Name: Uncharacterised ACR, COG2135 Pfam Description: Uncharacterised ACR, COG2135
  misc_feature (1)..(423): Homolog of NCBI NO: 7487880 NR Description: hypothetical protein At2g26470 [imported] - thaliana >gi|2739372|gb|AAC14496.1| hypothetical protein
  misc_feature (1)..(423): Homolog of NCBI NO: 30683129 NR Description: expressed protein [Arabidopsis thaliana] unknown protein [Arabidopsis thaliana]
  misc_feature (1)..(169): Homolog of NCBI NO: 39995151 NR Description: conserved hypothetical protein [Geobacter PCA] >gi|39981913|gb|AAR33375.1| conserved hypothetical protein
  misc_feature (1)..(178): Homolog of NCBI NO: 17230686 NR Description: hypothetical protein [Nostoc sp. PCC 7120]
  misc_feature (1)..(177): Homolog of NCBI NO: 23124313 NR Description: hypothetical protein [Nostoc punctiforme]
  misc_feature (1)..(169): Homolog of NCBI NO: 37522067 NR Description: hypothetical protein gll2498 [Gloeobacter
  misc_feature (1)..(169): Homolog of NCBI NO: 22963055 NR Description: hypothetical protein [Rhodopseudomonas palustris]
  misc_feature (1)..(169): Homolog of NCBI NO: 23098326 NR Description: hypothetical protein [Oceanobacillus iheyensis >gi|22776552|dbj|BAC12827.1| hypothetical conserved protein
  misc_feature (1)..(228): Homolog of NCBI NO: 6323761 NR Description: Hypothetical ORF; Ymr114cp [Saccharomyces
  misc_feature (1)..(167): Homolog of NCBI NO: 9630243 NR Description: similar to Escherichia coli YedG [Bacteriophage >gi|16079108|ref|NP_389931.1| similar to hypothetical proteins
MKWGLVPSFTKKTDKPDFFKMFNARSESVAEKASFRRLLPKNRCLVAVDGFYEWKKEGSKKQPYYIHFEDGRPLVFAALFDTWQNSGGETLYTFTILTTASSSALQWLHDRMPVILGDKDSIDTWLDDPSTTKLQPLLSPYEKSDLVWYPVTSAIGKPTFDGPECIQQIPLKTSQNSLISKFFSTKQPKTDEGDKETKSTDANIIVDLKKEPTAEKDTFSDSIKKIEELDGEKDMSNVAKNLEFQEIVKAEPFVEDNSAVASLPEPVKNDVQEGTKEEGKSLKTGLTKETGESSASIPAESYILDLQRISKEEPETQSHHFFTADERLNQLHEAVEDIPGNENQKTVLTSPTTKEGGLVFSEKSGTKRDYEVFSAQEKPQKHYERLQNVKSSGKQGKMHGMGKSNIKKSKETQSTLHFFFDEK

SEQ ID NO: 70405 - protein, 403 aa, Arabidopsis thaliana
  peptide (1)..(403): Ceres Seq. ID no. 2706445
  misc_feature (1)..(144): Pfam Name: Uncharacterised ACR, COG2135 Pfam Description: Uncharacterised ACR, COG2135
  misc_feature (1)..(403): Homolog of NCBI NO: 7487880 NR Description: hypothetical protein At2g26470 [imported] - thaliana >gi|2739372|gb|AAC14496.1| hypothetical protein
  misc_feature (1)..(403): Homolog of NCBI NO: 30683129 NR Description: expressed protein [Arabidopsis thaliana] unknown protein [Arabidopsis thaliana]
  misc_feature (1)..(149): Homolog of NCBI NO: 39995151 NR Description: conserved hypothetical protein [Geobacter PCA] >gi|39981913|gb|AAR33375.1| conserved hypothetical protein
  misc_feature (1)..(158): Homolog of NCBI NO: 17230686 NR Description: hypothetical protein [Nostoc sp. PCC 7120]
  misc_feature (1)..(157): Homolog of NCBI NO: 23124313 NR Description: hypothetical protein [Nostoc punctiforme]
  misc_feature (1)..(149): Homolog of NCBI NO: 37522067 NR Description: hypothetical protein gll2498 [Gloeobacter
  misc_feature (1)..(149): Homolog of NCBI NO: 22963055 NR Description: hypothetical protein [Rhodopseudomonas palustris]
  misc_feature (1)..(149): Homolog of NCBI NO: 23098326 NR Description: hypothetical protein [Oceanobacillus iheyensis >gi|22776552|dbj|BAC12827.1| hypothetical conserved protein
  misc_feature (1)..(208): Homolog of NCBI NO: 6323761 NR Description: Hypothetical ORF; Ymr114cp [Saccharomyces
  misc_feature (1)..(147): Homolog of NCBI NO: 9630243 NR Description: similar to Escherichia coli YedG [Bacteriophage >gi|16079108|ref|NP_389931.1| similar to hypothetical proteins
MFNARSESVAEKASFRRLLPKNRCLVAVDGFYEWKKEGSKKQPYYIHFEDGRPLVFAALFDTWQNSGGETLYTFTILTTASSSALQWLHDRMPVILGDKDSIDTWLDDPSTTKLQPLLSPYEKSDLVWYPVTSAIGKPTFDGPECIQQIPLKTSQNSLISKFFSTKQPKTDEGDKETKSTDANIIVDLKKEPTAEKDTFSDSIKKIEELDGEKDMSNVAKNLEFQEIVKAEPFVEDNSAVASLPEPVKNDVQEGTKEEGKSLKTGLTKETGESSASIPAESYILDLQRISKEEPETQSHHFFTADERLNQLHEAVEDIPGNENQKTVLTSPTTKEGGLVFSEKSGTKRDYEVFSAQEKPQKHYERLQNVKSSGKQGKMHGMGKSNIKKSKETQSTLHFFFDEK

SEQ ID NO: 70406 - DNA, 1758 bp, Arabidopsis thaliana
  misc_feature (1)..(1758): Ceres Seq. ID no. 2706446
  misc_feature: MA Experiment ID: 20000439 Result: Up-regulated in Transcription
  misc_feature: MA Experiment 20000439 PARAMETER Experiment Name: At_Roots__P Parameter: Age (day) Value: 14 vs. 21
  misc_feature: MA Experiment 20000439 PARAMETER Experiment Name: At_Roots__P Parameter: Organism Value: A. thaliana
  misc_feature: MA Experiment 20000439 PARAMETER Experiment Name: At_Roots__P Parameter: Tissue Value: Roots vs. Whole Plant
  misc_feature: MA Experiment ID: 20000794 Result: Up-regulated in Transcription
  misc_feature: MA Experiment 20000794 PARAMETER Experiment Name: At_Petals_P Parameter: Age (day) Value: 23-25 days
  misc_feature: MA Experiment 20000794 PARAMETER Experiment Name: At_Petals_P Parameter: Plant Line Value: WS
  misc_feature: MA Experiment 20000794 PARAMETER Experiment Name: At_Petals_P Parameter: Tissue Value: Petals vs. Whole plant
  misc_feature: MA Experiment ID: 20001911 Result: Up-regulated in Transcription
  misc_feature: MA Experiment 20001911 PARAMETER Experiment Name: At_Drought_Reproduction_P Parameter: Age (day) Value: 40
  misc_feature: MA Experiment 20001911 PARAMETER Experiment Name: At_Drought_Reproduction_P Parameter: Organism Value: A. thaliana
  misc_feature: MA Experiment 20001911 PARAMETER Experiment Name: At_Drought_Reproduction_P Parameter: Plant Line Value: WS
  misc_feature: MA Experiment 20001911 PARAMETER Experiment Name: At_Drought_Reproduction_P Parameter: Timepoint (day) Value: 10
  misc_feature: MA Experiment 20001911 PARAMETER Experiment Name: At_Drought_Reproduction_P Parameter: Tissue Value: Flowers
  misc_feature: MA Experiment 20001911 PARAMETER Experiment Name: At_Drought_Reproduction_P Parameter: Treatment Value: Drought vs. No Drought
atgaaaccttcaaaatcgcatcacaaggagaaaaccgctcgtcggagagaggagaaactagaggaatccgataatccaaaatacagagatcgtgctaaagaaagaagagagaatcaaaatcctgattatgatccatcagagcttagttctttccatgccgttgctcctcccggagctgtcgatatccgtgctgctgatgcacttaagatatctattgagaacagcaaatatcttggaggtgatgttgaacatacccatttagttaagggtttggattatgctttgttgaataaagtacgaagcgaaatcgttaagaaacctgatggtgaagatggtgatggtgggaagactagtgcgcctaaggaagatcagcgagttactttccgtaccatagctgcaaagtcagtttaccagtggattgttaagcctcagactatcatcaagtctaatgagatgtttcttcccggtagaatgacatttgtctatgatatggaaggtggctatacccatgacataccgaccacgttatataggagtaaagctgactgcccggtgcccgaggaatttgtcacagtcaatgttgatggttctgtgctagatcgaattgctaaaatcatgtcatatcttcgccttgggtcgtcggggaaagttctcaagaagaaaaagaaagaaaaagatgggaaaggaaagatgtcaactattgctaatgattatgatgaagacgacaataaatctaagattgagaatggatcttctgtgaacataagtgacagggaagttttacctcctcctccgccattaccacctgggataaaccatctggatttgagtacgaaacaagaagaaccccctgttgccaggacagacgatgatgacatatttgttggtgaaggcgtcgattacacggttcctggtaaagatgtgacacagagtcctatttctgaggacatggaagaatctcccagggataaggagaaagtatcttatttcgatgagcctgcttatggtccagtgcaggagaaggtaccttatttcgctgagcctgcttatggtccagtgcagccatctgctggtcaggaatggcaagatatgagtgcatatggtgcaatgcaaactcaaggactggctcctgggtaccccggagagtggcaggaataccaatatgcagagcaaactgggtatcaggagcagtaccttcaacctggaatggagggttacgaggtccaaccagaaaccgatgttttactagatcctcaactcatgtcgcaggaagagaaagataggggtttgggatcggttttcaagcgtgatgaccaaaggcttcaacagttgagggagagtgacgcaagggagaaagatccaacttttgtatccgagagttattcagagtgttatccaggttaccaagagtacaaccatgagattgtcggtagtgatgaagaacctgatttgtctaaaatggacatgggtggaaaggcaaagggtggtttacatcgatgggactttgagacagaagaggaatgggaaaaatataatgagcagaaggaagcgatgccaaaagcggcgttccaattcggggtaaagatgcaagatggtcgaaagacaaggaagcagaaccgtgaccgtgaccagaagctcaataatgaacttcaccagatcaataagatacttacgagaaagaagatggagaaggagggtggggatgttgcttctttggatgccgccgaggcacaaactcctaagagatccaagcattga

SEQ ID NO: 70407 - protein, 585 aa, Arabidopsis thaliana
  peptide (1)..(585): Ceres Seq. ID no. 2706447
  misc_feature (3)..(225): Homolog of NCBI NO: 15278160 NR Description: Similar to IK cytokine, down-regulator of HLA II
  misc_feature (445)..(569): Homolog of NCBI NO: 15278160 NR Description: Similar to IK cytokine, down-regulator of HLA II
  misc_feature (3)..(230): Homolog of NCBI NO: 5901878 NR Description: chondrosarcoma-associated protein 2 [Homo sapiens]
  misc_feature (445)..(569): Homolog of NCBI NO: 5901878 NR Description: chondrosarcoma-associated protein 2 [Homo sapiens]
  misc_feature (3)..(225): Homolog of NCBI NO: 34878785 NR Description: similar to Ik protein [Rattus norvegicus]
  misc_feature (445)..(569): Homolog of NCBI NO: 34878785 NR Description: similar to Ik protein [Rattus norvegicus]
  misc_feature (3)..(225): Homolog of NCBI NO: 26352880 NR Description: unnamed protein product [Mus musculus]
  misc_feature (445)..(569): Homolog of NCBI NO: 26352880 NR Description: unnamed protein product [Mus musculus]
  misc_feature (3)..(225): Homolog of NCBI NO: 33468955 NR Description: IK cytokine; arginine/glutamic acid/aspartic acid containing protein [Mus musculus] >gi|15928532|gb|AAH14739.1| IK [Mus musculus] >gi|20072062|gb|AAH26569.1| IK cytokine
  misc_feature (445)..(569): Homolog of NCBI NO: 33468955 NR Description: IK cytokine; arginine/glutamic acid/aspartic acid containing protein [Mus musculus] >gi|15928532|gb|AAH14739.1| IK [Mus musculus] >gi|20072062|gb|AAH26569.1| IK cytokine
MKPSKSHHKEKTARRREEKLEESDNPKYRDRAKERRENQNPDYDPSELSSFHAVAPPGAVDIRAADALKISIENSKYLGGDVEHTHLVKGLDYALLNKVRSEIVKKPDGEDGDGGKTSAPKEDQRVTFRTIAAKSVYQWIVKPQTIIKSNEMFLPGRMTFVYDMEGGYTHDIPTTLYRSKADCPVPEEFVTVNVDGSVLDRIAKIMSYLRLGSSGKVLKKKKKEKDGKGKMSTIANDYDEDDNKSKIENGSSVNISDREVLPPPPPLPPGINHLDLSTKQEEPPVARTDDDDIFVGEGVDYTVPGKDVTQSPISEDMEESPRDKEKVSYFDEPAYGPVQEKVPYFAEPAYGPVQPSAGQEWQDMSAYGAMQTQGLAPGYPGEWQEYQYAEQTGYQEQYLQPGMEGYEVQPETDVLLDPQLMSQEEKDRGLGSVFKRDDQRLQQLRESDAREKDPTFVSESYSECYPGYQEYNHEIVGSDEEPDLSKMDMGGKAKGGLHRWDFETEEEWEKYNEQKEAMPKAAFQFGVKMQDGRKTRKQNRDRDQKLNNELHQINKILTRKKMEKEGGDVASLDAAEAQTPKRSKH

SEQ ID NO: 70408 - protein, 434 aa, Arabidopsis thaliana
  peptide (1)..(434): Ceres Seq. ID no. 2706448
  misc_feature (294)..(418): Homolog of NCBI NO: 15278160 NR Description: Similar to IK cytokine, down-regulator of HLA II
  misc_feature (1)..(79): Homolog of NCBI NO: 5901878 NR Description: chondrosarcoma-associated protein 2 [Homo sapiens]
  misc_feature (294)..(418): Homolog of NCBI NO: 5901878 NR Description: chondrosarcoma-associated protein 2 [Homo sapiens]
  misc_feature (1)..(74): Homolog of NCBI NO: 34878785 NR Description: similar to Ik protein [Rattus norvegicus]
  misc_feature (294)..(418): Homolog of NCBI NO: 34878785 NR Description: similar to Ik protein [Rattus norvegicus]
  misc_feature (1)..(74): Homolog of NCBI NO: 26352880 NR Description: unnamed protein product [Mus musculus]
  misc_feature (294)..(418): Homolog of NCBI NO: 26352880 NR Description: unnamed protein product [Mus musculus]
  misc_feature (1)..(74): Homolog of NCBI NO: 33468955 NR Description: IK cytokine; arginine/glutamic acid/aspartic acid containing protein [Mus musculus] >gi|15928532|gb|AAH14739.1| IK [Mus musculus] >gi|20072062|gb|AAH26569.1| IK cytokine
  misc_feature (294)..(418): Homolog of NCBI NO: 33468955 NR Description: IK cytokine; arginine/glutamic acid/aspartic acid containing protein [Mus musculus] >gi|15928532|gb|AAH14739.1| IK [Mus musculus] >gi|20072062|gb|AAH26569.1| IK cytokine
  misc_feature (1)..(74): Homolog of NCBI NO: 15278160 NR Description: Similar to IK cytokine, down-regulator of HLA II
MFLPGRMTFVYDMEGGYTHDIPTTLYRSKADCPVPEEFVTVNVDGSVLDRIAKIMSYLRLGSSGKVLKKKKKEKDGKGKMSTIANDYDEDDNKSKIENGSSVNISDREVLPPPPPLPPGINHLDLSTKQEEPPVARTDDDDIFVGEGVDYTVPGKDVTQSPISEDMEESPRDKEKVSYFDEPAYGPVQEKVPYFAEPAYGPVQPSAGQEWQDMSAYGAMQTQGLAPGYPGEWQEYQYAEQTGYQEQYLQPGMEGYEVQPETDVLLDPQLMSQEEKDRGLGSVFKRDDQRLQQLRESDAREKDPTFVSESYSECYPGYQEYNHEIVGSDEEPDLSKMDMGGKAKGGLHRWDFETEEEWEKYNEQKEAMPKAAFQFGVKMQDGRKTRKQNRDRDQKLNNELHQINKILTRKKMEKEGGDVASLDAAEAQTPKRSKH

SEQ ID NO: 70409 - protein, 428 aa, Arabidopsis thaliana
  peptide (1)..(428): Ceres Seq. ID no. 2706449
  misc_feature (1)..(68): Homolog of NCBI NO: 15278160 NR Description: Similar to IK cytokine, down-regulator of HLA II
  misc_feature (288)..(412): Homolog of NCBI NO: 15278160 NR Description: Similar to IK cytokine, down-regulator of HLA II
  misc_feature (1)..(73): Homolog of NCBI NO: 5901878 NR Description: chondrosarcoma-associated protein 2 [Homo sapiens]
  misc_feature (288)..(412): Homolog of NCBI NO: 5901878 NR Description: chondrosarcoma-associated protein 2 [Homo sapiens]
  misc_feature (1)..(68): Homolog of NCBI NO: 34878785 NR Description: similar to Ik protein [Rattus norvegicus]
  misc_feature (288)..(412): Homolog of NCBI NO: 34878785 NR Description: similar to Ik protein [Rattus norvegicus]
  misc_feature (1)..(68): Homolog of NCBI NO: 26352880 NR Description: unnamed protein product [Mus musculus]
  misc_feature (288)..(412): Homolog of NCBI NO: 26352880 NR Description: unnamed protein product [Mus musculus]
  misc_feature (1)..(68): Homolog of NCBI NO: 33468955 NR Description: IK cytokine; arginine/glutamic acid/aspartic acid containing protein [Mus musculus] >gi|15928532|gb|AAH14739.1| IK [Mus musculus] >gi|20072062|gb|AAH26569.1| IK cytokine
  misc_feature (288)..(412): Homolog of NCBI NO: 33468955 NR Description: IK cytokine; arginine/glutamic acid/aspartic acid containing protein [Mus musculus] >gi|15928532|gb|AAH14739.1| IK [Mus musculus] >gi|20072062|gb|AAH26569.1| IK cytokine
MTFVYDMEGGYTHDIPTTLYRSKADCPVPEEFVTVNVDGSVLDRIAKIMSYLRLGSSGKVLKKKKKEKDGKGKMSTIANDYDEDDNKSKIENGSSVNISDREVLPPPPPLPPGINHLDLSTKQEEPPVARTDDDDIFVGEGVDYTVPGKDVTQSPISEDMEESPRDKEKVSYFDEPAYGPVQEKVPYFAEPAYGPVQPSAGQEWQDMSAYGAMQTQGLAPGYPGEWQEYQYAEQTGYQEQYLQPGMEGYEVQPETDVLLDPQLMSQEEKDRGLGSVFKRDDQRLQQLRESDAREKDPTFVSESYSECYPGYQEYNHEIVGSDEEPDLSKMDMGGKAKGGLHRWDFETEEEWEKYNEQKEAMPKAAFQFGVKMQDGRKTRKQNRDRDQKLNNELHQINKILTRKKMEKEGGDVASLDAAEAQTPKRSKH

SEQ ID NO: 70410 - DNA, 1521 bp, Arabidopsis thaliana
  misc_feature (1)..(1521): Ceres Seq. ID no. 2706628
  misc_feature: MA Experiment ID: 20000184 Result: Down-regulated in Transcription
  misc_feature: MA Experiment 20000184 PARAMETER Experiment Name: At_Shoots__P Parameter: Age (day) Value: 7
  misc_feature: MA Experiment 20000184 PARAMETER Experiment Name: At_Shoots__P Parameter: Tissue Value: Shoots vs. Whole Plant
  misc_feature: MA Experiment ID: 20000437 Result: Up-regulated in Transcription
  misc_feature: MA Experiment 20000437 PARAMETER Experiment Name: At_Drought_P Parameter: Age (day) Value: 8
  misc_feature: MA Experiment 20000437 PARAMETER Experiment Name: At_Drought_P Parameter: Organism Value: A. thaliana
  misc_feature: MA Experiment 20000437 PARAMETER Experiment Name: At_Drought_P Parameter: Plant Line Value: WS
  misc_feature: MA Experiment 20000437 PARAMETER Experiment Name: At_Drought_P Parameter: Timepoint (hr) Value: 24
  misc_feature: MA Experiment 20000437 PARAMETER Experiment Name: At_Drought_P Parameter: Tissue Value: Whole Plant
  misc_feature: MA Experiment 20000437 PARAMETER Experiment Name: At_Drought_P Parameter: Treatment Value: Drought vs. No Drought
  misc_feature: MA Experiment ID: 20001911 Result: Up-regulated in Transcription
  misc_feature: MA Experiment 20001911 PARAMETER Experiment Name: At_Drought_Reproduction_P Parameter: Age (day) Value: 40
  misc_feature: MA Experiment 20001911 PARAMETER Experiment Name: At_Drought_Reproduction_P Parameter: Organism Value: A. thaliana
  misc_feature: MA Experiment 20001911 PARAMETER Experiment Name: At_Drought_Reproduction_P Parameter: Plant Line Value: WS
  misc_feature: MA Experiment 20001911 PARAMETER Experiment Name: At_Drought_Reproduction_P Parameter: Timepoint (day) Value: 10
  misc_feature: MA Experiment 20001911 PARAMETER Experiment Name: At_Drought_Reproduction_P Parameter: Tissue Value: Flowers
  misc_feature: MA Experiment 20001911 PARAMETER Experiment Name: At_Drought_Reproduction_P Parameter: Treatment Value: Drought vs. No Drought
atgttcatcctcagagttcattccgttgactccgagagaccaatctccgttgaagaagaagaatcaggtttcacttacgcatcgaaaagagctcagcctcctcttaaactcatacaaccatctctcaaactcaccgaccgcaaaggcttgatccatctctatcgcaaatcttcacatagctctctgcctaaccctagctcccgatccaccactctcttcatcgtcgctgttcccaattatctctcctctctcgattttatccgtttctgtgattcccgcatctcccaagtctccgacatcctcttcatcaggaacgatggaatggaagatagatatagtgttcttatcacattttctgatcaatccgaagctgatggtttctacaacaacttgaatgggaaaaagttcgcaccatctgaggctgaggtttgtcatattctatatgtaatgtcggtggaacacacagaatttgatgaggttgctgcagaagcacctactggatttaccgagttacctacgtgtccaatatgtcttgagagattagatcctgacaccagtggtatagttagcactctttgtgatcactcgtttcagtgttcttgcacttcgaaatggacttatctgtcttgtcaggtttgtcgattgtgtcaacagcaagatgagatattaaactgttctatttgtggaaaaactgagaatgtatgggcatgccttgtctgtggcttcgtaggttgtggaagatacaaggaagggcattctattaggcactggaaagaaacgcatcactgctattctcttgatttgcgaacacaacaaatctgggattatgttggtgacagctatgttcatcggttaaaccattcaaaaattgatggaaagtcagtagagatgagcaccagttgtctgtcacaccagggggactgtggcctctgtgagtgtagtgaggatacaggaattagcggagctatctttaacagcaaagttgattcaaatatgaatcttagatcatcagtttgcctcagtggttttatttttgtggaacagattgtaatcgagtataatgaccttcttgcaagtcaactaaagggacagcgacagtactatgaatctctcattgttgaggcgagaagcaagcaagaaagtagtattgccgaagcagtagagcaaattgttgttaacacaatgcaggagcttcagaataagattgaaaaatgtgaagaggaaaaaagtggtatcactgaagttaacacaaaacttataaaagagcaggatacttggcggaagaaggccaaagaaatagaagagagggaagctgcattgctaggatcaaaagacgagatgataactgatcttcaagaacagataagagatattacggtcttcattgaagccaagaaaaccttaaagaagatgtcatcagatacggatggtatacgcgaaggaaccgtcttaccagtgcctatcagtcccgagccagtttcctcagttagaaggcaaaagaagtcaaaccggagaaagtaa

SEQ ID NO: 70411 - protein, 506 aa, Arabidopsis thaliana
  peptide (1)..(506): Ceres Seq. ID no. 2706629
  misc_feature (225)..(296): Pfam Name: Zn-finger in ubiquitin-hydrolases and other protein Pfam Description: Zn-finger in ubiquitin-hydrolases and other
  misc_feature (1)..(506): Homolog of NCBI NO: 15227893 NR Description: hypothetical protein; protein id: At2g42160.1
  misc_feature (65)..(466): Homolog of NCBI NO: 38345493 NR Description: OSJNBa0010D21.6 [Oryza sativa (japonica
  misc_feature (43)..(460): Homolog of NCBI NO: 15225236 NR Description: hypothetical protein; protein id: At2g26000.1
  misc_feature (5)..(504): Homolog of NCBI NO: 24637027 NR Description: BRAP2 [Squalus acanthias]
  misc_feature (40)..(505): Homolog of NCBI NO: 13492093 NR Description: BRAP2 variant 1 [Mus musculus]
  misc_feature (40)..(505): Homolog of NCBI NO: 13492095 NR Description: BRAP2 variant 2 [Mus musculus]
  misc_feature (40)..(505): Homolog of NCBI NO: 10800417 NR Description: BRCA1 associated protein [Homo sapiens]
  misc_feature (51)..(505): Homolog of NCBI NO: 17998683 NR Description: BRCA1 associated protein; RIKEN cDNA 3010002G07 [Mus musculus] >gi|12851424|dbj|BAB29036.1| unnamed protein
  misc_feature (40)..(475): Homolog of NCBI NO: 3252872 NR Description: BRCA1-associated protein 2 [Homo sapiens]
  misc_feature (40)..(299): Homolog of NCBI NO: 21356581 NR Description: CG5555-PA [Drosophila melanogaster]
MFILRVHSVDSERPISVEEEESGFTYASKRAQPPLKLIQPSLKLTDRKGLIHLYRKSSHSSLPNPSSRSTTLFIVAVPNYLSSLDFIRFCDSRISQVSDILFIRNDGMEDRYSVLITFSDQSEADGFYNNLNGKKFAPSEAEVCHILYVMSVEHTEFDEVAAEAPTGFTELPTCPICLERLDPDTSGIVSTLCDHSFQCSCTSKWTYLSCQVCRLCQQQDEILNCSICGKTENVWACLVCGFVGCGRYKEGHSIRHWKETHHCYSLDLRTQQIWDYVGDSYVHRLNHSKIDGKSVEMSTSCLSHQGDCGLCECSEDTGISGAIFNSKVDSNMNLRSSVCLSGFIFVEQIVIEYNDLLASQLKGQRQYYESLIVEARSKQESSIAEAVEQIVVNTMQELQNKIEKCEEEKSGITEVNTKLIKEQDTWRKKAKEIEEREAALLGSKDEMITDLQEQIRDITVFIEAKKTLKKMSSDTDGIREGTVLPVPISPEPVSSVRRQKKSNRRK

SEQ ID NO: 70412 - protein, 399 aa, Arabidopsis thaliana
  peptide (1)..(399): Ceres Seq. ID no. 2706630
  misc_feature (118)..(189): Pfam Name: Zn-finger in ubiquitin-hydrolases and other protein Pfam Description: Zn-finger in ubiquitin-hydrolases and other
  misc_feature (1)..(399): Homolog of NCBI NO: 15227893 NR Description: hypothetical protein; protein id: At2g42160.1
  misc_feature (1)..(359): Homolog of NCBI NO: 38345493 NR Description: OSJNBa0010D21.6 [Oryza sativa (japonica
  misc_feature (1)..(353): Homolog of NCBI NO: 15225236 NR Description: hypothetical protein; protein id: At2g26000.1
  misc_feature (1)..(397): Homolog of NCBI NO: 24637027 NR Description: BRAP2 [Squalus acanthias]
  misc_feature (1)..(398): Homolog of NCBI NO: 13492093 NR Description: BRAP2 variant 1 [Mus musculus]
  misc_feature (1)..(398): Homolog of NCBI NO: 13492095 NR Description: BRAP2 variant 2 [Mus musculus]
  misc_feature (1)..(398): Homolog of NCBI NO: 10800417 NR Description: BRCA1 associated protein [Homo sapiens]
  misc_feature (1)..(398): Homolog of NCBI NO: 17998683 NR Description: BRCA1 associated protein; RIKEN cDNA 3010002G07 [Mus musculus] >gi|12851424|dbj|BAB29036.1| unnamed protein
  misc_feature (1)..(368): Homolog of NCBI NO: 3252872 NR Description: BRCA1-associated protein 2 [Homo sapiens]
  misc_feature (1)..(192): Homolog of NCBI NO: 21356581 NR Description: CG5555-PA [Drosophila melanogaster]
MEDRYSVLITFSDQSEADGFYNNLNGKKFAPSEAEVCHILYVMSVEHTEFDEVAAEAPTGFTELPTCPICLERLDPDTSGIVSTLCDHSFQCSCTSKWTYLSCQVCRLCQQQDEILNCSICGKTENVWACLVCGFVGCGRYKEGHSIRHWKETHHCYSLDLRTQQIWDYVGDSYVHRLNHSKIDGKSVEMSTSCLSHQGDCGLCECSEDTGISGAIFNSKVDSNMNLRSSVCLSGFIFVEQIVIEYNDLLASQLKGQRQYYESLIVEARSKQESSIAEAVEQIVVNTMQELQNKIEKCEEEKSGITEVNTKLIKEQDTWRKKAKEIEEREAALLGSKDEMITDLQEQIRDITVFIEAKKTLKKMSSDTDGIREGTVLPVPISPEPVSSVRRQKKSNRRK

SEQ ID NO: 70413 - protein, 357 aa, Arabidopsis thaliana
  peptide (1)..(357): Ceres Seq. ID no. 2706631
  misc_feature (76)..(147): Pfam Name: Zn-finger in ubiquitin-hydrolases and other protein Pfam Description: Zn-finger in ubiquitin-hydrolases and other
  misc_feature (1)..(357): Homolog of NCBI NO: 15227893 NR Description: hypothetical protein; protein id: At2g42160.1
  misc_feature (1)..(317): Homolog of NCBI NO: 38345493 NR Description: OSJNBa0010D21.6 [Oryza sativa (japonica
  misc_feature (1)..(311): Homolog of NCBI NO: 15225236 NR Description: hypothetical protein; protein id: At2g26000.1
  misc_feature (1)..(355): Homolog of NCBI NO: 24637027 NR Description: BRAP2 [Squalus acanthias]
  misc_feature (1)..(356): Homolog of NCBI NO: 13492093 NR Description: BRAP2 variant 1 [Mus musculus]
  misc_feature (1)..(356): Homolog of NCBI NO: 13492095 NR Description: BRAP2 variant 2 [Mus musculus]
  misc_feature (1)..(356): Homolog of NCBI NO: 10800417 NR Description: BRCA1 associated protein [Homo sapiens]
  misc_feature (1)..(356): Homolog of NCBI NO: 17998683 NR Description: BRCA1 associated protein; RIKEN cDNA 3010002G07 [Mus musculus] >gi|12851424|dbj|BAB29036.1| unnamed protein
  misc_feature (1)..(326): Homolog of NCBI NO: 3252872 NR Description: BRCA1-associated protein 2 [Homo sapiens]
  misc_feature (1)..(150): Homolog of NCBI NO: 21356581 NR Description: CG5555-PA [Drosophila melanogaster]
MSVEHTEFDEVAAEAPTGFTELPTCPICLERLDPDTSGIVSTLCDHSFQCSCTSKWTYLSCQVCRLCQQQDEILNCSICGKTENVWACLVCGFVGCGRYKEGHSIRHWKETHHCYSLDLRTQQIWDYVGDSYVHRLNHSKIDGKSVEMSTSCLSHQGDCGLCECSEDTGISGAIFNSKVDSNMNLRSSVCLSGFIFVEQIVIEYNDLLASQLKGQRQYYESLIVEARSKQESSIAEAVEQIVVNTMQELQNKIEKCEEEKSGITEVNTKLIKEQDTWRKKAKEIEEREAALLGSKDEMITDLQEQIRDITVFIEAKKTLKKMSSDTDGIREGTVLPVPISPEPVSSVRRQKKSNRRK

SEQ ID NO: 70414 - DNA, 1305 bp, Arabidopsis thaliana
  misc_feature (1)..(1305): Ceres Seq. ID no. 2706655
  misc_feature: MA Experiment ID: 20000179 Result: Up-regulated in Transcription
  misc_feature: MA Experiment 20000179 PARAMETER Experiment Name: At_Germinating_Seeds_P Parameter: Age (hr) Value: 6 vs. 0
  misc_feature: MA Experiment 20000179 PARAMETER Experiment Name: At_Germinating_Seeds_P Parameter: Tissue Value: Germinating Seeds
  misc_feature: MA Experiment ID: 20000180 Result: Up-regulated in Transcription
  misc_feature: MA Experiment 20000180 PARAMETER Experiment Name: At_Germinating_Seeds_P Parameter: Age (hr) Value: 24 vs. 0
  misc_feature: MA Experiment 20000180 PARAMETER Experiment Name: At_Germinating_Seeds_P Parameter: Tissue Value: Germinating Seeds
  misc_feature: MA Experiment ID: 20000265 Result: Up-regulated in Transcription
  misc_feature: MA Experiment 20000265 PARAMETER Experiment Name: At_Open_Flower_P Parameter: Age (day) Value: 21
  misc_feature: MA Experiment 20000265 PARAMETER Experiment Name: At_Open_Flower_P Parameter: Plant Line Value: WS
  misc_feature: MA Experiment 20000265 PARAMETER Experiment Name: At_Open_Flower_P Parameter: Tissue Value: Closed Flower vs. Whole Plant
  misc_feature: MA Experiment ID: 20000794 Result: Up-regulated in Transcription
  misc_feature: MA Experiment 20000794 PARAMETER Experiment Name: At_Petals_P Parameter: Age (day) Value: 23-25 days
  misc_feature: MA Experiment 20000794 PARAMETER Experiment Name: At_Petals_P Parameter: Plant Line Value: WS
  misc_feature: MA Experiment 20000794 PARAMETER Experiment Name: At_Petals_P Parameter: Tissue Value: Petals vs. Whole plant
atggattcttcttcctcttcctcttcttcttctccttcttcttcctacggtgttgctcgtgtcagccatatctccaatccttgcatcttcggggaagttgggtcgtcatcttcgtcaacgtatagagataagaaatggaagttgatgaaatgggtgagtaaacttttcaagagtggctcgaatggtggtggtagtggtgctcacactaatcatcatcctcctcagtttcaagaagacgagaatatggtctttcctctacctccttcttctttggatgatcggtcaagaggtgcacgggacaaagaagaactcgaccgttcaatttcactttctctagctgacaacacgaagcgcccacatgggtatggttggtctatggataacaaccgagattttccaaggccttttcacggtggcttgaatccatcatctttcattccaccttatgagccttcctatcaatatagacgaagacaaagaatatgtggcggttgcaatagcgatattggatcggggaactatctaggatgcatgggcacattctttcatcctgaatgcttccgttgccattcttgtggttatgctatcactgagcatgagataccaactaatgatgctggcttgatcgagtatcgatgccatccgttttggaaccaaaagtattgcccgtctcacgaatatgataaaactgctcgttgttgtagctgcgaacgtttggagtcatgggatgtgagatattacacgttagaggatgggagaagtttgtgtttagaatgtatggaaaccgcgataaccgatactggagaatgtcaaccgctttaccacgctataagagactattacgaaggaatgtacatgaaacttgatcaacagattcctatgcttcttgttcaaagagaagctctcaatgatgctatcgtaggagagaaaaacgttcttagaagaccgagacttggtgctcaccgtcttgttgggtttaggaaccttaaccctgaggtagaggaaggaatctgccaagtcctctcttacatgtggcttgaatctgaagttctctcagatccttcaacaagaaacttgccttcaacatcatcggtggccacatcatcatcatcatccttctcgaacaagaaaggaggaaaatcaaacgtggagaagaaacttggagagttctttaaacatcagatagctcatgatgcgtctccagcttatggaggaggtttcagggcagcaaatgcagcggcttgtaagtacggtcttcgtcgaacactcgatcatatccgcttaactggaacttttcctttgtga

SEQ ID NO: 70415 - protein, 434 aa, Arabidopsis thaliana
  peptide (1)..(434): Ceres Seq. ID no. 2706656
  misc_feature (162)..(221): Pfam Name: LIM domain Pfam Description: LIM domain
  misc_feature (1)..(434): Homolog of NCBI NO: 15225574 NR Description: hypothetical protein; protein id: At2g39830.1
  misc_feature (177)..(341): Homolog of NCBI NO: 17065046 NR Description: Unknown protein [Arabidopsis thaliana]
  misc_feature (322)..(433): Homolog of NCBI NO: 17065046 NR Description: Unknown protein [Arabidopsis thaliana]
  misc_feature (162)..(311): Homolog of NCBI NO: 15221983 NR Description: unknown protein; protein id: At1g19270.1
  misc_feature (322)..(434): Homolog of NCBI NO: 15221983 NR Description: unknown protein; protein id: At1g19270.1
  misc_feature (141)..(341): Homolog of NCBI NO: 25407769 NR Description: hypothetical protein AT4g36860 [imported] - thaliana >gi|4006886|emb|CAB16816.1| putative protein thaliana] >gi|7270635|emb|CAB80352.1| putative protein
  misc_feature (322)..(433): Homolog of NCBI NO: 25407769 NR Description: hypothetical protein AT4g36860 [imported] - thaliana >gi|4006886|emb|CAB16816.1| putative protein thaliana] >gi|7270635|emb|CAB80352.1| putative protein
  misc_feature (162)..(311): Homolog of NCBI NO: 25518496 NR Description: hypothetical protein T29M8.14 - Arabidopsis
  misc_feature (322)..(431): Homolog of NCBI NO: 25518496 NR Description: hypothetical protein T29M8.14 - Arabidopsis
  misc_feature (177)..(341): Homolog of NCBI NO: 22329212 NR Description: putative protein; protein id: At4g36860.1,
MDSSSSSSSSSPSSSYGVARVSHISNPCIFGEVGSSSSSTYRDKKWKLMKWVSKLFKSGSNGGGSGAHTNHHPPQFQEDENMVFPLPPSSLDDRSRGARDKEELDRSISLSLADNTKRPHGYGWSMDNNRDFPRPFHGGLNPSSFIPPYEPSYQYRRRQRICGGCNSDIGSGNYLGCMGTFFHPECFRCHSCGYAITEHEIPTNDAGLIEYRCHPFWNQKYCPSHEYDKTARCCSCERLESWDVRYYTLEDGRSLCLECMETAITDTGECQPLYHAIRDYYEGMYMKLDQQIPMLLVQREALNDAIVGEKNVLRRPRLGAHRLVGFRNLNPEVEEGICQVLSYMWLESEVLSDPSTRNLPSTSSVATSSSSSFSNKKGGKSNVEKKLGEFFKHQIAHDASPAYGGGFRAANAAACKYGLRRTLDHIRLTGTFPL

SEQ ID NO: 70416 - protein, 386 aa, Arabidopsis thaliana
  peptide (1)..(386): Ceres Seq. ID no. 2706657
  misc_feature (114)..(173): Pfam Name: LIM domain Pfam Description: LIM domain
  misc_feature (1)..(386): Homolog of NCBI NO: 15225574 NR Description: hypothetical protein; protein id: At2g39830.1
  misc_feature (129)..(293): Homolog of NCBI NO: 17065046 NR Description: Unknown protein [Arabidopsis thaliana]
  misc_feature (274)..(385): Homolog of NCBI NO: 17065046 NR Description: Unknown protein [Arabidopsis thaliana]
  misc_feature (114)..(263): Homolog of NCBI NO: 15221983 NR Description: unknown protein; protein id: At1g19270.1
  misc_feature (274)..(386): Homolog of NCBI NO: 15221983 NR Description: unknown protein; protein id: At1g19270.1
  misc_feature (93)..(293): Homolog of NCBI NO: 25407769 NR Description: hypothetical protein AT4g36860 [imported] - thaliana >gi|4006886|emb|CAB16816.1| putative protein thaliana] >gi|7270635|emb|CAB80352.1| putative protein
  misc_feature (274)..(385): Homolog of NCBI NO: 25407769 NR Description: hypothetical protein AT4g36860 [imported] - thaliana >gi|4006886|emb|CAB16816.1| putative protein thaliana] >gi|7270635|emb|CAB80352.1| putative protein
  misc_feature (114)..(263): Homolog of NCBI NO: 25518496 NR Description: hypothetical protein T29M8.14 - Arabidopsis
  misc_feature (274)..(383): Homolog of NCBI NO: 25518496 NR Description: hypothetical protein T29M8.14 - Arabidopsis
  misc_feature (129)..(293): Homolog of NCBI NO: 22329212 NR Description: putative protein; protein id: At4g36860.1,
MKWVSKLFKSGSNGGGSGAHTNHHPPQFQEDENMVFPLPPSSLDDRSRGARDKEELDRSISLSLADNTKRPHGYGWSMDNNRDFPRPFHGGLNPSSFIPPYEPSYQYRRRQRICGGCNSDIGSGNYLGCMGTFFHPECFRCHSCGYAITEHEIPTNDAGLIEYRCHPFWNQKYCPSHEYDKTARCCSCERLESWDVRYYTLEDGRSLCLECMETAITDTGECQPLYHAIRDYYEGMYMKLDQQIPMLLVQREALNDAIVGEKNVLRRPRLGAHRLVGFRNLNPEVEEGICQVLSYMWLESEVLSDPSTRNLPSTSSVATSSSSSFSNKKGGKSNVEKKLGEFFKHQIAHDASPAYGGGFRAANAAACKYGLRRTLDHIRLTGTFPL

SEQ ID NO: 70417 - protein, 353 aa, Arabidopsis thaliana
  peptide (1)..(353): Ceres Seq. ID no. 2706658
  misc_feature (81)..(140): Pfam Name: LIM domain Pfam Description: LIM domain
  misc_feature (1)..(353): Homolog of NCBI NO: 15225574 NR Description: hypothetical protein; protein id: At2g39830.1
  misc_feature (96)..(260): Homolog of NCBI NO: 17065046 NR Description: Unknown protein [Arabidopsis thaliana]
  misc_feature (241)..(352): Homolog of NCBI NO: 17065046 NR Description: Unknown protein [Arabidopsis thaliana]
  misc_feature (81)..(230): Homolog of NCBI NO: 15221983 NR Description: unknown protein; protein id: At1g19270.1
  misc_feature (241)..(353): Homolog of NCBI NO: 15221983 NR Description: unknown protein; protein id: At1g19270.1
  misc_feature (60)..(260): Homolog of NCBI NO: 25407769 NR Description: hypothetical protein AT4g36860 [imported] - thaliana >gi|4006886|emb|CAB16816.1| putative protein thaliana] >gi|7270635|emb|CAB80352.1| putative protein
  misc_feature (241)..(352): Homolog of NCBI NO: 25407769 NR Description: hypothetical protein AT4g36860 [imported] - thaliana >gi|4006886|emb|CAB16816.1| putative protein thaliana] >gi|7270635|emb|CAB80352.1| putative protein
  misc_feature (81)..(230): Homolog of NCBI NO: 25518496 NR Description: hypothetical protein T29M8.14 - Arabidopsis
  misc_feature (241)..(350): Homolog of NCBI NO: 25518496 NR Description: hypothetical protein T29M8.14 - Arabidopsis
  misc_feature (96)..(260): Homolog of NCBI NO: 22329212 NR Description: putative protein; protein id: At4g36860.1,
MVFPLPPSSLDDRSRGARDKEELDRSISLSLADNTKRPHGYGWSMDNNRDFPRPFHGGLNPSSFIPPYEPSYQYRRRQRICGGCNSDIGSGNYLGCMGTFFHPECFRCHSCGYAITEHEIPTNDAGLIEYRCHPFWNQKYCPSHEYDKTARCCSCERLESWDVRYYTLEDGRSLCLECMETAITDTGECQPLYHAIRDYYEGMYMKLDQQIPMLLVQREALNDAIVGEKNVLRRPRLGAHRLVGFRNLNPEVEEGICQVLSYMWLESEVLSDPSTRNLPSTSSVATSSSSSFSNKKGGKSNVEKKLGEFFKHQIAHDASPAYGGGFRAANAAACKYGLRRTLDHIRLTGTFPL

SEQ ID NO: 70418 - DNA, 1566 bp, Arabidopsis thaliana
  misc_feature (1)..(1566): Ceres Seq. ID no. 2706693
  misc_feature: MA Experiment ID: 20000227 Result: Up-regulated in Transcription
  misc_feature: MA Experiment 20000227 PARAMETER Experiment Name: At_Root-Tips-vs-Tops_P Parameter: Tissue Value: Root Tips vs. Root Tops
atgtcagttctgtcatgggcttttaccgttgcgtggtttaccctctggatgttgatgctatacttgacgaacgagatgaagctaaagttcacagacgcagctgcgattgtaaatgtgtttgctggtgtatcagctattggtcatcttggcatgcaatttcttgttgatgcatttattggtcacttttggatgctctgtctctctactttagcattcagtttcggtttcgggttcttggcaatatcagcgtcaccaatactttcaggcaatggacaaaagggcctgttctacgtagcgctaacggttatatccgttggtatatttggacggtctatctctttgggagtatttacagaagaccaactagaagacggtaggaacaagggaaaccccgccaagctcgttagctttgtcattggaaatgtggggaattttgtgttcttgttacttgctgctattgcaatgcctcagataagtccgtggtttgttaggttcacgatcccctcgggctgtgaggtattagcaatgctgatttttatttccggtgcgtgttcatacaaacgggttaaaccaggtgggagccctttgacaacggttttccgggtctttatggcttctgcttccaaaatgtcttgtgcatactcgaacaactcaagccagctctatgaaaaagctgagtgtgatcaagatattaagccccacacaagcagcttaaggtatctagatagagctgcaatgatactccaaacagagtctttggaacaacagaggaaaaacagatggaagctttgtcgggtgacagaagtggagcaaacgaaaagcgtcatacgcacggttcctttgtttgcgacatctctcatttcggggattgtcttctctcttggtaatactttcttccttgaacaagcaaaccatatggactccaagttcggatcatggaaccttcctctcccactcctcttactctttagtgaagctgcaaggctaggatcccgagaactatgtgtcatggctgcaaaacgccatgccattgacttccctgaatcacctaaacaaaccaaaacgccttatggtataccagtctccatcatcctatcgatattttgctgctccatcgctgcacatgttgagtctaggaggctcaaagtagttagtactcaaggtttactacatgaaactgtccccatgagtgtattctggctgctcccacagtacattctactcggttcaatcacaggaatctacgaaaacagctttgcgctttacctagaagaaacggtgcctgaagagttgagccaatacatggttctattaaacgtgggagtgtgcggggtcgggatcatgagcaacattgctcttgttagtttggtgggcagtgtaagcggaggcaaatggtttcaagacacaataaacaagagccgggtggataactattattgggttataacagtgttttgcatgttcaatctcttgttatatttcattgtaacctataggtacacagtgtgtaacaagaaagatggtgcaacacaagaaaatgatcgaaggataatcgcttctgtgtag

SEQ ID NO: 70419 - protein, 521 aa, Arabidopsis thaliana
  peptide (1)..(521): Ceres Seq. ID no. 2706694
  misc_feature (62)..(447): Pfam Name: POT family Pfam Description: POT family
  misc_feature (1)..(521): Homolog of NCBI NO: 15224443 NR Description: putative peptide/amino acid transporter; protein At2g38100.1 [Arabidopsis thaliana] >gi|3335358|gb|AAC27159.1|
  misc_feature (1)..(521): Homolog of NCBI NO: 25455895 NR Description: peptide transport protein homolog At2g38100 -
  misc_feature (3)..(515): Homolog of NCBI NO: 34897398 NR Description: putative peptide transport protein [Oryza sativa
  misc_feature (18)..(515): Homolog of NCBI NO: 11358594 NR Description: oligopeptide transporter-like protein -
  misc_feature (45)..(511): Homolog of NCBI NO: 34394155 NR Description: putative peptide transport protein [Oryza sativa
  misc_feature (45)..(500): Homolog of NCBI NO: 15232435 NR Description: peptide transport - like protein; protein id: supported by cDNA: 117581., supported by cDNA: gi_13430485,
  misc_feature (82)..(506): Homolog of NCBI NO: 9581819 NR Description: putative low-affinity nitrate transporter
  misc_feature (82)..(506): Homolog of NCBI NO: 28273096 NR Description: nitrate transporter [Nicotiana tabacum]
  misc_feature (82)..(506): Homolog of NCBI NO: 28273100 NR Description: nitrate transporter [Nicotiana tabacum]
  misc_feature (18)..(501): Homolog of NCBI NO: 34907736 NR Description: putative peptide transport protein [Oryza sativa
MSVLSWAFTVAWFTLWMLMLYLTNEMKLKFTDAAAIVNVFAGVSAIGHLGMQFLVDAFIGHFWMLCLSTLAFSFGFGFLAISASPILSGNGQKGLFYVALTVISVGIFGRSISLGVFTEDQLEDGRNKGNPAKLVSFVIGNVGNFVFLLLAAIAMPQISPWFVRFTIPSGCEVLAMLIFISGACSYKRVKPGGSPLTTVFRVFMASASKMSCAYSNNSSQLYEKAECDQDIKPHTSSLRYLDRAAMILQTESLEQQRKNRWKLCRVTEVEQTKSVIRTVPLFATSLISGIVFSLGNTFFLEQANHMDSKFGSWNLPLPLLLLFSEAARLGSRELCVMAAKRHAIDFPESPKQTKTPYGIPVSIILSIFCCSIAAHVESRRLKVVSTQGLLHETVPMSVFWLLPQYILLGSITGIYENSFALYLEETVPEELSQYMVLLNVGVCGVGIMSNIALVSLVGSVSGGKWFQDTINKSRVDNYYWVITVFCMFNLLLYFIVTYRYTVCNKKDGATQENDRRIIASV

SEQ ID NO: 70420 - protein, 505 aa, Arabidopsis thaliana
  peptide (1)..(505): Ceres Seq. ID no. 2706695
  misc_feature (46)..(431): Pfam Name: POT family Pfam Description: POT family
  misc_feature (1)..(505): Homolog of NCBI NO: 15224443 NR Description: putative peptide/amino acid transporter; protein At2g38100.1 [Arabidopsis thaliana] >gi|3335358|gb|AAC27159.1|
  misc_feature (1)..(505): Homolog of NCBI NO: 25455895 NR Description: peptide transport protein homolog At2g38100 -
  misc_feature (1)..(499): Homolog of NCBI NO: 34897398 NR Description: putative peptide transport protein [Oryza sativa
  misc_feature (2)..(499): Homolog of NCBI NO: 11358594 NR Description: oligopeptide transporter-like protein -
  misc_feature (29)..(495): Homolog of NCBI NO: 34394155 NR Description: putative peptide transport protein [Oryza sativa
  misc_feature (29)..(484): Homolog of NCBI NO: 15232435 NR Description: peptide transport - like protein; protein id: supported by cDNA: 117581., supported by cDNA: gi_13430485,
  misc_feature (66)..(490): Homolog of NCBI NO: 9581819 NR Description: putative low-affinity nitrate transporter
  misc_feature (66)..(490): Homolog of NCBI NO: 28273096 NR Description: nitrate transporter [Nicotiana tabacum]
  misc_feature (66)..(490): Homolog of NCBI NO: 28273100 NR Description: nitrate transporter [Nicotiana tabacum]
  misc_feature (2)..(485): Homolog of NCBI NO: 34907736 NR Description: putative peptide transport protein [Oryza sativa
MLMLYLTNEMKLKFTDAAAIVNVFAGVSAIGHLGMQFLVDAFIGHFWMLCLSTLAFSFGFGFLAISASPILSGNGQKGLFYVALTVISVGIFGRSISLGVFTEDQLEDGRNKGNPAKLVSFVIGNVGNFVFLLLAAIAMPQISPWFVRFTIPSGCEVLAMLIFISGACSYKRVKPGGSPLTTVFRVFMASASKMSCAYSNNSSQLYEKAECDQDIKPHTSSLRYLDRAAMILQTESLEQQRKNRWKLCRVTEVEQTKSVIRTVPLFATSLISGIVFSLGNTFFLEQANHMDSKFGSWNLPLPLLLLFSEAARLGSRELCVMAAKRHAIDFPESPKQTKTPYGIPVSIILSIFCCSIAAHVESRRLKVVSTQGLLHETVPMSVFWLLPQYILLGSITGIYENSFALYLEETVPEELSQYMVLLNVGVCGVGIMSNIALVSLVGSVSGGKWFQDTINKSRVDNYYWVITVFCMFNLLLYFIVTYRYTVCNKKDGATQENDRRIIASV

SEQ ID NO: 70421 - protein, 503 aa, Arabidopsis thaliana
  peptide (1)..(503): Ceres Seq. ID no. 2706696
  misc_feature (44)..(429): Pfam Name: POT family Pfam Description: POT family
  misc_feature (1)..(503): Homolog of NCBI NO: 15224443 NR Description: putative peptide/amino acid transporter; protein At2g38100.1 [Arabidopsis thaliana] >gi|3335358|gb|AAC27159.1|
  misc_feature (1)..(503): Homolog of NCBI NO: 25455895 NR Description: peptide transport protein homolog At2g38100 -
  misc_feature (1)..(497): Homolog of NCBI NO: 34897398 NR Description: putative peptide transport protein [Oryza sativa
  misc_feature (1)..(497): Homolog of NCBI NO: 11358594 NR Description: oligopeptide transporter-like protein -
  misc_feature (27)..(493): Homolog of NCBI NO: 34394155 NR Description: putative peptide transport protein [Oryza sativa
  misc_feature (27)..(482): Homolog of NCBI NO: 15232435 NR Description: peptide transport - like protein; protein id: supported by cDNA: 117581., supported by cDNA: gi_13430485,
  misc_feature (64)..(488): Homolog of NCBI NO: 9581819 NR Description: putative low-affinity nitrate transporter
  misc_feature (64)..(488): Homolog of NCBI NO: 28273096 NR Description: nitrate transporter [Nicotiana tabacum]
  misc_feature (64)..(488): Homolog of NCBI NO: 28273100 NR Description: nitrate transporter [Nicotiana tabacum]
  misc_feature (1)..(483): Homolog of NCBI NO: 34907736 NR Description: putative peptide transport protein [Oryza sativa
MLYLTNEMKLKFTDAAAIVNVFAGVSAIGHLGMQFLVDAFIGHFWMLCLSTLAFSFGFGFLAISASPILSGNGQKGLFYVALTVISVGIFGRSISLGVFTEDQLEDGRNKGNPAKLVSFVIGNVGNFVFLLLAAIAMPQISPWFVRFTIPSGCEVLAMLIFISGACSYKRVKPGGSPLTTVFRVFMASASKMSCAYSNNSSQLYEKAECDQDIKPHTSSLRYLDRAAMILQTESLEQQRKNRWKLCRVTEVEQTKSVIRTVPLFATSLISGIVFSLGNTFFLEQANHMDSKFGSWNLPLPLLLLFSEAARLGSRELCVMAAKRHAIDFPESPKQTKTPYGIPVSIILSIFCCSIAAHVESRRLKVVSTQGLLHETVPMSVFWLLPQYILLGSITGIYENSFALYLEETVPEELSQYMVLLNVGVCGVGIMSNIALVSLVGSVSGGKWFQDTINKSRVDNYYWVITVFCMFNLLLYFIVTYRYTVCNKKDGATQENDRRIIASV

SEQ ID NO: 70422 - DNA, 657 bp, Arabidopsis thaliana
  misc_feature (1)..(657): Ceres Seq. ID no. 2706745
  misc_feature: MA Experiment ID: 20000166 Result: Down-regulated in Transcription
  misc_feature: MA Experiment 20000166 PARAMETER Experiment Name: At_100uM_ABA_P Parameter: Age (day) Value: 14
  misc_feature: MA Experiment 20000166 PARAMETER Experiment Name: At_100uM_ABA_P Parameter: Organism Value: A. thaliana
  misc_feature: MA Experiment 20000166 PARAMETER Experiment Name: At_100uM_ABA_P Parameter: Plant Line Value: WS
  misc_feature: MA Experiment 20000166 PARAMETER Experiment Name: At_100uM_ABA_P Parameter: Timepoint (hr) Value: 1
  misc_feature: MA Experiment 20000166 PARAMETER Experiment Name: At_100uM_ABA_P Parameter: Tissue Value: Aerial
  misc_feature: MA Experiment 20000166 PARAMETER Experiment Name: At_100uM_ABA_P Parameter: Treatment Value: 100uM ABA vs. No Treatment
  misc_feature: MA Experiment ID: 20000184 Result: Down-regulated in Transcription
  misc_feature: MA Experiment 20000184 PARAMETER Experiment Name: At_Shoots__P Parameter: Age (day) Value: 7
  misc_feature: MA Experiment 20000184 PARAMETER Experiment Name: At_Shoots__P Parameter: Tissue Value: Shoots vs. Whole Plant
  misc_feature: MA Experiment ID: 20000227 Result: Down-regulated in Transcription
  misc_feature: MA Experiment 20000227 PARAMETER Experiment Name: At_Root-Tips-vs-Tops_P Parameter: Tissue Value: Root Tips vs. Root Tops
  misc_feature: MA Experiment ID: 20000436 Result: Down-regulated in Transcription
  misc_feature: MA Experiment 20000436 PARAMETER Experiment Name: At_Drought_P Parameter: Age (day) Value: 7
  misc_feature: MA Experiment 20000436 PARAMETER Experiment Name: At_Drought_P Parameter: Organism Value: A. thaliana
  misc_feature: MA Experiment 20000436 PARAMETER Experiment Name: At_Drought_P Parameter: Plant Line Value: WS
  misc_feature: MA Experiment 20000436 PARAMETER Experiment Name: At_Drought_P Parameter: Timepoint (hr) Value: 12
  misc_feature: MA Experiment 20000436 PARAMETER Experiment Name: At_Drought_P Parameter: Tissue Value: Whole Plant
  misc_feature: MA Experiment 20000436 PARAMETER Experiment Name: At_Drought_P Parameter: Treatment Value: Drought vs. No Drought
  misc_feature: MA Experiment ID: 20000439 Result: Up-regulated in Transcription
  misc_feature: MA Experiment 20000439 PARAMETER Experiment Name: At_Roots__P Parameter: Age (day) Value: 14 vs. 21
  misc_feature: MA Experiment 20000439 PARAMETER Experiment Name: At_Roots__P Parameter: Organism Value: A. thaliana
  misc_feature: MA Experiment 20000439 PARAMETER Experiment Name: At_Roots__P Parameter: Tissue Value: Roots vs. Whole Plant
  misc_feature: MA Experiment ID: 20000453 Result: Down-regulated in Transcription
  misc_feature: MA Experiment 20000453 PARAMETER Experiment Name: At_100uM_ABA_P Parameter: Age (day) Value: 15
  misc_feature: MA Experiment 20000453 PARAMETER Experiment Name: At_100uM_ABA_P Parameter: Organism Value: A. thaliana
  misc_feature: MA Experiment 20000453 PARAMETER Experiment Name: At_100uM_ABA_P Parameter: Plant Line Value: WS
  misc_feature: MA Experiment 20000453 PARAMETER Experiment Name: At_100uM_ABA_P Parameter: Timepoint (hr) Value: 24
  misc_feature: MA Experiment 20000453 PARAMETER Experiment Name: At_100uM_ABA_P Parameter: Tissue Value: Aerial
  misc_feature: MA Experiment 20000453 PARAMETER Experiment Name: At_100uM_ABA_P Parameter: Treatment Value: 100uM ABA vs. No Treatment
  misc_feature: MA Experiment ID: 20000456 Result: Up-regulated in Transcription
  misc_feature: MA Experiment 20000456 PARAMETER Experiment Name: At_100uM_BA_P Parameter: Age (day) Value: 14
  misc_feature: MA Experiment 20000456 PARAMETER Experiment Name: At_100uM_BA_P Parameter: Organism Value: A. thaliana
  misc_feature: MA Experiment 20000456 PARAMETER Experiment Name: At_100uM_BA_P Parameter: Plant Line Value: WS
  misc_feature: MA Experiment 20000456 PARAMETER Experiment Name: At_100uM_BA_P Parameter: Timepoint (hr) Value: 6
  misc_feature: MA Experiment 20000456 PARAMETER Experiment Name: At_100uM_BA_P Parameter: Tissue Value: Aerial
  misc_feature: MA Experiment 20000456 PARAMETER Experiment Name: At_100uM_BA_P Parameter: Treatment Value: 100uM BA vs. No Treatment
  misc_feature: MA Experiment ID: 20000709 Result: Up-regulated in Transcription
  misc_feature: MA Experiment 20000709 PARAMETER Experiment Name: At_15mM_NH4NO3_L-to-H_P Parameter: Age (hr) Value: 14
  misc_feature: MA Experiment 20000709 PARAMETER Experiment Name: At_15mM_NH4NO3_L-to-H_P Parameter: Organism Value: A. thaliana
  misc_feature: MA Experiment 20000709 PARAMETER Experiment Name: At_15mM_NH4NO3_L-to-H_P Parameter: Plant Line Value: WS
  misc_feature: MA Experiment 20000709 PARAMETER Experiment Name: At_15mM_NH4NO3_L-to-H_P Parameter: Timepoint (hr) Value: 4
  misc_feature: MA Experiment 20000709 PARAMETER Experiment Name: At_15mM_NH4NO3_L-to-H_P Parameter: Tissue Value: Aerial
  misc_feature: MA Experiment 20000709 PARAMETER Experiment Name: At_15mM_NH4NO3_L-to-H_P Parameter: Treatment Value: 15mM NH4NO3 vs. 30mM Mannitol
  misc_feature: MA Experiment ID: 20000794 Result: Up-regulated in Transcription
  misc_feature: MA Experiment 20000794 PARAMETER Experiment Name: At_Petals_P Parameter: Age (day) Value: 23-25 days
  misc_feature: MA Experiment 20000794 PARAMETER Experiment Name: At_Petals_P Parameter: Plant Line Value: WS
  misc_feature: MA Experiment 20000794 PARAMETER Experiment Name: At_Petals_P Parameter: Tissue Value: Petals vs. Whole plant
  misc_feature: MA Experiment ID: 20001451 Result: Down-regulated in Transcription
  misc_feature: MA Experiment 20001451 PARAMETER Experiment Name: At_Far-red-induction_P Parameter: Age (day) Value: 7
  misc_feature: MA Experiment 20001451 PARAMETER Experiment Name: At_Far-red-induction_P Parameter: Light Value: Far-red vs. White
  misc_feature: MA Experiment 20001451 PARAMETER Experiment Name: At_Far-red-induction_P Parameter: Organism Value: A. thaliana
  misc_feature: MA Experiment 20001451 PARAMETER Experiment Name: At_Far-red-induction_P Parameter: Plant Line Value: Columbia
  misc_feature: MA Experiment 20001451 PARAMETER Experiment Name: At_Far-red-induction_P Parameter: Timepoint (hr) Value: 24
  misc_feature: MA Experiment 20001451 PARAMETER Experiment Name: At_Far-red-induction_P Parameter: Tissue Value: Whole Plant
  misc_feature: MA Experiment ID: 20001457 Result: Up-regulated in Transcription
  misc_feature: MA Experiment 20001457 PARAMETER Experiment Name: At_50mM_NH4NO3_L-to-H_P Parameter: Age (day) Value: Undefined
  misc_feature: MA Experiment 20001457 PARAMETER Experiment Name: At_50mM_NH4NO3_L-to-H_P Parameter: Organism Value: Undefined
  misc_feature: MA Experiment 20001457 PARAMETER Experiment Name: At_50mM_NH4NO3_L-to-H_P Parameter: Plant Line Value: Undefined
  misc_feature: MA Experiment 20001457 PARAMETER Experiment Name: At_50mM_NH4NO3_L-to-H_P Parameter: Timepoint (hr) Value: 0.5
  misc_feature: MA Experiment 20001457 PARAMETER Experiment Name: At_50mM_NH4NO3_L-to-H_P Parameter: Tissue Value: Siliques
  misc_feature: MA Experiment 20001457 PARAMETER Experiment Name: At_50mM_NH4NO3_L-to-H_P Parameter: Treatment Value: 50mM NH4NO3 vs. 100mM Manitol
  misc_feature: MA Experiment ID: 20001458 Result: Up-regulated in Transcription
  misc_feature: MA Experiment 20001458 PARAMETER Experiment Name: At_50mM_NH4NO3_L-to-H_P Parameter: Age (day) Value: Undefined
  misc_feature: MA Experiment 20001458 PARAMETER Experiment Name: At_50mM_NH4NO3_L-to-H_P Parameter: Organism Value: Undefined
  misc_feature: MA Experiment 20001458 PARAMETER Experiment Name: At_50mM_NH4NO3_L-to-H_P Parameter: Plant Line Value: Undefined
  misc_feature: MA Experiment 20001458 PARAMETER Experiment Name: At_50mM_NH4NO3_L-to-H_P Parameter: Timepoint (hr) Value: 2
  misc_feature: MA Experiment 20001458 PARAMETER Experiment Name: At_50mM_NH4NO3_L-to-H_P Parameter: Tissue Value: Siliques
  misc_feature: MA Experiment 20001458 PARAMETER Experiment Name: At_50mM_NH4NO3_L-to-H_P Parameter: Treatment Value: 50mM NH4NO3 vs. 100mM Manitol
  misc_feature: MA Experiment ID: 20001459 Result: Up-regulated in Transcription
  misc_feature: MA Experiment 20001459 PARAMETER Experiment Name: At_50mM_NH4NO3_L-to-H_P Parameter: Age (day) Value: Undefined
  misc_feature: MA Experiment 20001459 PARAMETER Experiment Name: At_50mM_NH4NO3_L-to-H_P Parameter: Organism Value: Undefined
  misc_feature: MA Experiment 20001459 PARAMETER Experiment Name: At_50mM_NH4NO3_L-to-H_P Parameter: Plant Line Value: Undefined
  misc_feature: MA Experiment 20001459 PARAMETER Experiment Name: At_50mM_NH4NO3_L-to-H_P Parameter: Timepoint (hr) Value: 4
  misc_feature: MA Experiment 20001459 PARAMETER Experiment Name: At_50mM_NH4NO3_L-to-H_P Parameter: Tissue Value: Siliques
  misc_feature: MA Experiment 20001459 PARAMETER Experiment Name: At_50mM_NH4NO3_L-to-H_P Parameter: Treatment Value: 50mM NH4NO3 vs. 100mM Manitol
  misc_feature: MA Experiment ID: 20001557 Result: Up-regulated in Transcription
  misc_feature: MA Experiment 20001557 PARAMETER Experiment Name: At_Drought_Soil_Dry_P Parameter: Age (day) Value: 27
  misc_feature: MA Experiment 20001557 PARAMETER Experiment Name: At_Drought_Soil_Dry_P Parameter: Organism Value: A. thaliana
  misc_feature: MA Experiment 20001557 PARAMETER Experiment Name: At_Drought_Soil_Dry_P Parameter: Plant Line Value: WS
  misc_feature: MA Experiment 20001557 PARAMETER Experiment Name: At_Drought_Soil_Dry_P Parameter: Post Timepoint (hr) Value: 3
  misc_feature: MA Experiment 20001557 PARAMETER Experiment Name: At_Drought_Soil_Dry_P Parameter: Post-Treatment Value: Re-Water vs. No Drought
  misc_feature: MA Experiment 20001557 PARAMETER Experiment Name: At_Drought_Soil_Dry_P Parameter: Timepoint (day) Value: 13
  misc_feature: MA Experiment 20001557 PARAMETER Experiment Name: At_Drought_Soil_Dry_P Parameter: Treatment Value: Drought vs. No Drought
  misc_feature: MA Experiment ID: 20001558 Result: Up-regulated in Transcription
  misc_feature: MA Experiment 20001558 PARAMETER Experiment Name: At_Drought_Soil_Dry_P Parameter: Age (day) Value: 27
  misc_feature: MA Experiment 20001558 PARAMETER Experiment Name: At_Drought_Soil_Dry_P Parameter: Organism Value: A. thaliana
  misc_feature: MA Experiment 20001558 PARAMETER Experiment Name: At_Drought_Soil_Dry_P Parameter: Plant Line Value: WS
  misc_feature: MA Experiment 20001558 PARAMETER Experiment Name: At_Drought_Soil_Dry_P Parameter: Post Timepoint (hr) Value: 6
  misc_feature: MA Experiment 20001558 PARAMETER Experiment Name: At_Drought_Soil_Dry_P Parameter: Post-Treatment Value: Re-Water vs. No Drought
  misc_feature: MA Experiment 20001558 PARAMETER Experiment Name: At_Drought_Soil_Dry_P Parameter: Timepoint (day) Value: 13
  misc_feature: MA Experiment 20001558 PARAMETER Experiment Name: At_Drought_Soil_Dry_P Parameter: Treatment Value: Drought vs. No Drought
  misc_feature: MA Experiment ID: 20001759 Result: Up-regulated in Transcription
  misc_feature: MA Experiment 20001759 PARAMETER Experiment Name: At_50mM_NH4NO3_L-to-H_P Parameter: Timepoint (hr) Value: 1
  misc_feature: MA Experiment 20001759 PARAMETER Experiment Name: At_50mM_NH4NO3_L-to-H_P Parameter: Tissue Value: Siliques
  misc_feature: MA Experiment 20001759 PARAMETER Experiment Name: At_50mM_NH4NO3_L-to-H_P Parameter: Treatment Value: 50mM NH4NO3 vs 100mM Mannitol
  misc_feature: MA Experiment ID: 20001905 Result: Up-regulated in Transcription
  misc_feature: MA Experiment 20001905 PARAMETER Experiment Name: At_Drought_Reproduction_P Parameter: Age (day) Value: 40
  misc_feature: MA Experiment 20001905 PARAMETER Experiment Name: At_Drought_Reproduction_P Parameter: Organism Value: A. thaliana
  misc_feature: MA Experiment 20001905 PARAMETER Experiment Name: At_Drought_Reproduction_P Parameter: Plant Line Value: WS
  misc_feature: MA Experiment 20001905 PARAMETER Experiment Name: At_Drought_Reproduction_P Parameter: Timepoint (day) Value: 10
  misc_feature: MA Experiment 20001905 PARAMETER Experiment Name: At_Drought_Reproduction_P Parameter: Tissue Value: Rosettes
  misc_feature: MA Experiment 20001905 PARAMETER Experiment Name: At_Drought_Reproduction_P Parameter: Treatment Value: Drought vs. No Drought
atgagcatgaaccagtttaggactatggaggaggagaagcaagacggtggtgagcttttccataccatcgaggtagctaaagttgaccggaacaacgtgtctcagccgccgccggctgctactgcagcactgctagaagttcccggtgatgaacttaacctaattccaccgttgaacttttcgatggtcgataatggtatattccggtctggattcccggactcggcgaacttctccttcatcaagactcttggccttcgctcaatcatatctttgtgtccagagccatatcctgagaacaacatgcagttcctcaaatccaatggaattagtctttttcagtttggcattgaaggctctaagtccaaggagccatttgtagatatcctagatcagaaaatccgtgaagcactcaaagtccttctcgatgagaagaaccatccacttttgattcattgcaaacgaggcaagcacagaaccgggtgtcttgttgggtgcatgaggaaactccagaaatggtgcataacatcgatactcgatgagtataagcgatttgcagcggctaaagctagagtttcggatcaaaggttcttggagtcattcgatgtatcaggcttgaagcacactccaatgtctttttcttgctccaataggtaa

SEQ ID NO: 70423 - protein, 218 aa, Arabidopsis thaliana
  peptide (1)..(218): Ceres Seq. ID no. 2706746
  misc_feature (54)..(218): Pfam Name: Tyrosine phosphatase family Pfam Description: Tyrosine phosphatase family
  misc_feature (55)..(218): Homolog of NCBI NO: 7487406 NR Description: hypothetical protein T24M8.4 - Arabidopsis
  misc_feature (1)..(218): Homolog of NCBI NO: 15225761 NR Description: unknown protein; protein id: At2g32960.1
  misc_feature (120)..(218): Homolog of NCBI NO: 30102538 NR Description: At2g32960 [Arabidopsis thaliana]
  misc_feature (38)..(218): Homolog of NCBI NO: 18412419 NR Description: putative protein; protein id: At4g03960.1, by cDNA: 26983., supported by cDNA: gi_15810021, supported by gi_17981660 [Arabidopsis thaliana] >gi|15810022|gb|AAL06938.1|
  misc_feature (54)..(207): Homolog of NCBI NO: 21553927 NR Description: unknown [Arabidopsis thaliana]
  misc_feature (54)..(207): Homolog of NCBI NO: 15237359 NR Description: putative protein; protein id: At5g16480.1, by cDNA: 18232. [Arabidopsis thaliana] contains similarity to tyrosine phosphatase~gene_id:MQK4.21
  misc_feature (54)..(212): Homolog of NCBI NO: 15232985 NR Description: unknown protein; protein id: At3g02800.1 thaliana] >gi|6728982|gb|AAF26980.1|AC018363_25 unknown protein
  misc_feature (13)..(218): Homolog of NCBI NO: 15220383 NR Description: unkown protein; protein id: At1g05000.1
  misc_feature (1)..(123): Homolog of NCBI NO: 30102538 NR Description: At2g32960 [Arabidopsis thaliana]
  misc_feature (11)..(207): Homolog of NCBI NO: 6324296 NR Description: Synthetic interaction with Whi2; Siw14p cerevisiae] >gi|1730719|sp|P53965|YND2_YEAST HYPOTHETICAL 32.8 KD
MSMNQFRTMEEEKQDGGELFHTIEVAKVDRNNVSQPPPAATAALLEVPGDELNLIPPLNFSMVDNGIFRSGFPDSANFSFIKTLGLRSIISLCPEPYPENNMQFLKSNGISLFQFGIEGSKSKEPFVDILDQKIREALKVLLDEKNHPLLIHCKRGKHRTGCLVGCMRKLQKWCITSILDEYKRFAAAKARVSDQRFLESFDVSGLKHTPMSFSCSNR

SEQ ID NO: 70424 - protein, 216 aa, Arabidopsis thaliana
  peptide (1)..(216): Ceres Seq. ID no. 2706747
  misc_feature (52)..(216): Pfam Name: Tyrosine phosphatase family Pfam Description: Tyrosine phosphatase family
  misc_feature (1)..(216): Homolog of NCBI NO: 15225761 NR Description: unknown protein; protein id: At2g32960.1
  misc_feature (1)..(121): Homolog of NCBI NO: 30102538 NR Description: At2g32960 [Arabidopsis thaliana]
  misc_feature (118)..(216): Homolog of NCBI NO: 30102538 NR Description: At2g32960 [Arabidopsis thaliana]
  misc_feature (11)..(216): Homolog of NCBI NO: 15220383 NR Description: unkown protein; protein id: At1g05000.1
  misc_feature (36)..(216): Homolog of NCBI NO: 18412419 NR Description: putative protein; protein id: At4g03960.1, by cDNA: 26983., supported by cDNA: gi_15810021, supported by gi_17981660 [Arabidopsis thaliana] >gi|15810022|gb|AAL06938.1|
  misc_feature (52)..(210): Homolog of NCBI NO: 15232985 NR Description: unknown protein; protein id: At3g02800.1 thaliana] >gi|6728982|gb|AAF26980.1|AC018363_25 unknown protein
  misc_feature (52)..(205): Homolog of NCBI NO: 21553927 NR Description: unknown [Arabidopsis thaliana]
  misc_feature (52)..(205): Homolog of NCBI NO: 15237359 NR Description: putative protein; protein id: At5g16480.1, by cDNA: 18232. [Arabidopsis thaliana] contains similarity to tyrosine phosphatase~gene_id:MQK4.21
  misc_feature (53)..(216): Homolog of NCBI NO: 7487406 NR Description: hypothetical protein T24M8.4 - Arabidopsis
  misc_feature (9)..(205): Homolog of NCBI NO: 6324296 NR Description: Synthetic interaction with Whi2; Siw14p cerevisiae] >gi|1730719|sp|P53965|YND2_YEAST HYPOTHETICAL 32.8 KD
MNQFRTMEEEKQDGGELFHTIEVAKVDRNNVSQPPPAATAALLEVPGDELNLIPPLNFSMVDNGIFRSGFPDSANFSFIKTLGLRSIISLCPEPYPENNMQFLKSNGISLFQFGIEGSKSKEPFVDILDQKIREALKVLLDEKNHPLLIHCKRGKHRTGCLVGCMRKLQKWCITSILDEYKRFAAAKARVSDQRFLESFDVSGLKHTPMSFSCSNR

SEQ ID NO: 70425 - protein, 210 aa, Arabidopsis thaliana
  peptide (1)..(210): Ceres Seq. ID no. 2706748
  misc_feature (46)..(210): Pfam Name: Tyrosine phosphatase family Pfam Description: Tyrosine phosphatase family
  misc_feature (1)..(210): Homolog of NCBI NO: 15225761 NR Description: unknown protein; protein id: At2g32960.1
  misc_feature (1)..(115): Homolog of NCBI NO: 30102538 NR Description: At2g32960 [Arabidopsis thaliana]
  misc_feature (112)..(210): Homolog of NCBI NO: 30102538 NR Description: At2g32960 [Arabidopsis thaliana]
  misc_feature (5)..(210): Homolog of NCBI NO: 15220383 NR Description: unkown protein; protein id: At1g05000.1
  misc_feature (30)..(210): Homolog of NCBI NO: 18412419 NR Description: putative protein; protein id: At4g03960.1, by cDNA: 26983., supported by cDNA: gi_15810021, supported by gi_17981660 [Arabidopsis thaliana] >gi|15810022|gb|AAL06938.1|
  misc_feature (46)..(204): Homolog of NCBI NO: 15232985 NR Description: unknown protein; protein id: At3g02800.1 thaliana] >gi|6728982|gb|AAF26980.1|AC018363_25 unknown protein
  misc_feature (46)..(199): Homolog of NCBI NO: 21553927 NR Description: unknown [Arabidopsis thaliana]
  misc_feature (46)..(199): Homolog of NCBI NO: 15237359 NR Description: putative protein; protein id: At5g16480.1, by cDNA: 18232. [Arabidopsis thaliana] contains similarity to tyrosine phosphatase~gene_id:MQK4.21
  misc_feature (47)..(210): Homolog of NCBI NO: 7487406 NR Description: hypothetical protein T24M8.4 - Arabidopsis
  misc_feature (3)..(199): Homolog of NCBI NO: 6324296 NR Description: Synthetic interaction with Whi2; Siw14p cerevisiae] >gi|1730719|sp|P53965|YND2_YEAST HYPOTHETICAL 32.8 KD
MEEEKQDGGELFHTIEVAKVDRNNVSQPPPAATAALLEVPGDELNLIPPLNFSMVDNGIFRSGFPDSANFSFIKTLGLRSIISLCPEPYPENNMQFLKSNGISLFQFGIEGSKSKEPFVDILDQKIREALKVLLDEKNHPLLIHCKRGKHRTGCLVGCMRKLQKWCITSILDEYKRFAAAKARVSDQRFLESFDVSGLKHTPMSFSCSNR

SEQ ID NO: 70426 - DNA, 792 bp, Arabidopsis thaliana
  misc_feature (1)..(792): Ceres Seq. ID no. 2706787
  misc_feature: MA Experiment ID: 20000264 Result: Down-regulated in Transcription
  misc_feature: MA Experiment 20000264 PARAMETER Experiment Name: At_Open_Flower_P Parameter: Age (day) Value: 21
  misc_feature: MA Experiment 20000264 PARAMETER Experiment Name: At_Open_Flower_P Parameter: Plant Line Value: WS
  misc_feature: MA Experiment 20000264 PARAMETER Experiment Name: At_Open_Flower_P Parameter: Tissue Value: Open Flower vs. Whole Plant
  misc_feature: MA Experiment ID: 20000437 Result: Up-regulated in Transcription
  misc_feature: MA Experiment 20000437 PARAMETER Experiment Name: At_Drought_P Parameter: Age (day) Value: 8
  misc_feature: MA Experiment 20000437 PARAMETER Experiment Name: At_Drought_P Parameter: Organism Value: A. thaliana
  misc_feature: MA Experiment 20000437 PARAMETER Experiment Name: At_Drought_P Parameter: Plant Line Value: WS
  misc_feature: MA Experiment 20000437 PARAMETER Experiment Name: At_Drought_P Parameter: Timepoint (hr) Value: 24
  misc_feature: MA Experiment 20000437 PARAMETER Experiment Name: At_Drought_P Parameter: Tissue Value: Whole Plant
  misc_feature: MA Experiment 20000437 PARAMETER Experiment Name: At_Drought_P Parameter: Treatment Value: Drought vs. No Drought
  misc_feature: MA Experiment ID: 20000495 Result: Down-regulated in Transcription
  misc_feature: MA Experiment 20000495 PARAMETER Experiment Name: At_Guard_Cells_P Parameter: Harvest Date Value: 8/2/2002
  misc_feature: MA Experiment 20000495 PARAMETER Experiment Name: At_Guard_Cells_P Parameter: Organism Value: A. thaliana
  misc_feature: MA Experiment 20000495 PARAMETER Experiment Name: At_Guard_Cells_P Parameter: Tissue Value: Guard Cells vs. Leaves
  misc_feature: MA Experiment ID: 20001451 Result: Down-regulated in Transcription
  misc_feature: MA Experiment 20001451 PARAMETER Experiment Name: At_Far-red-induction_P Parameter: Age (day) Value: 7
  misc_feature: MA Experiment 20001451 PARAMETER Experiment Name: At_Far-red-induction_P Parameter: Light Value: Far-red vs. White
  misc_feature: MA Experiment 20001451 PARAMETER Experiment Name: At_Far-red-induction_P Parameter: Organism Value: A. thaliana
  misc_feature: MA Experiment 20001451 PARAMETER Experiment Name: At_Far-red-induction_P Parameter: Plant Line Value: Columbia
  misc_feature: MA Experiment 20001451 PARAMETER Experiment Name: At_Far-red-induction_P Parameter: Timepoint (hr) Value: 24
  misc_feature: MA Experiment 20001451 PARAMETER Experiment Name: At_Far-red-induction_P Parameter: Tissue Value: Whole Plant
  misc_feature: MA Experiment ID: 20001757 Result: Up-regulated in Transcription
  misc_feature: MA Experiment 20001757 PARAMETER Experiment Name: At_50mM_NH4NO3_L-to-H_P Parameter: Timepoint (hr) Value: 6
  misc_feature: MA Experiment 20001757 PARAMETER Experiment Name: At_50mM_NH4NO3_L-to-H_P Parameter: Tissue Value: Leaf
  misc_feature: MA Experiment 20001757 PARAMETER Experiment Name: At_50mM_NH4NO3_L-to-H_P Parameter: Treatment Value: 50mM NH4NO3 vs 100mM Mannitol
atggagaagaacaacaagaagcggtttgtcctcgtccatgggctgtgccacggcgcttggtgttggtacaaggtgaaaacgcatctggaggctgtaggtcactgtgtgaccgcggtggatctagctgcatccggtataaatatgactagattggaagagattcagactttgaaggattactgcaaacctttgcttgagttactgaactcacttggctcggatgacgataaggtgattcttgttgcgcatagtatgggaggaatacctgctgctctcgcttctgacatattccctagtaagattgctactattgttttcttgacagcttttatgcccgacacaagaaacctacctgcttatgtttaccaaaagctaatcagaagcgttccacaagaaggatggttggacaccgtgtttggaacgtatgggaaacatgaatgtcctctagagtttgctctttttggaccaaagttcatggccaagaatttgtatcaactctctccggtccaagatcttgaattggcgaaaatgttggtgagagtaaaccccatcattacaaataatctggcagggacaagaagctttagtgaggaagggtacggtaccgttacacgtatatatattgtatgtggagaggacatggcggtacccgaggattaccagtggtggatgatcaagaactttccgccaaaagaagtaatggagatcaaatgtgcagatcatatggcaatgttctccaagcctcacaaactatgtgctcttctcgtggagattgcatgtaaatatgcctaa

SEQ ID NO: 70427 - protein, 263 aa, Arabidopsis thaliana
  peptide (1)..(263): Ceres Seq. ID no. 2706788
  misc_feature (34)..(257): Pfam Name: alpha/beta hydrolase fold Pfam Description: alpha/beta hydrolase fold
  misc_feature (1)..(263): Homolog of NCBI NO: 15227859 NR Description: putative acetone-cyanohydrin lyase; protein id:
  misc_feature (1)..(262): Homolog of NCBI NO: 15227850 NR Description: putative acetone-cyanohydrin lyase; protein id:
  misc_feature (1)..(262): Homolog of NCBI NO: 28393451 NR Description: putative acetone-cyanohydrin lyase [Arabidopsis
  misc_feature (1)..(263): Homolog of NCBI NO: 15227851 NR Description: putative acetone-cyanohydrin lyase; protein id:
  misc_feature (52)..(262): Homolog of NCBI NO: 30682119 NR Description: hydrolase, alpha/beta fold family [Arabidopsis
  misc_feature (1)..(44): Homolog of NCBI NO: 30682119 NR Description: hydrolase, alpha/beta fold family [Arabidopsis
  misc_feature (2)..(263): Homolog of NCBI NO: 15227865 NR Description: putative acetone-cyanohydrin lyase; protein id:
  misc_feature (7)..(262): Homolog of NCBI NO: 15235445 NR Description: hydroxynitrile lyase like protein; protein id: [Arabidopsis thaliana] >gi|25407792|pir||H85438 hydroxynitrile
  misc_feature (85)..(263): Homolog of NCBI NO: 15227857 NR Description: putative acetone-cyanohydrin lyase; protein id:
  misc_feature (2)..(262): Homolog of NCBI NO: 15227867 NR Description: putative acetone-cyanohydrin lyase; protein id:
MEKNNKKRFVLVHGLCHGAWCWYKVKTHLEAVGHCVTAVDLAASGINMTRLEEIQTLKDYCKPLLELLNSLGSDDDKVILVAHSMGGIPAALASDIFPSKIATIVFLTAFMPDTRNLPAYVYQKLIRSVPQEGWLDTVFGTYGKHECPLEFALFGPKFMAKNLYQLSPVQDLELAKMLVRVNPIITNNLAGTRSFSEEGYGTVTRIYIVCGEDMAVPEDYQWWMIKNFPPKEVMEIKCADHMAMFSKPHKLCALLVEIACKYA

SEQ ID NO: 70428 - protein, 216 aa, Arabidopsis thaliana
  peptide (1)..(216): Ceres Seq. ID no. 2706789
  misc_feature (1)..(210): Pfam Name: alpha/beta hydrolase fold Pfam Description: alpha/beta hydrolase fold
  misc_feature (1)..(216): Homolog of NCBI NO: 15227859 NR Description: putative acetone-cyanohydrin lyase; protein id:
  misc_feature (1)..(215): Homolog of NCBI NO: 15227850 NR Description: putative acetone-cyanohydrin lyase; protein id:
  misc_feature (1)..(215): Homolog of NCBI NO: 28393451 NR Description: putative acetone-cyanohydrin lyase [Arabidopsis
  misc_feature (1)..(216): Homolog of NCBI NO: 15227851 NR Description: putative acetone-cyanohydrin lyase; protein id:
  misc_feature (5)..(215): Homolog of NCBI NO: 30682119 NR Description: hydrolase, alpha/beta fold family [Arabidopsis
  misc_feature (1)..(216): Homolog of NCBI NO: 15227865 NR Description: putative acetone-cyanohydrin lyase; protein id:
  misc_feature (1)..(215): Homolog of NCBI NO: 15235445 NR Description: hydroxynitrile lyase like protein; protein id: [Arabidopsis thaliana] >gi|25407792|pir||H85438 hydroxynitrile
  misc_feature (38)..(216): Homolog of NCBI NO: 15227857 NR Description: putative acetone-cyanohydrin lyase; protein id:
  misc_feature (1)..(215): Homolog of NCBI NO: 15227867 NR Description: putative acetone-cyanohydrin lyase; protein id:
  misc_feature (1)..(215): Homolog of NCBI NO: 27754457 NR Description: putative acetone-cyanohydrin lyase [Arabidopsis
MTRLEEIQTLKDYCKPLLELLNSLGSDDDKVILVAHSMGGIPAALASDIFPSKIATIVFLTAFMPDTRNLPAYVYQKLIRSVPQEGWLDTVFGTYGKHECPLEFALFGPKFMAKNLYQLSPVQDLELAKMLVRVNPIITNNLAGTRSFSEEGYGTVTRIYIVCGEDMAVPEDYQWWMIKNFPPKEVMEIKCADHMAMFSKPHKLCALLVEIACKYA

SEQ ID NO: 70429 - protein, 179 aa, Arabidopsis thaliana
  peptide (1)..(179): Ceres Seq. ID no. 2706790
  misc_feature (1)..(173): Pfam Name: alpha/beta hydrolase fold Pfam Description: alpha/beta hydrolase fold
  misc_feature (1)..(179): Homolog of NCBI NO: 15227859 NR Description: putative acetone-cyanohydrin lyase; protein id:
  misc_feature (1)..(178): Homolog of NCBI NO: 15227850 NR Description: putative acetone-cyanohydrin lyase; protein id:
  misc_feature (1)..(178): Homolog of NCBI NO: 28393451 NR Description: putative acetone-cyanohydrin lyase [Arabidopsis
  misc_feature (1)..(179): Homolog of NCBI NO: 15227851 NR Description: putative acetone-cyanohydrin lyase; protein id:
  misc_feature (1)..(178): Homolog of NCBI NO: 30682119 NR Description: hydrolase, alpha/beta fold family [Arabidopsis
  misc_feature (1)..(179): Homolog of NCBI NO: 15227865 NR Description: putative acetone-cyanohydrin lyase; protein id:
  misc_feature (1)..(178): Homolog of NCBI NO: 15235445 NR Description: hydroxynitrile lyase like protein; protein id: [Arabidopsis thaliana] >gi|25407792|pir||H85438 hydroxynitrile
  misc_feature (1)..(179): Homolog of NCBI NO: 15227857 NR Description: putative acetone-cyanohydrin lyase; protein id:
  misc_feature (1)..(178): Homolog of NCBI NO: 15227867 NR Description: putative acetone-cyanohydrin lyase; protein id:
  misc_feature (1)..(178): Homolog of NCBI NO: 27754457 NR Description: putative acetone-cyanohydrin lyase [Arabidopsis
MGGIPAALASDIFPSKIATIVFLTAFMPDTRNLPAYVYQKLIRSVPQEGWLDTVFGTYGKHECPLEFALFGPKFMAKNLYQLSPVQDLELAKMLVRVNPIITNNLAGTRSFSEEGYGTVTRIYIVCGEDMAVPEDYQWWMIKNFPPKEVMEIKCADHMAMFSKPHKLCALLVEIACKYA

SEQ ID NO: 70430 - DNA, 783 bp, Arabidopsis thaliana
  misc_feature (1)..(783): Ceres Seq. ID no. 2706791
  misc_feature: MA Experiment ID: 20000264 Result: Down-regulated in Transcription
  misc_feature: MA Experiment 20000264 PARAMETER Experiment Name: At_Open_Flower_P Parameter: Age (day) Value: 21
  misc_feature: MA Experiment 20000264 PARAMETER Experiment Name: At_Open_Flower_P Parameter: Plant Line Value: WS
  misc_feature: MA Experiment 20000264 PARAMETER Experiment Name: At_Open_Flower_P Parameter: Tissue Value: Open Flower vs. Whole Plant
  misc_feature: MA Experiment ID: 20000437 Result: Up-regulated in Transcription
  misc_feature: MA Experiment 20000437 PARAMETER Experiment Name: At_Drought_P Parameter: Age (day) Value: 8
  misc_feature: MA Experiment 20000437 PARAMETER Experiment Name: At_Drought_P Parameter: Organism Value: A. thaliana
  misc_feature: MA Experiment 20000437 PARAMETER Experiment Name: At_Drought_P Parameter: Plant Line Value: WS
  misc_feature: MA Experiment 20000437 PARAMETER Experiment Name: At_Drought_P Parameter: Timepoint (hr) Value: 24
  misc_feature: MA Experiment 20000437 PARAMETER Experiment Name: At_Drought_P Parameter: Tissue Value: Whole Plant
  misc_feature: MA Experiment 20000437 PARAMETER Experiment Name: At_Drought_P Parameter: Treatment Value: Drought vs. No Drought
  misc_feature: MA Experiment ID: 20000495 Result: Down-regulated in Transcription
  misc_feature: MA Experiment 20000495 PARAMETER Experiment Name: At_Guard_Cells_P Parameter: Harvest Date Value: 8/2/2002
  misc_feature: MA Experiment 20000495 PARAMETER Experiment Name: At_Guard_Cells_P Parameter: Organism Value: A. thaliana
  misc_feature: MA Experiment 20000495 PARAMETER Experiment Name: At_Guard_Cells_P Parameter: Tissue Value: Guard Cells vs. Leaves
  misc_feature: MA Experiment ID: 20001451 Result: Down-regulated in Transcription
  misc_feature: MA Experiment 20001451 PARAMETER Experiment Name: At_Far-red-induction_P Parameter: Age (day) Value: 7
  misc_feature: MA Experiment 20001451 PARAMETER Experiment Name: At_Far-red-induction_P Parameter: Light Value: Far-red vs. White
  misc_feature: MA Experiment 20001451 PARAMETER Experiment Name: At_Far-red-induction_P Parameter: Organism Value: A. thaliana
  misc_feature: MA Experiment 20001451 PARAMETER Experiment Name: At_Far-red-induction_P Parameter: Plant Line Value: Columbia
  misc_feature: MA Experiment 20001451 PARAMETER Experiment Name: At_Far-red-induction_P Parameter: Timepoint (hr) Value: 24
  misc_feature: MA Experiment 20001451 PARAMETER Experiment Name: At_Far-red-induction_P Parameter: Tissue Value: Whole Plant
  misc_feature: MA Experiment ID: 20001757 Result: Up-regulated in Transcription
  misc_feature: MA Experiment 20001757 PARAMETER Experiment Name: At_50mM_NH4NO3_L-to-H_P Parameter: Timepoint (hr) Value: 6
  misc_feature: MA Experiment 20001757 PARAMETER Experiment Name: At_50mM_NH4NO3_L-to-H_P Parameter: Tissue Value: Leaf
  misc_feature: MA Experiment 20001757 PARAMETER Experiment Name: At_50mM_NH4NO3_L-to-H_P Parameter: Treatment Value: 50mM NH4NO3 vs 100mM Mannitol
atggataagaataaccagaagaagtttgtgcttgtacatggaatctgccatggagcttggtgttggtacaaggtgaaagcccagctggaggctgctggtcattctgtgaccgcagttgatctagctgcatctggtgtaaacatgactagcctggatgagattcagactttgaaggattactgcaaaccgctgctcgagtttctgagctcacttggctcggatgacgataaggtgattcttgttgctcatagcatgggaggaatatcagcttcacttgctgctgatatcttccctagtaaagttgctgctattgtctttgtggcagcttttatgcccgacataagcaacccgcctgcttacgttttccaaaagctggtcaaagacgttacacaagaggtatggatggatactgtgtttgggaaacctgatcgtcctctagagtttgctctttttggaccagagttcatggccaagtatttgtataacctatctcccctccaagattttgaattggcgaaaatgtcggtgagggtaagcccgttcatgacaaacaacctggcagggacaataagcttcagtgaggacaggtacggatccgttacacgtatatatatcgtatgcggagaggacgttgcggtacctgtggattaccagcgtgggatgatcaatgacttcccggtgaaggaagtactggagatcaaagatgcagatcatatgccaatgttctctaagcctcaagaactctgtgctcttctcttggagattgcagataaatacgcctaa

SEQ ID NO: 70431 - protein, 260 aa, Arabidopsis thaliana
  peptide (1)..(260): Ceres Seq. ID no. 2706792
  misc_feature (34)..(254): Pfam Name: alpha/beta hydrolase fold Pfam Description: alpha/beta hydrolase fold
  misc_feature (1)..(260): Homolog of NCBI NO: 15227851 NR Description: putative acetone-cyanohydrin lyase; protein id:
  misc_feature (1)..(260): Homolog of NCBI NO: 15227859 NR Description: putative acetone-cyanohydrin lyase; protein id:
  misc_feature (1)..(259): Homolog of NCBI NO: 15227850 NR Description: putative acetone-cyanohydrin lyase; protein id:
  misc_feature (1)..(259): Homolog of NCBI NO: 28393451 NR Description: putative acetone-cyanohydrin lyase [Arabidopsis
  misc_feature (2)..(260): Homolog of NCBI NO: 15227865 NR Description: putative acetone-cyanohydrin lyase; protein id:
  misc_feature (52)..(259): Homolog of NCBI NO: 30682119 NR Description: hydrolase, alpha/beta fold family [Arabidopsis
  misc_feature (1)..(44): Homolog of NCBI NO: 30682119 NR Description: hydrolase, alpha/beta fold family [Arabidopsis
  misc_feature (7)..(259): Homolog of NCBI NO: 15235445 NR Description: hydroxynitrile lyase like protein; protein id: [Arabidopsis thaliana] >gi|25407792|pir||H85438 hydroxynitrile
  misc_feature (6)..(260): Homolog of NCBI NO: 14279437 NR Description: ethylene-induced esterase [Citrus sinensis]
  misc_feature (2)..(259): Homolog of NCBI NO: 15227867 NR Description: putative acetone-cyanohydrin lyase; protein id:
MDKNNQKKFVLVHGICHGAWCWYKVKAQLEAAGHSVTAVDLAASGVNMTSLDEIQTLKDYCKPLLEFLSSLGSDDDKVILVAHSMGGISASLAADIFPSKVAAIVFVAAFMPDISNPPAYVFQKLVKDVTQEVWMDTVFGKPDRPLEFALFGPEFMAKYLYNLSPLQDFELAKMSVRVSPFMTNNLAGTISFSEDRYGSVTRIYIVCGEDVAVPVDYQRGMINDFPVKEVLEIKDADHMPMFSKPQELCALLLEIADKYA

SEQ ID NO: 70432 - protein, 213 aa, Arabidopsis thaliana
  peptide (1)..(213): Ceres Seq. ID no. 2706793
  misc_feature (1)..(207): Pfam Name: alpha/beta hydrolase fold Pfam Description: alpha/beta hydrolase fold
  misc_feature (1)..(213): Homolog of NCBI NO: 15227851 NR Description: putative acetone-cyanohydrin lyase; protein id:
  misc_feature (1)..(213): Homolog of NCBI NO: 15227859 NR Description: putative acetone-cyanohydrin lyase; protein id:
  misc_feature (1)..(212): Homolog of NCBI NO: 15227850 NR Description: putative acetone-cyanohydrin lyase; protein id:
  misc_feature (1)..(212): Homolog of NCBI NO: 28393451 NR Description: putative acetone-cyanohydrin lyase [Arabidopsis
  misc_feature (1)..(213): Homolog of NCBI NO: 15227865 NR Description: putative acetone-cyanohydrin lyase; protein id:
  misc_feature (5)..(212): Homolog of NCBI NO: 30682119 NR Description: hydrolase, alpha/beta fold family [Arabidopsis
  misc_feature (1)..(212): Homolog of NCBI NO: 15235445 NR Description: hydroxynitrile lyase like protein; protein id: [Arabidopsis thaliana] >gi|25407792|pir||H85438 hydroxynitrile
  misc_feature (1)..(213): Homolog of NCBI NO: 14279437 NR Description: ethylene-induced esterase [Citrus sinensis]
  misc_feature (1)..(212): Homolog of NCBI NO: 15227867 NR Description: putative acetone-cyanohydrin lyase; protein id:
  misc_feature (1)..(212): Homolog of NCBI NO: 27754457 NR Description: putative acetone-cyanohydrin lyase [Arabidopsis
MTSLDEIQTLKDYCKPLLEFLSSLGSDDDKVILVAHSMGGISASLAADIFPSKVAAIVFVAAFMPDISNPPAYVFQKLVKDVTQEVWMDTVFGKPDRPLEFALFGPEFMAKYLYNLSPLQDFELAKMSVRVSPFMTNNLAGTISFSEDRYGSVTRIYIVCGEDVAVPVDYQRGMINDFPVKEVLEIKDADHMPMFSKPQELCALLLEIADKYA

SEQ ID NO: 70433 - protein, 176 aa, Arabidopsis thaliana
  peptide (1)..(176): Ceres Seq. ID no. 2706794
  misc_feature (1)..(170): Pfam Name: alpha/beta hydrolase fold Pfam Description: alpha/beta hydrolase fold
  misc_feature (1)..(176): Homolog of NCBI NO: 15227851 NR Description: putative acetone-cyanohydrin lyase; protein id:
  misc_feature (1)..(176): Homolog of NCBI NO: 15227859 NR Description: putative acetone-cyanohydrin lyase; protein id:
  misc_feature (1)..(175): Homolog of NCBI NO: 15227850 NR Description: putative acetone-cyanohydrin lyase; protein id:
  misc_feature (1)..(175): Homolog of NCBI NO: 28393451 NR Description: putative acetone-cyanohydrin lyase [Arabidopsis
  misc_feature (1)..(176): Homolog of NCBI NO: 15227865 NR Description: putative acetone-cyanohydrin lyase; protein id:
  misc_feature (1)..(175): Homolog of NCBI NO: 30682119 NR Description: hydrolase, alpha/beta fold family [Arabidopsis
  misc_feature (1)..(175): Homolog of NCBI NO: 15235445 NR Description: hydroxynitrile lyase like protein; protein id: [Arabidopsis thaliana] >gi|25407792|pir||H85438 hydroxynitrile
  misc_feature (1)..(176): Homolog of NCBI NO: 14279437 NR Description: ethylene-induced esterase [Citrus sinensis]
  misc_feature (1)..(175): Homolog of NCBI NO: 15227867 NR Description: putative acetone-cyanohydrin lyase; protein id:
  misc_feature (1)..(175): Homolog of NCBI NO: 27754457 NR Description: putative acetone-cyanohydrin lyase [Arabidopsis
MGGISASLAADIFPSKVAAIVFVAAFMPDISNPPAYVFQKLVKDVTQEVWMDTVFGKPDRPLEFALFGPEFMAKYLYNLSPLQDFELAKMSVRVSPFMTNNLAGTISFSEDRYGSVTRIYIVCGEDVAVPVDYQRGMINDFPVKEVLEIKDADHMPMFSKPQELCALLLEIADKYA

SEQ ID NO: 70434 - DNA, 1668 bp, Arabidopsis thaliana
  misc_feature (1)..(1668): Ceres Seq. ID no. 2706830
  misc_feature: MA Experiment ID: 20000439 Result: Up-regulated in Transcription
  misc_feature: MA Experiment 20000439 PARAMETER Experiment Name: At_Roots__P Parameter: Age (day) Value: 14 vs. 21
  misc_feature: MA Experiment 20000439 PARAMETER Experiment Name: At_Roots__P Parameter: Organism Value: A. thaliana
  misc_feature: MA Experiment 20000439 PARAMETER Experiment Name: At_Roots__P Parameter: Tissue Value: Roots vs. Whole Plant
atgagaactgaagcacaagattcagtacctaaatcaaaccctaatccggaactaatcaaagaaaccccaaaggtctctctttacgaacaatgcagggaagagaggatcaaagagaatcttcagaggatgaacaatctgggtctcttaaatctctctcgcaaactcaaacccaagacccgacccgttaaaagatcttacggtaaccgtaattctgttcagaatccgactcctcctcttcagccttctcgccgatcttctcgattggagaacacaactccagttatctacactgatgggatcaatgagaagggcaagaaagcatctaaacgagagagtgttgtgattggtgaagggataagagctgagatttacacagaggaacatgagaagcttcttgggaatacagaaagaagctggacttgttttgttgatggctatgataagaatgggaaacggatttatgatccgtttaacggtaagacttgtcaccaatgcaggcagaagacgatggggcatcgtacacagtgcagtgaatgcaatttggttcaaggacagttctgtgatatggtgaacatgtgcttgaagctcttgagaatccagactggatttgtcccgcttgtcgcgggatctgcaattgcagtttgtgccggaataataaaggatgggttccaactggcccgatttacagaaggagctgaagatttctttctttctttggattgtttccagatagctgcacttgggtataagtctgtggcacattatctgattcaaaccaaacgggcgccaactgatgacacaacaccaagtcaagcgtctgcaaagagatcactttcctttcaagaaaagattgctggtgatgaagacgtaccaatgcttgagaatgatgattccttacagaaagaagaaggtgaaaacacgaacgaagatcagaatggtgatctccctgaagaagtacaaaaggttcagaatatggaatgtcagagtggtggttccttgaagaaagaggaggatgagacaccaaattcagctagaaggtcactgagcttcttattgccttctgtagaggatgatcaaacttcattggtggatgttcaggtcttaagttgtcttgtgccaccaaagcaagaacattcatgtgcacacaatggtgatgatcttccagatattcaggaaaggataggacaacactcaaatttggagacgaaaccagatagctacttgcttcatgtggatgagcagattccattggttgatgttcaggtcttgagttatcttgagacgccgaagcaagaacattcatgtgcccacattggtgatggtcttccaaaaattcaagaatggataggacaagacccgacttctgagacaaaaccagttagctacttgattcctatagatgatgatcaaacttcattggtggatgcgcaggtcatgtatcttgagacaccaaagcaagataaacaagaacattcatgtgcccacatcggtgatgatcttccagaaattcaacaagggacaggacaagactcgaatttggagacaagacttggggaaagtcagacccttgtggtcaaagctcgagtaacgagaagtaagaggaaagcggctctagaaccaaatccagatagcattggtggaagactaaggcagcgaagaaggacctaa

SEQ ID NO: 70435 - protein, 555 aa, Arabidopsis thaliana
  peptide (1)..(555): Ceres Seq. ID no. 2706831
  misc_feature (1)..(555): Homolog of NCBI NO: 15227848 NR Description: hypothetical protein; protein id: At2g23530.1
  misc_feature (86)..(187): Homolog of NCBI NO: 25407788 NR Description: hypothetical protein AT4g37110 [imported] - thaliana >gi|4006866|emb|CAB16784.1| putative protein thaliana] >gi|7270660|emb|CAB80377.1| putative protein
  misc_feature (499)..(554): Homolog of NCBI NO: 25407788 NR Description: hypothetical protein AT4g37110 [imported] - thaliana >gi|4006866|emb|CAB16784.1| putative protein thaliana] >gi|7270660|emb|CAB80377.1| putative protein
  misc_feature (58)..(310): Homolog of NCBI NO: 30690864 NR Description: expressed protein [Arabidopsis thaliana]
  misc_feature (499)..(554): Homolog of NCBI NO: 30690864 NR Description: expressed protein [Arabidopsis thaliana]
  misc_feature (1)..(137): Homolog of NCBI NO: 25407788 NR Description: hypothetical protein AT4g37110 [imported] - thaliana >gi|4006866|emb|CAB16784.1| putative protein thaliana] >gi|7270660|emb|CAB80377.1| putative protein
  misc_feature (1)..(94): Homolog of NCBI NO: 30690864 NR Description: expressed protein [Arabidopsis thaliana]
  misc_feature (151)..(187): Homolog of NCBI NO: 20891867 NR Description: hypothetical protein XP_148415 [Mus musculus]
  misc_feature (50)..(187): Homolog of NCBI NO: 15929382 NR Description: Unknown (protein for IMAGE:3829029) [Homo sapiens]
  misc_feature (50)..(187): Homolog of NCBI NO: 22027514 NR Description: cell division cycle associated protein 7 isoform
MRTEAQDSVPKSNPNPELIKETPKVSLYEQCREERIKENLQRMNNLGLLNLSRKLKPKTRPVKRSYGNRNSVQNPTPPLQPSRRSSRLENTTPVIYTDGINEKGKKASKRESVVIGEGIRAEIYTEEHEKLLGNTERSWTCFVDGYDKNGKRIYDPFNGKTCHQCRQKTMGHRTQCSECNLVQGQFCDMVNMCLKLLRIQTGFVPLVAGSAIAVCAGIIKDGFQLARFTEGAEDFFLSLDCFQIAALGYKSVAHYLIQTKRAPTDDTTPSQASAKRSLSFQEKIAGDEDVPMLENDDSLQKEEGENTNEDQNGDLPEEVQKVQNMECQSGGSLKKEEDETPNSARRSLSFLLPSVEDDQTSLVDVQVLSCLVPPKQEHSCAHNGDDLPDIQERIGQHSNLETKPDSYLLHVDEQIPLVDVQVLSYLETPKQEHSCAHIGDGLPKIQEWIGQDPTSETKPVSYLIPIDDDQTSLVDAQVMYLETPKQDKQEHSCAHIGDDLPEIQQGTGQDSNLETRLGESQTLVVKARVTRSKRKAALEPNPDSIGGRLRQRRRT

SEQ ID NO: 70436 - protein, 513 aa, Arabidopsis thaliana
  peptide (1)..(513): Ceres Seq. ID no. 2706832
  misc_feature (1)..(513): Homolog of NCBI NO: 15227848 NR Description: hypothetical protein; protein id: At2g23530.1
  misc_feature (44)..(145): Homolog of NCBI NO: 25407788 NR Description: hypothetical protein AT4g37110 [imported] - thaliana >gi|4006866|emb|CAB16784.1| putative protein thaliana] >gi|7270660|emb|CAB80377.1| putative protein
  misc_feature (457)..(512): Homolog of NCBI NO: 25407788 NR Description: hypothetical protein AT4g37110 [imported] - thaliana >gi|4006866|emb|CAB16784.1| putative protein thaliana] >gi|7270660|emb|CAB80377.1| putative protein
  misc_feature (16)..(268): Homolog of NCBI NO: 30690864 NR Description: expressed protein [Arabidopsis thaliana]
  misc_feature (457)..(512): Homolog of NCBI NO: 30690864 NR Description: expressed protein [Arabidopsis thaliana]
  misc_feature (1)..(95): Homolog of NCBI NO: 25407788 NR Description: hypothetical protein AT4g37110 [imported] - thaliana >gi|4006866|emb|CAB16784.1| putative protein thaliana] >gi|7270660|emb|CAB80377.1| putative protein
  misc_feature (1)..(52): Homolog of NCBI NO: 30690864 NR Description: expressed protein [Arabidopsis thaliana]
  misc_feature (109)..(145): Homolog of NCBI NO: 20891867 NR Description: hypothetical protein XP_148415 [Mus musculus]
  misc_feature (8)..(145): Homolog of NCBI NO: 15929382 NR Description: Unknown (protein for IMAGE:3829029) [Homo sapiens]
  misc_feature (8)..(145): Homolog of NCBI NO: 22027514 NR Description: cell division cycle associated protein 7 isoform
MNNLGLLNLSRKLKPKTRPVKRSYGNRNSVQNPTPPLQPSRRSSRLENTTPVIYTDGINEKGKKASKRESVVIGEGIRAEIYTEEHEKLLGNTERSWTCFVDGYDKNGKRIYDPFNGKTCHQCRQKTMGHRTQCSECNLVQGQFCDMVNMCLKLLRIQTGFVPLVAGSAIAVCAGIIKDGFQLARFTEGAEDFFLSLDCFQIAALGYKSVAHYLIQTKRAPTDDTTPSQASAKRSLSFQEKIAGDEDVPMLENDDSLQKEEGENTNEDQNGDLPEEVQKVQNMECQSGGSLKKEEDETPNSARRSLSFLLPSVEDDQTSLVDVQVLSCLVPPKQEHSCAHNGDDLPDIQERIGQHSNLETKPDSYLLHVDEQIPLVDVQVLSYLETPKQEHSCAHIGDGLPKIQEWIGQDPTSETKPVSYLIPIDDDQTSLVDAQVMYLETPKQDKQEHSCAHIGDDLPEIQQGTGQDSNLETRLGESQTLVVKARVTRSKRKAALEPNPDSIGGRLRQRRRT

SEQ ID NO: 70437 - protein, 386 aa, Arabidopsis thaliana
  peptide (1)..(386): Ceres Seq. ID no. 2706833
  misc_feature (1)..(386): Homolog of NCBI NO: 15227848 NR Description: hypothetical protein; protein id: At2g23530.1
  misc_feature (1)..(18): Homolog of NCBI NO: 25407788 NR Description: hypothetical protein AT4g37110 [imported] - thaliana >gi|4006866|emb|CAB16784.1| putative protein thaliana] >gi|7270660|emb|CAB80377.1| putative protein
  misc_feature (330)..(385): Homolog of NCBI NO: 25407788 NR Description: hypothetical protein AT4g37110 [imported] - thaliana >gi|4006866|emb|CAB16784.1| putative protein thaliana] >gi|7270660|emb|CAB80377.1| putative protein
  misc_feature (1)..(141): Homolog of NCBI NO: 30690864 NR Description: expressed protein [Arabidopsis thaliana]
  misc_feature (330)..(385): Homolog of NCBI NO: 30690864 NR Description: expressed protein [Arabidopsis thaliana]
  misc_feature (1)..(18): Homolog of NCBI NO: 20891867 NR Description: hypothetical protein XP_148415 [Mus musculus]
  misc_feature (1)..(18): Homolog of NCBI NO: 15929382 NR Description: Unknown (protein for IMAGE:3829029) [Homo sapiens]
  misc_feature (1)..(18): Homolog of NCBI NO: 22027514 NR Description: cell division cycle associated protein 7 isoform
  misc_feature (1)..(18): Homolog of NCBI NO: 21362008 NR Description: cell division cycle associated protein 7 isoform c-Myc target JPO1 [Homo sapiens] >gi|14042437|dbj|BAB55245.1|
  misc_feature (1)..(18): Homolog of NCBI NO: 22122529 NR Description: hypothetical protein MGC11998 [Mus musculus]
MGHRTQCSECNLVQGQFCDMVNMCLKLLRIQTGFVPLVAGSAIAVCAGIIKDGFQLARFTEGAEDFFLSLDCFQIAALGYKSVAHYLIQTKRAPTDDTTPSQASAKRSLSFQEKIAGDEDVPMLENDDSLQKEEGENTNEDQNGDLPEEVQKVQNMECQSGGSLKKEEDETPNSARRSLSFLLPSVEDDQTSLVDVQVLSCLVPPKQEHSCAHNGDDLPDIQERIGQHSNLETKPDSYLLHVDEQIPLVDVQVLSYLETPKQEHSCAHIGDGLPKIQEWIGQDPTSETKPVSYLIPIDDDQTSLVDAQVMYLETPKQDKQEHSCAHIGDDLPEIQQGTGQDSNLETRLGESQTLVVKARVTRSKRKAALEPNPDSIGGRLRQRRRT

SEQ ID NO: 70438 - DNA, 2406 bp, Arabidopsis thaliana
  misc_feature (1)..(2406): Ceres Seq. ID no. 2706877
  misc_feature: MA Experiment ID: 20000227 Result: Up-regulated in Transcription
  misc_feature: MA Experiment 20000227 PARAMETER Experiment Name: At_Root-Tips-vs-Tops_P Parameter: Tissue Value: Root Tips vs. Root Tops
  misc_feature: MA Experiment ID: 20000437 Result: Down-regulated in Transcription
  misc_feature: MA Experiment 20000437 PARAMETER Experiment Name: At_Drought_P Parameter: Age (day) Value: 8
  misc_feature: MA Experiment 20000437 PARAMETER Experiment Name: At_Drought_P Parameter: Organism Value: A. thaliana
  misc_feature: MA Experiment 20000437 PARAMETER Experiment Name: At_Drought_P Parameter: Plant Line Value: WS
  misc_feature: MA Experiment 20000437 PARAMETER Experiment Name: At_Drought_P Parameter: Timepoint (hr) Value: 24
  misc_feature: MA Experiment 20000437 PARAMETER Experiment Name: At_Drought_P Parameter: Tissue Value: Whole Plant
  misc_feature: MA Experiment 20000437 PARAMETER Experiment Name: At_Drought_P Parameter: Treatment Value: Drought vs. No Drought
  misc_feature: MA Experiment ID: 20000439 Result: Up-regulated in Transcription
  misc_feature: MA Experiment 20000439 PARAMETER Experiment Name: At_Roots__P Parameter: Age (day) Value: 14 vs. 21
  misc_feature: MA Experiment 20000439 PARAMETER Experiment Name: At_Roots__P Parameter: Organism Value: A. thaliana
  misc_feature: MA Experiment 20000439 PARAMETER Experiment Name: At_Roots__P Parameter: Tissue Value: Roots vs. Whole Plant
atggtggtgatgctgacgcaagaaatgagtggcggtggtggtccaaaggcggaagagggtcagctgtttgtggcggtggccgtgaagggtttgatcggagacaaattaggcggtgcaggaagtcgtcgtgccgtacggtgggctgtcgataatcttttaccgaaggctgataaatttgtgatgatccacgtcatccctaccattacttctattcctactccgaatattttgatattaatgtttacgagaatgtgggttgttacagccggagatagattgccggtggaagaagtggaggagagtgtggtggaaatgtatgtaagagacgtgaaaaaagaatatgaaacagtctttgttccctttttgaaaatgtgcaagagtactaggagtaccaagcgatattttcggtctaggagaacaaaaggtacaggagtaccactgaccgttttaagatacgcaccagaaacatgtgaagtatacattgtgtgtaaagacagaatcactacaaaatctatggatccattaatcaaccgagagccgtgcacaagtccacacgcagccgcgactgcccatgacttcttgagagactgggcggctagtttccacactctacggtctccaacgttacccgatcctcgacagtcaactgaggcaggaacaaggaggtcagcatcggcaagagagctgagatttgaggcattaagccttacttgtaataaacccaaaacgcctcaaagtagtaaggcttctagtgcaacaactccagagatttttaggcgacggagaggatccgatattcctcagctgaattactcagattttgataaaacatgtaccaagccccaatcaaatgttgagaacatcgttagcgaacaccgagactctgatcgttcacccccggaaacatcaagaaaatccaagaaggttgagattgaagaagaggtcgaacgtttgaagaatgagctacaaagtacagtctttaaatataaacaagcttgtgaagagctcttctccacacaaaacaaggttaaaatgctttcgactgaatatttgaatgaatctaaaagagtgaacaatgctgtggagaaagaagagttgcagaggaacaccgcggcgctggagaaagagcggtacatgaaggcggtgaaagaggtcgaaaccgcgaaagcgttgctcgcaagagagttttgtcagcgacagatcgcggaggtgaatgctttaaggacttacttggagaagaagaaagtgatcgatcagcttttagggactgatcaccggtacagaaaatacacaattgaggaaattgtaacagccacagaaggattctcgccagagaaagtgattggagaaggaggatacgggaaagtttaccaatgtagccttgatagtactccggcggctgttaaagttgtccggctagatacaccggagaagaaacaagagttcttgaaagaggttgaggttctaagccaactccgacacccacacgtggttctcctcctcggagcttgtccggagaatggttgtttggtttacgagtacttggaaaatggaagcctcgaggaatatatatttcaccgaaaaaataaaccgcctttgccttggtttatccggtttagggtaattttcgaggtagcttgcggtttggccttcttacacagctctaaaccggaaccaattgttcaccgtgacttaaaaccgggaaatatcttgttaaaccggaactacgttagcaaaatcgctgacgttggcctagccaagctggttacggatgttgcacccgataatgtcacgatgtaccgaaactcggttcttgccggtacattgcattatattgatccagaataccacagaaccggaacaattagaccaaagtcggatctatatgcgttcggcataatcattcttcagttgttgacggctcgtaacccgagcgggattgtaccagcggtcgaaaacgcggtaaagaaagggacgttaaccgaaatgctagataaatcggttaccgattggcctttggcagaaaccgaggaattggctcggatcggtttaaaatgtgctgaatttcgatgccgagatagaccggatcttaaatcagaggttataccggttttgaaacggcttgtggagacggcgaattcgaaagtaaagaaagaaggaagcaatttacgtgcaccgagtcattacttctgtccaatcttacgggagataatggaggagccagagattgctgccgatggattcacgtacgagaggaaagcgatcttagcgtggcttgagaaacataacatttcaccggtgactcgacaaaagctagaccacttcaagctcacaccgaaccatacgctccggtctgcgattcgcgattggaaatcaagagtccggttttctaatgtcgttgtttaa

SEQ ID NO: 70439 - protein, 801 aa, Arabidopsis thaliana
  peptide (1)..(801): Ceres Seq. ID no. 2706878
  misc_feature (724)..(797): Pfam Name: U-box domain Pfam Description: U-box domain
  misc_feature (207)..(708): Homolog of NCBI NO: 21902013 NR Description: putative serine threonine kinase [Oryza sativa
  misc_feature (24)..(795): Homolog of NCBI NO: 22327904 NR Description: similar to putative protein kinase; protein id:
  misc_feature (249)..(795): Homolog of NCBI NO: 15240280 NR Description: putative protein; protein id: At5g61550.1
  misc_feature (19)..(794): Homolog of NCBI NO: 30697549 NR Description: protein kinase family [Arabidopsis thaliana]
  misc_feature (291)..(794): Homolog of NCBI NO: 9758471 NR Description: contains similarity to receptor-like protein
  misc_feature (301)..(792): Homolog of NCBI NO: 15234952 NR Description: putative Ser Thr protein kinase; protein id:
  misc_feature (37)..(793): Homolog of NCBI NO: 15241414 NR Description: putative protein; protein id: At5g51270.1
  misc_feature (41)..(708): Homolog of NCBI NO: 15239834 NR Description: putative receptor - like kinase; protein id:
  misc_feature (267)..(708): Homolog of NCBI NO: 15224129 NR Description: putative protein kinase; protein id: At2g24370.1
  misc_feature (41)..(713): Homolog of NCBI NO: 15239600 NR Description: putative protein; protein id: At5g26150.1
MVVMLTQEMSGGGGPKAEEGQLFVAVAVKGLIGDKLGGAGSRRAVRWAVDNLLPKADKFVMIHVIPTITSIPTPNILILMFTRMWVVTAGDRLPVEEVEESVVEMYVRDVKKEYETVFVPFLKMCKSTRSTKRYFRSRRTKGTGVPLTVLRYAPETCEVYIVCKDRITTKSMDPLINREPCTSPHAAATAHDFLRDWAASFHTLRSPTLPDPRQSTEAGTRRSASARELRFEALSLTCNKPKTPQSSKASSATTPEIFRRRRGSDIPQLNYSDFDKTCTKPQSNVENIVSEHRDSDRSPPETSRKSKKVEIEEEVERLKNELQSTVFKYKQACEELFSTQNKVKMLSTEYLNESKRVNNAVEKEELQRNTAALEKERYMKAVKEVETAKALLAREFCQRQIAEVNALRTYLEKKKVIDQLLGTDHRYRKYTIEEIVTATEGFSPEKVIGEGGYGKVYQCSLDSTPAAVKVVRLDTPEKKQEFLKEVEVLSQLRHPHVVLLLGACPENGCLVYEYLENGSLEEYIFHRKNKPPLPWFIRFRVIFEVACGLAFLHSSKPEPIVHRDLKPGNILLNRNYVSKIADVGLAKLVTDVAPDNVTMYRNSVLAGTLHYIDPEYHRTGTIRPKSDLYAFGIIILQLLTARNPSGIVPAVENAVKKGTLTEMLDKSVTDWPLAETEELARIGLKCAEFRCRDRPDLKSEVIPVLKRLVETANSKVKKEGSNLRAPSHYFCPILREIMEEPEIAADGFTYERKAILAWLEKHNISPVTRQKLDHFKLTPNHTLRSAIRDWKSRVRFSNVVV

SEQ ID NO: 70440 - protein, 798 aa, Arabidopsis thaliana
  peptide (1)..(798): Ceres Seq. ID no. 2706879
  misc_feature (721)..(794): Pfam Name: U-box domain Pfam Description: U-box domain
  misc_feature (21)..(792): Homolog of NCBI NO: 22327904 NR Description: similar to putative protein kinase; protein id:
  misc_feature (246)..(792): Homolog of NCBI NO: 15240280 NR Description: putative protein; protein id: At5g61550.1
  misc_feature (16)..(791): Homolog of NCBI NO: 30697549 NR Description: protein kinase family [Arabidopsis thaliana]
  misc_feature (288)..(791): Homolog of NCBI NO: 9758471 NR Description: contains similarity to receptor-like protein
  misc_feature (298)..(789): Homolog of NCBI NO: 15234952 NR Description: putative Ser Thr protein kinase; protein id:
  misc_feature (34)..(790): Homolog of NCBI NO: 15241414 NR Description: putative protein; protein id: At5g51270.1
  misc_feature (38)..(705): Homolog of NCBI NO: 15239834 NR Description: putative receptor - like kinase; protein id:
  misc_feature (264)..(705): Homolog of NCBI NO: 15224129 NR Description: putative protein kinase; protein id: At2g24370.1
  misc_feature (38)..(710): Homolog of NCBI NO: 15239600 NR Description: putative protein; protein id: At5g26150.1
  misc_feature (204)..(705): Homolog of NCBI NO: 21902013 NR Description: putative serine threonine kinase [Oryza sativa
MLTQEMSGGGGPKAEEGQLFVAVAVKGLIGDKLGGAGSRRAVRWAVDNLLPKADKFVMIHVIPTITSIPTPNILILMFTRMWVVTAGDRLPVEEVEESVVEMYVRDVKKEYETVFVPFLKMCKSTRSTKRYFRSRRTKGTGVPLTVLRYAPETCEVYIVCKDRITTKSMDPLINREPCTSPHAAATAHDFLRDWAASFHTLRSPTLPDPRQSTEAGTRRSASARELRFEALSLTCNKPKTPQSSKASSATTPEIFRRRRGSDIPQLNYSDFDKTCTKPQSNVENIVSEHRDSDRSPPETSRKSKKVEIEEEVERLKNELQSTVFKYKQACEELFSTQNKVKMLSTEYLNESKRVNNAVEKEELQRNTAALEKERYMKAVKEVETAKALLAREFCQRQIAEVNALRTYLEKKKVIDQLLGTDHRYRKYTIEEIVTATEGFSPEKVIGEGGYGKVYQCSLDSTPAAVKVVRLDTPEKKQEFLKEVEVLSQLRHPHVVLLLGACPENGCLVYEYLENGSLEEYIFHRKNKPPLPWFIRFRVIFEVACGLAFLHSSKPEPIVHRDLKPGNILLNRNYVSKIADVGLAKLVTDVAPDNVTMYRNSVLAGTLHYIDPEYHRTGTIRPKSDLYAFGIIILQLLTARNPSGIVPAVENAVKKGTLTEMLDKSVTDWPLAETEELARIGLKCAEFRCRDRPDLKSEVIPVLKRLVETANSKVKKEGSNLRAPSHYFCPILREIMEEPEIAADGFTYERKAILAWLEKHNISPVTRQKLDHFKLTPNHTLRSAIRDWKSRVRFSNVVV

SEQ ID NO: 70441 - protein, 793 aa, Arabidopsis thaliana
  peptide (1)..(793): Ceres Seq. ID no. 2706880
  misc_feature (716)..(789): Pfam Name: U-box domain Pfam Description: U-box domain
  misc_feature (16)..(787): Homolog of NCBI NO: 22327904 NR Description: similar to putative protein kinase; protein id:
  misc_feature (241)..(787): Homolog of NCBI NO: 15240280 NR Description: putative protein; protein id: At5g61550.1
  misc_feature (11)..(786): Homolog of NCBI NO: 30697549 NR Description: protein kinase family [Arabidopsis thaliana]
  misc_feature (283)..(786): Homolog of NCBI NO: 9758471 NR Description: contains similarity to receptor-like protein
  misc_feature (293)..(784): Homolog of NCBI NO: 15234952 NR Description: putative Ser Thr protein kinase; protein id:
  misc_feature (29)..(785): Homolog of NCBI NO: 15241414 NR Description: putative protein; protein id: At5g51270.1
  misc_feature (33)..(700): Homolog of NCBI NO: 15239834 NR Description: putative receptor - like kinase; protein id:
  misc_feature (259)..(700): Homolog of NCBI NO: 15224129 NR Description: putative protein kinase; protein id: At2g24370.1
  misc_feature (33)..(705): Homolog of NCBI NO: 15239600 NR Description: putative protein; protein id: At5g26150.1
  misc_feature (199)..(700): Homolog of NCBI NO: 21902013 NR Description: putative serine threonine kinase [Oryza sativa
MSGGGGPKAEEGQLFVAVAVKGLIGDKLGGAGSRRAVRWAVDNLLPKADKFVMIHVIPTITSIPTPNILILMFTRMWVVTAGDRLPVEEVEESVVEMYVRDVKKEYETVFVPFLKMCKSTRSTKRYFRSRRTKGTGVPLTVLRYAPETCEVYIVCKDRITTKSMDPLINREPCTSPHAAATAHDFLRDWAASFHTLRSPTLPDPRQSTEAGTRRSASARELRFEALSLTCNKPKTPQSSKASSATTPEIFRRRRGSDIPQLNYSDFDKTCTKPQSNVENIVSEHRDSDRSPPETSRKSKKVEIEEEVERLKNELQSTVFKYKQACEELFSTQNKVKMLSTEYLNESKRVNNAVEKEELQRNTAALEKERYMKAVKEVETAKALLAREFCQRQIAEVNALRTYLEKKKVIDQLLGTDHRYRKYTIEEIVTATEGFSPEKVIGEGGYGKVYQCSLDSTPAAVKVVRLDTPEKKQEFLKEVEVLSQLRHPHVVLLLGACPENGCLVYEYLENGSLEEYIFHRKNKPPLPWFIRFRVIFEVACGLAFLHSSKPEPIVHRDLKPGNILLNRNYVSKIADVGLAKLVTDVAPDNVTMYRNSVLAGTLHYIDPEYHRTGTIRPKSDLYAFGIIILQLLTARNPSGIVPAVENAVKKGTLTEMLDKSVTDWPLAETEELARIGLKCAEFRCRDRPDLKSEVIPVLKRLVETANSKVKKEGSNLRAPSHYFCPILREIMEEPEIAADGFTYERKAILAWLEKHNISPVTRQKLDHFKLTPNHTLRSAIRDWKSRVRFSNVVV

SEQ ID NO: 70442 - DNA, 411 bp, Arabidopsis thaliana
  misc_feature (1)..(411): Ceres Seq. ID no. 2707490
  misc_feature: MA Experiment ID: 20000355 Result: Down-regulated in Transcription
  misc_feature: MA Experiment 20000355 PARAMETER Experiment Name: At_Siliques_Sub_P Parameter: Age (day) Value: 21
  misc_feature: MA Experiment 20000355 PARAMETER Experiment Name: At_Siliques_Sub_P Parameter: Organism Value: A. thaliana
  misc_feature: MA Experiment 20000355 PARAMETER Experiment Name: At_Siliques_Sub_P Parameter: Plant Line Value: WS
  misc_feature: MA Experiment 20000355 PARAMETER Experiment Name: At_Siliques_Sub_P Parameter: Tissue Value: Less Than 5mm Siliques vs. Whole Plant
atgtgtgtagaggcgataatggtgagggctagcgtcttaaacgattgtctcaagagcatgagtaatgcagagaaacaagggaaacgccaagtcatgataagaccatcttccaaagtgatcattaagtttctcactgtgatgcaaaagcatggttacattgcagagtttgaatatgtggatgatcacagatccgggaagattgtggttgagcttaatggaaggcttaacaactgcggtgttattagtcctcgatatgaccttggcgtcaaggaaattgaaggttggactgctaaattgctcccttcaagacagtttgggtacattgtcctgacaacatcagctggaatcatggaccatgaagaggctaggaagaaaaatgttgggggcaaagtgcttggttttttctactag

SEQ ID NO: 70443 - protein, 136 aa, Arabidopsis thaliana
  peptide (1)..(136): Ceres Seq. ID no. 2707491
  misc_feature (11)..(136): Pfam Name: Ribosomal protein S8 Pfam Description: Ribosomal protein S8
  misc_feature (1)..(136): Homolog of NCBI NO: 15225502 NR Description: 40S ribosomal protein S15A; protein id: [Arabidopsis thaliana] >gi|7440262|pir||T00569 ribosomal protein
  misc_feature (7)..(136): Homolog of NCBI NO: 133793 NR Description: 40S RIBOSOMAL PROTEIN S15A (PPCB8)
  misc_feature (7)..(136): Homolog of NCBI NO: 15223001 NR Description: ribosomal protein S15; protein id: At1g07770.1, by cDNA: 5724., supported by cDNA: gi_12083301, supported by gi_13430743, supported by cDNA: gi_14423369, supported by cDNA:
  misc_feature (7)..(136): Homolog of NCBI NO: 6683481 NR Description: wrp15a [Citrullus lanatus]
  misc_feature (7)..(136): Homolog of NCBI NO: 15231316 NR Description: cytoplasmic ribosomal protein S15a -like; protein At3g46040.1, supported by cDNA: gi_15027960, supported by cDNA: [Arabidopsis thaliana] >gi|11276560|pir||T49245 cytoplasmic
  misc_feature (7)..(136): Homolog of NCBI NO: 13560779 NR Description: cytoplasmic ribosomal protein S15a [Daucus carota]
  misc_feature (7)..(136): Homolog of NCBI NO: 28411802 NR Description: ribosomal protein S15 [Oryza sativa (japonica
  misc_feature (7)..(136): Homolog of NCBI NO: 2130985 NR Description: r-protein BnS15a [Brassica napus]
  misc_feature (7)..(136): Homolog of NCBI NO: 32411611 NR Description: 40S RIBOSOMAL PROTEIN S22 (S15A) (YS24) crassa] >gi|28918412|gb|EAA28086.1| 40S RIBOSOMAL PROTEIN S22
  misc_feature (7)..(136): Homolog of NCBI NO: 6322271 NR Description: Homology to rat S15a; Rps22ap [Saccharomyces >gi|133884|sp|P04648|RS22_YEAST 40S RIBOSOMAL PROTEIN S22 (S24)
MCVEAIMVRASVLNDCLKSMSNAEKQGKRQVMIRPSSKVIIKFLTVMQKHGYIAEFEYVDDHRSGKIVVELNGRLNNCGVISPRYDLGVKEIEGWTAKLLPSRQFGYIVLTTSAGIMDHEEARKKNVGGKVLGFFY

SEQ ID NO: 70444 - protein, 130 aa, Arabidopsis thaliana
  peptide (1)..(130): Ceres Seq. ID no. 2707492
  misc_feature (5)..(130): Pfam Name: Ribosomal protein S8 Pfam Description: Ribosomal protein S8
  misc_feature (1)..(130): Homolog of NCBI NO: 15225502 NR Description: 40S ribosomal protein S15A; protein id: [Arabidopsis thaliana] >gi|7440262|pir||T00569 ribosomal protein
  misc_feature (1)..(130): Homolog of NCBI NO: 133793 NR Description: 40S RIBOSOMAL PROTEIN S15A (PPCB8)
  misc_feature (1)..(130): Homolog of NCBI NO: 15223001 NR Description: ribosomal protein S15; protein id: At1g07770.1, by cDNA: 5724., supported by cDNA: gi_12083301, supported by gi_13430743, supported by cDNA: gi_14423369, supported by cDNA:
  misc_feature (1)..(130): Homolog of NCBI NO: 6683481 NR Description: wrp15a [Citrullus lanatus]
  misc_feature (1)..(130): Homolog of NCBI NO: 15231316 NR Description: cytoplasmic ribosomal protein S15a -like; protein At3g46040.1, supported by cDNA: gi_15027960, supported by cDNA: [Arabidopsis thaliana] >gi|11276560|pir||T49245 cytoplasmic
  misc_feature (1)..(130): Homolog of NCBI NO: 13560779 NR Description: cytoplasmic ribosomal protein S15a [Daucus carota]
  misc_feature (1)..(130): Homolog of NCBI NO: 28411802 NR Description: ribosomal protein S15 [Oryza sativa (japonica
  misc_feature (1)..(130): Homolog of NCBI NO: 2130985 NR Description: r-protein BnS15a [Brassica napus]
  misc_feature (1)..(130): Homolog of NCBI NO: 32411611 NR Description: 40S RIBOSOMAL PROTEIN S22 (S15A) (YS24) crassa] >gi|28918412|gb|EAA28086.1| 40S RIBOSOMAL PROTEIN S22
  misc_feature (1)..(130): Homolog of NCBI NO: 6322271 NR Description: Homology to rat S15a; Rps22ap [Saccharomyces >gi|133884|sp|P04648|RS22_YEAST 40S RIBOSOMAL PROTEIN S22 (S24)
MVRASVLNDCLKSMSNAEKQGKRQVMIRPSSKVIIKFLTVMQKHGYIAEFEYVDDHRSGKIVVELNGRLNNCGVISPRYDLGVKEIEGWTAKLLPSRQFGYIVLTTSAGIMDHEEARKKNVGGKVLGFFY

SEQ ID NO: 70445 - protein, 117 aa, Arabidopsis thaliana
  peptide (1)..(117): Ceres Seq. ID no. 2707493
  misc_feature (1)..(117): Pfam Name: Ribosomal protein S8 Pfam Description: Ribosomal protein S8
  misc_feature (1)..(117): Homolog of NCBI NO: 15225502 NR Description: 40S ribosomal protein S15A; protein id: [Arabidopsis thaliana] >gi|7440262|pir||T00569 ribosomal protein
  misc_feature (1)..(117): Homolog of NCBI NO: 133793 NR Description: 40S RIBOSOMAL PROTEIN S15A (PPCB8)
  misc_feature (1)..(117): Homolog of NCBI NO: 15223001 NR Description: ribosomal protein S15; protein id: At1g07770.1, by cDNA: 5724., supported by cDNA: gi_12083301, supported by gi_13430743, supported by cDNA: gi_14423369, supported by cDNA:
  misc_feature (1)..(117): Homolog of NCBI NO: 6683481 NR Description: wrp15a [Citrullus lanatus]
  misc_feature (1)..(117): Homolog of NCBI NO: 15231316 NR Description: cytoplasmic ribosomal protein S15a -like; protein At3g46040.1, supported by cDNA: gi_15027960, supported by cDNA: [Arabidopsis thaliana] >gi|11276560|pir||T49245 cytoplasmic
  misc_feature (1)..(117): Homolog of NCBI NO: 13560779 NR Description: cytoplasmic ribosomal protein S15a [Daucus carota]
  misc_feature (1)..(117): Homolog of NCBI NO: 28411802 NR Description: ribosomal protein S15 [Oryza sativa (japonica
  misc_feature (1)..(117): Homolog of NCBI NO: 2130985 NR Description: r-protein BnS15a [Brassica napus]
  misc_feature (1)..(117): Homolog of NCBI NO: 32411611 NR Description: 40S RIBOSOMAL PROTEIN S22 (S15A) (YS24) crassa] >gi|28918412|gb|EAA28086.1| 40S RIBOSOMAL PROTEIN S22
  misc_feature (1)..(117): Homolog of NCBI NO: 6322271 NR Description: Homology to rat S15a; Rps22ap [Saccharomyces >gi|133884|sp|P04648|RS22_YEAST 40S RIBOSOMAL PROTEIN S22 (S24)
MSNAEKQGKRQVMIRPSSKVIIKFLTVMQKHGYIAEFEYVDDHRSGKIVVELNGRLNNCGVISPRYDLGVKEIEGWTAKLLPSRQFGYIVLTTSAGIMDHEEARKKNVGGKVLGFFY

SEQ ID NO: 70446 - DNA, 1284 bp, Arabidopsis thaliana
  misc_feature (1)..(1284): Ceres Seq. ID no. 2708135
atgatgcttaatcagacagtgatcttcttccttctttgggtgatcatagcacttgtagtcgaaattactttggccggaaagatcacagtttctgatatccatgagcagaaaatcgaacaacggttgaaccaactcaacaaacccgccgttaaatctatccatgtattcgcaacgacttttaattacccgtggtttgctattcccactattttcttgagtccagatggagatataatcgattgtgtatggatctatcaccaaccagcttttgatcatcctttactcaaaaaccacaccattcagatgaggccgaaaagtgactcgacaagggacaaaactggaggtaacaagacagacattatccatcaattgtggcgcacgaaaggtgaatgtcctaagaacactattcccatcagaagaagaacaagagatgatcttctaagatcagattccatcaaaactcatggaagaaagaacccaccaaccatttctccaactacttatcacctccccgatgatcagacagaagttcatgagcatgcgagtgtgtacctggactatggtgaataccatggcagcaagagccgtataagtatatggagaccagacgttaatatgaccgagtttagtttggctcaaacatgggtcgtcggtggagattgggacactgttttgaacactgtggagtctggttggcagatcctacattctatgtacggtgacaataatacaagacttttcgccttttggacgagcgattcatatggagacaacagctgctacaatcttgactgtccaggctttgttcaagtgaataaagatattgcccttggtgcagccctcaacactatctcgacctacaatggtaaccaatatgatttccttctaactattgagaaggaacaagataccggactttggtggcttaagtttgatactcatctagtcggatactggccaagctttctagtcccgaagctagcagactcagcacggatgatcgcttggggaggtgaaattgtgtatgatgctagtggccaaaatgaacatacgcttacgcaaatggggagtggccatttcgcggaagaagggtttaagaaggcggcttatatcaataacatagagtacatcgataaatctaatcatccgatcaaaccctttcctcaaaatcttgaagcttctgttactcggcctgaatgctataacctcaaggttggctctagccgaagatggggaacttacattttctatggtggacctggacgtaaccctcaatgcctatga

SEQ ID NO: 70447 - protein, 427 aa, Arabidopsis thaliana
  peptide (1)..(427): Ceres Seq. ID no. 2708136
  misc_feature (190)..(385): Pfam Name: Arabidopsis proteins of unknown function Pfam Description: Arabidopsis proteins of unknown function
  misc_feature (1)..(427): Homolog of NCBI NO: 15224848 NR Description: unknown protein; protein id: At2g44250.1
  misc_feature (7)..(426): Homolog of NCBI NO: 18406483 NR Description: expressed protein; protein id: At2g44210.1, by cDNA: 39057., supported by cDNA: gi_15081718 [Arabidopsis
  misc_feature (13)..(426): Homolog of NCBI NO: 30103019 NR Description: unknown protein [Oryza sativa (japonica
  misc_feature (35)..(426): Homolog of NCBI NO: 34393554 NR Description: putative carboxyl-terminal proteinase [Oryza
  misc_feature (10)..(426): Homolog of NCBI NO: 15241244 NR Description: putative protein; protein id: At5g56530.1, by cDNA: gi_17381169 [Arabidopsis thaliana]
  misc_feature (13)..(426): Homolog of NCBI NO: 34393299 NR Description: putative DD1A protein [Oryza sativa (japonica
  misc_feature (9)..(426): Homolog of NCBI NO: 18400044 NR Description: expressed protein; protein id: At3g13510.1, by cDNA: 37810., supported by cDNA: gi_18700164 [Arabidopsis >gi|9280303|dbj|BAB01758.1| gb|AAC16072.1~gene_id:MRP15.17~strong
  misc_feature (9)..(426): Homolog of NCBI NO: 21593294 NR Description: putative carboxyl-terminal peptidase [Arabidopsis
  misc_feature (31)..(426): Homolog of NCBI NO: 27311623 NR Description: unknown protein [Arabidopsis thaliana]
  misc_feature (31)..(426): Homolog of NCBI NO: 15222707 NR Description: unknown protein; protein id: At1g55360.1
MMLNQTVIFFLLWVIIALVVEITLAGKITVSDIHEQKIEQRLNQLNKPAVKSIHVFATTFNYPWFAIPTIFLSPDGDIIDCVWIYHQPAFDHPLLKNHTIQMRPKSDSTRDKTGGNKTDIIHQLWRTKGECPKNTIPIRRRTRDDLLRSDSIKTHGRKNPPTISPTTYHLPDDQTEVHEHASVYLDYGEYHGSKSRISIWRPDVNMTEFSLAQTWVVGGDWDTVLNTVESGWQILHSMYGDNNTRLFAFWTSDSYGDNSCYNLDCPGFVQVNKDIALGAALNTISTYNGNQYDFLLTIEKEQDTGLWWLKFDTHLVGYWPSFLVPKLADSARMIAWGGEIVYDASGQNEHTLTQMGSGHFAEEGFKKAAYINNIEYIDKSNHPIKPFPQNLEASVTRPECYNLKVGSSRRWGTYIFYGGPGRNPQCL

SEQ ID NO: 70448 - protein, 426 aa, Arabidopsis thaliana
  peptide (1)..(426): Ceres Seq. ID no. 2708137
  misc_feature (189)..(384): Pfam Name: Arabidopsis proteins of unknown function Pfam Description: Arabidopsis proteins of unknown function
  misc_feature (1)..(426): Homolog of NCBI NO: 15224848 NR Description: unknown protein; protein id: At2g44250.1
  misc_feature (6)..(425): Homolog of NCBI NO: 18406483 NR Description: expressed protein; protein id: At2g44210.1, by cDNA: 39057., supported by cDNA: gi_15081718 [Arabidopsis
  misc_feature (12)..(425): Homolog of NCBI NO: 30103019 NR Description: unknown protein [Oryza sativa (japonica
  misc_feature (34)..(425): Homolog of NCBI NO: 34393554 NR Description: putative carboxyl-terminal proteinase [Oryza
  misc_feature (9)..(425): Homolog of NCBI NO: 15241244 NR Description: putative protein; protein id: At5g56530.1, by cDNA: gi_17381169 [Arabidopsis thaliana]
  misc_feature (12)..(425): Homolog of NCBI NO: 34393299 NR Description: putative DD1A protein [Oryza sativa (japonica
  misc_feature (8)..(425): Homolog of NCBI NO: 18400044 NR Description: expressed protein; protein id: At3g13510.1, by cDNA: 37810., supported by cDNA: gi_18700164 [Arabidopsis >gi|9280303|dbj|BAB01758.1| gb|AAC16072.1~gene_id:MRP15.17~strong
  misc_feature (8)..(425): Homolog of NCBI NO: 21593294 NR Description: putative carboxyl-terminal peptidase [Arabidopsis
  misc_feature (30)..(425): Homolog of NCBI NO: 27311623 NR Description: unknown protein [Arabidopsis thaliana]
  misc_feature (30)..(425): Homolog of NCBI NO: 15222707 NR Description: unknown protein; protein id: At1g55360.1
MLNQTVIFFLLWVIIALVVEITLAGKITVSDIHEQKIEQRLNQLNKPAVKSIHVFATTFNYPWFAIPTIFLSPDGDIIDCVWIYHQPAFDHPLLKNHTIQMRPKSDSTRDKTGGNKTDIIHQLWRTKGECPKNTIPIRRRTRDDLLRSDSIKTHGRKNPPTISPTTYHLPDDQTEVHEHASVYLDYGEYHGSKSRISIWRPDVNMTEFSLAQTWVVGGDWDTVLNTVESGWQILHSMYGDNNTRLFAFWTSDSYGDNSCYNLDCPGFVQVNKDIALGAALNTISTYNGNQYDFLLTIEKEQDTGLWWLKFDTHLVGYWPSFLVPKLADSARMIAWGGEIVYDASGQNEHTLTQMGSGHFAEEGFKKAAYINNIEYIDKSNHPIKPFPQNLEASVTRPECYNLKVGSSRRWGTYIFYGGPGRNPQCL

SEQ ID NO: 70449 - protein, 326 aa, Arabidopsis thaliana
  peptide (1)..(326): Ceres Seq. ID no. 2708138
  misc_feature (89)..(284): Pfam Name: Arabidopsis proteins of unknown function Pfam Description: Arabidopsis proteins of unknown function
  misc_feature (1)..(326): Homolog of NCBI NO: 15224848 NR Description: unknown protein; protein id: At2g44250.1
  misc_feature (1)..(325): Homolog of NCBI NO: 18406483 NR Description: expressed protein; protein id: At2g44210.1, by cDNA: 39057., supported by cDNA: gi_15081718 [Arabidopsis
  misc_feature (1)..(325): Homolog of NCBI NO: 30103019 NR Description: unknown protein [Oryza sativa (japonica
  misc_feature (1)..(325): Homolog of NCBI NO: 34393554 NR Description: putative carboxyl-terminal proteinase [Oryza
  misc_feature (1)..(325): Homolog of NCBI NO: 15241244 NR Description: putative protein; protein id: At5g56530.1, by cDNA: gi_17381169 [Arabidopsis thaliana]
  misc_feature (1)..(325): Homolog of NCBI NO: 34393299 NR Description: putative DD1A protein [Oryza sativa (japonica
  misc_feature (1)..(325): Homolog of NCBI NO: 18400044 NR Description: expressed protein; protein id: At3g13510.1, by cDNA: 37810., supported by cDNA: gi_18700164 [Arabidopsis >gi|9280303|dbj|BAB01758.1| gb|AAC16072.1~gene_id:MRP15.17~strong
  misc_feature (1)..(325): Homolog of NCBI NO: 21593294 NR Description: putative carboxyl-terminal peptidase [Arabidopsis
  misc_feature (1)..(325): Homolog of NCBI NO: 27311623 NR Description: unknown protein [Arabidopsis thaliana]
  misc_feature (1)..(325): Homolog of NCBI NO: 15222707 NR Description: unknown protein; protein id: At1g55360.1
MRPKSDSTRDKTGGNKTDIIHQLWRTKGECPKNTIPIRRRTRDDLLRSDSIKTHGRKNPPTISPTTYHLPDDQTEVHEHASVYLDYGEYHGSKSRISIWRPDVNMTEFSLAQTWVVGGDWDTVLNTVESGWQILHSMYGDNNTRLFAFWTSDSYGDNSCYNLDCPGFVQVNKDIALGAALNTISTYNGNQYDFLLTIEKEQDTGLWWLKFDTHLVGYWPSFLVPKLADSARMIAWGGEIVYDASGQNEHTLTQMGSGHFAEEGFKKAAYINNIEYIDKSNHPIKPFPQNLEASVTRPECYNLKVGSSRRWGTYIFYGGPGRNPQCL

SEQ ID NO: 70450 - DNA, 807 bp, Arabidopsis thaliana
  misc_feature (1)..(807): Ceres Seq. ID no. 2708158
  misc_feature: MA Experiment ID: 20000173 Result: Down-regulated in Transcription
  misc_feature: MA Experiment 20000173 PARAMETER Experiment Name: At_42deg_Heat_P Parameter: Age (day) Value: 14
  misc_feature: MA Experiment 20000173 PARAMETER Experiment Name: At_42deg_Heat_P Parameter: Organism Value: A. thaliana
  misc_feature: MA Experiment 20000173 PARAMETER Experiment Name: At_42deg_Heat_P Parameter: Plant Line Value: WS
  misc_feature: MA Experiment 20000173 PARAMETER Experiment Name: At_42deg_Heat_P Parameter: Temperature (deg C) Value: 42 vs. 22
  misc_feature: MA Experiment 20000173 PARAMETER Experiment Name: At_42deg_Heat_P Parameter: Timepoint (hr) Value: 6
  misc_feature: MA Experiment 20000173 PARAMETER Experiment Name: At_42deg_Heat_P Parameter: Tissue Value: Aerial
  misc_feature: MA Experiment ID: 20000180 Result: Up-regulated in Transcription
  misc_feature: MA Experiment 20000180 PARAMETER Experiment Name: At_Germinating_Seeds_P Parameter: Age (hr) Value: 24 vs. 0
  misc_feature: MA Experiment 20000180 PARAMETER Experiment Name: At_Germinating_Seeds_P Parameter: Tissue Value: Germinating Seeds
  misc_feature: MA Experiment ID: 20000234 Result: Down-regulated in Transcription
  misc_feature: MA Experiment 20000234 PARAMETER Experiment Name: At_Siliques_P Parameter: Age (day) Value: 21
  misc_feature: MA Experiment 20000234 PARAMETER Experiment Name: At_Siliques_P Parameter: Organism Value: A. thaliana
  misc_feature: MA Experiment 20000234 PARAMETER Experiment Name: At_Siliques_P Parameter: Plant Line Value: WS
  misc_feature: MA Experiment 20000234 PARAMETER Experiment Name: At_Siliques_P Parameter: Tissue Value: Less Than 5mm Siliques vs. Whole Plant
  misc_feature: MA Experiment ID: 20000438 Result: Up-regulated in Transcription
  misc_feature: MA Experiment 20000438 PARAMETER Experiment Name: At_Shoots__P Parameter: Age (day) Value: 14
  misc_feature: MA Experiment 20000438 PARAMETER Experiment Name: At_Shoots__P Parameter: Tissue Value: Shoots vs. Whole Plant
  misc_feature: MA Experiment ID: 20000495 Result: Down-regulated in Transcription
  misc_feature: MA Experiment 20000495 PARAMETER Experiment Name: At_Guard_Cells_P Parameter: Harvest Date Value: 8/2/2002
  misc_feature: MA Experiment 20000495 PARAMETER Experiment Name: At_Guard_Cells_P Parameter: Organism Value: A. thaliana
  misc_feature: MA Experiment 20000495 PARAMETER Experiment Name: At_Guard_Cells_P Parameter: Tissue Value: Guard Cells vs. Leaves
  misc_feature: MA Experiment ID: 20000496 Result: Down-regulated in Transcription
  misc_feature: MA Experiment 20000496 PARAMETER Experiment Name: At_Guard_Cells_P Parameter: Harvest Date Value: 7/19/2002
  misc_feature: MA Experiment 20000496 PARAMETER Experiment Name: At_Guard_Cells_P Parameter: Organism Value: Canola
  misc_feature: MA Experiment 20000496 PARAMETER Experiment Name: At_Guard_Cells_P Parameter: Tissue Value: Guard Cells vs. Leaves
  misc_feature: MA Experiment ID: 20001248 Result: Down-regulated in Transcription
  misc_feature: MA Experiment 20001248 PARAMETER Experiment Name: At_Far-red-induction_P Parameter: Age (day) Value: 7
  misc_feature: MA Experiment 20001248 PARAMETER Experiment Name: At_Far-red-induction_P Parameter: Light Value: Far-red vs. White
  misc_feature: MA Experiment 20001248 PARAMETER Experiment Name: At_Far-red-induction_P Parameter: Organism Value: A. thaliana
  misc_feature: MA Experiment 20001248 PARAMETER Experiment Name: At_Far-red-induction_P Parameter: Plant Line Value: Columbia
  misc_feature: MA Experiment 20001248 PARAMETER Experiment Name: At_Far-red-induction_P Parameter: Timepoint (hr) Value: 4
  misc_feature: MA Experiment 20001248 PARAMETER Experiment Name: At_Far-red-induction_P Parameter: Tissue Value: Whole Plant
  misc_feature: MA Experiment ID: 20001557 Result: Down-regulated in Transcription
  misc_feature: MA Experiment 20001557 PARAMETER Experiment Name: At_Drought_Soil_Dry_P Parameter: Age (day) Value: 27
  misc_feature: MA Experiment 20001557 PARAMETER Experiment Name: At_Drought_Soil_Dry_P Parameter: Organism Value: A. thaliana
  misc_feature: MA Experiment 20001557 PARAMETER Experiment Name: At_Drought_Soil_Dry_P Parameter: Plant Line Value: WS
  misc_feature: MA Experiment 20001557 PARAMETER Experiment Name: At_Drought_Soil_Dry_P Parameter: Post Timepoint (hr) Value: 3
  misc_feature: MA Experiment 20001557 PARAMETER Experiment Name: At_Drought_Soil_Dry_P Parameter: Post-Treatment Value: Re-Water vs. No Drought
  misc_feature: MA Experiment 20001557 PARAMETER Experiment Name: At_Drought_Soil_Dry_P Parameter: Timepoint (day) Value: 13
  misc_feature: MA Experiment 20001557 PARAMETER Experiment Name: At_Drought_Soil_Dry_P Parameter: Treatment Value: Drought vs. No Drought
  misc_feature: MA Experiment ID: 20001560 Result: Down-regulated in Transcription
  misc_feature: MA Experiment 20001560 PARAMETER Experiment Name: At_Drought_Soil_Dry_P Parameter: Age (day) Value: 28
  misc_feature: MA Experiment 20001560 PARAMETER Experiment Name: At_Drought_Soil_Dry_P Parameter: Organism Value: A. thaliana
  misc_feature: MA Experiment 20001560 PARAMETER Experiment Name: At_Drought_Soil_Dry_P Parameter: Plant Line Value: WS
  misc_feature: MA Experiment 20001560 PARAMETER Experiment Name: At_Drought_Soil_Dry_P Parameter: Post Timepoint (hr) Value: None
  misc_feature: MA Experiment 20001560 PARAMETER Experiment Name: At_Drought_Soil_Dry_P Parameter: Post-Treatment Value: None
  misc_feature: MA Experiment 20001560 PARAMETER Experiment Name: At_Drought_Soil_Dry_P Parameter: Timepoint (day) Value: 14
  misc_feature: MA Experiment 20001560 PARAMETER Experiment Name: At_Drought_Soil_Dry_P Parameter: Treatment Value: Drought vs. No Drought
  misc_feature: MA Experiment ID: 20001911 Result: Down-regulated in Transcription
  misc_feature: MA Experiment 20001911 PARAMETER Experiment Name: At_Drought_Reproduction_P Parameter: Age (day) Value: 40
  misc_feature: MA Experiment 20001911 PARAMETER Experiment Name: At_Drought_Reproduction_P Parameter: Organism Value: A. thaliana
  misc_feature: MA Experiment 20001911 PARAMETER Experiment Name: At_Drought_Reproduction_P Parameter: Plant Line Value: WS
  misc_feature: MA Experiment 20001911 PARAMETER Experiment Name: At_Drought_Reproduction_P Parameter: Timepoint (day) Value: 10
  misc_feature: MA Experiment 20001911 PARAMETER Experiment Name: At_Drought_Reproduction_P Parameter: Tissue Value: Flowers
  misc_feature: MA Experiment 20001911 PARAMETER Experiment Name: At_Drought_Reproduction_P Parameter: Treatment Value: Drought vs. No Drought
  misc_feature: Pfam Name: adh_short Pfam Description: short chain dehydrogenase
atggctaaagcagaagaaaacttgagagacaaatgtagatggagccttggaggcatgaccgctctcgttaccggtggctccaaaggcctcggggaagctgtggtggaggaactagccatgttaggagcaagagtccacacatgtgctagaaacgaaactcagcttcaagaatgcgtacgtgaatggcaagctaaagggtttgaggtcaccacttctgtatgcgacgtttcttctcgtgaccaacgagagaaactcatggaaaacgttgcctctatcttccaaggaaaactcaacatccttgtaaacaatgcgggaacgggtataacaaagccgaccacagagtatacagcacaagattactcatttctgatggctacaaatctcgactcagcttttcatctctcacagctcgcgcatcctttgttgaaagcatctggttcagggagcatcgtgctcatgtcctctactgcaggggttgtacatatcaatgttggttccatctatggagcaactaaaggagctatgaatcagctagcaaaaaacttagcatgcgagtgggcaagggataacataagggttaattctgtctgtccatggttcatagcaactcctttatatctcaatgatgaagagttaaagaaagaagtggagcgtaagacaccaatgggacgtgttggaaacgcaaatgaagtatcatcgcttgtcgcatttctctgctttccggctgcttcgtatataacaggtcagacaatctgcgtcgacggaggtttcacggtcaactgcttttctttcaagccagtgctttaa

SEQ ID NO: 70451 - protein, 268 aa, Arabidopsis thaliana
  peptide (1)..(268): Ceres Seq. ID no. 2708159
  misc_feature: Pfam Name: adh_short Pfam Description: short chain dehydrogenase
  misc_feature (1)..(268): Homolog of NCBI NO: 15227043 NR Description: putative tropinone reductase; protein id: [Arabidopsis thaliana] >gi|25283125|pir||C84693 probable
  misc_feature (1)..(266): Homolog of NCBI NO: 15227040 NR Description: putative tropinone reductase; protein id: [Arabidopsis thaliana] >gi|25283124|pir||B84693 probable
  misc_feature (1)..(265): Homolog of NCBI NO: 15227075 NR Description: putative tropinone reductase; protein id: supported by cDNA: 14555., supported by cDNA: gi_17473659, by cDNA: gi_20148626 [Arabidopsis thaliana]
  misc_feature (1)..(267): Homolog of NCBI NO: 15227076 NR Description: putative tropinone reductase; protein id: supported by cDNA: 2618., supported by cDNA: gi_15010623, by cDNA: gi_19699255 [Arabidopsis thaliana]
  misc_feature (1)..(267): Homolog of NCBI NO: 21554716 NR Description: putative tropinone reductase [Arabidopsis
  misc_feature (110)..(265): Homolog of NCBI NO: 6457349 NR Description: short chain alcohol dehydrogenase [Arabidopsis
  misc_feature (1)..(101): Homolog of NCBI NO: 6457349 NR Description: short chain alcohol dehydrogenase [Arabidopsis
  misc_feature (10)..(266): Homolog of NCBI NO: 15227069 NR Description: putative tropinone reductase; protein id: [Arabidopsis thaliana] >gi|25283126|pir||E84694 probable
  misc_feature (1)..(263): Homolog of NCBI NO: 25283134 NR Description: probable tropinone reductase [imported] - thaliana >gi|3980398|gb|AAC95201.1| putative tropinone reductase
  misc_feature (10)..(266): Homolog of NCBI NO: 15239327 NR Description: short chain alcohol dehydrogenase-like; protein
MAKAEENLRDKCRWSLGGMTALVTGGSKGLGEAVVEELAMLGARVHTCARNETQLQECVREWQAKGFEVTTSVCDVSSRDQREKLMENVASIFQGKLNILVNNAGTGITKPTTEYTAQDYSFLMATNLDSAFHLSQLAHPLLKASGSGSIVLMSSTAGVVHINVGSIYGATKGAMNQLAKNLACEWARDNIRVNSVCPWFIATPLYLNDEELKKEVERKTPMGRVGNANEVSSLVAFLCFPAASYITGQTICVDGGFTVNCFSFKPVL

SEQ ID NO: 70452 - protein, 250 aa, Arabidopsis thaliana
  peptide (1)..(250): Ceres Seq. ID no. 2708160
  misc_feature: Pfam Name: adh_short Pfam Description: short chain dehydrogenase
  misc_feature (1)..(250): Homolog of NCBI NO: 15227043 NR Description: putative tropinone reductase; protein id: [Arabidopsis thaliana] >gi|25283125|pir||C84693 probable
  misc_feature (1)..(248): Homolog of NCBI NO: 15227040 NR Description: putative tropinone reductase; protein id: [Arabidopsis thaliana] >gi|25283124|pir||B84693 probable
  misc_feature (1)..(247): Homolog of NCBI NO: 15227075 NR Description: putative tropinone reductase; protein id: supported by cDNA: 14555., supported by cDNA: gi_17473659, by cDNA: gi_20148626 [Arabidopsis thaliana]
  misc_feature (1)..(249): Homolog of NCBI NO: 15227076 NR Description: putative tropinone reductase; protein id: supported by cDNA: 2618., supported by cDNA: gi_15010623, by cDNA: gi_19699255 [Arabidopsis thaliana]
  misc_feature (1)..(249): Homolog of NCBI NO: 21554716 NR Description: putative tropinone reductase [Arabidopsis
  misc_feature (92)..(247): Homolog of NCBI NO: 6457349 NR Description: short chain alcohol dehydrogenase [Arabidopsis
  misc_feature (1)..(83): Homolog of NCBI NO: 6457349 NR Description: short chain alcohol dehydrogenase [Arabidopsis
  misc_feature (1)..(248): Homolog of NCBI NO: 15227069 NR Description: putative tropinone reductase; protein id: [Arabidopsis thaliana] >gi|25283126|pir||E84694 probable
  misc_feature (1)..(245): Homolog of NCBI NO: 25283134 NR Description: probable tropinone reductase [imported] - thaliana >gi|3980398|gb|AAC95201.1| putative tropinone reductase
  misc_feature (1)..(248): Homolog of NCBI NO: 15239327 NR Description: short chain alcohol dehydrogenase-like; protein
MTALVTGGSKGLGEAVVEELAMLGARVHTCARNETQLQECVREWQAKGFEVTTSVCDVSSRDQREKLMENVASIFQGKLNILVNNAGTGITKPTTEYTAQDYSFLMATNLDSAFHLSQLAHPLLKASGSGSIVLMSSTAGVVHINVGSIYGATKGAMNQLAKNLACEWARDNIRVNSVCPWFIATPLYLNDEELKKEVERKTPMGRVGNANEVSSLVAFLCFPAASYITGQTICVDGGFTVNCFSFKPVL

SEQ ID NO: 70453 - protein, 229 aa, Arabidopsis thaliana
  peptide (1)..(229): Ceres Seq. ID no. 2708161
  misc_feature: Pfam Name: adh_short Pfam Description: short chain dehydrogenase
  misc_feature (1)..(226): Homolog of NCBI NO: 15227075 NR Description: putative tropinone reductase; protein id: supported by cDNA: 14555., supported by cDNA: gi_17473659, by cDNA: gi_20148626 [Arabidopsis thaliana]
  misc_feature (1)..(228): Homolog of NCBI NO: 15227076 NR Description: putative tropinone reductase; protein id: supported by cDNA: 2618., supported by cDNA: gi_15010623, by cDNA: gi_19699255 [Arabidopsis thaliana]
  misc_feature (1)..(228): Homolog of NCBI NO: 21554716 NR Description: putative tropinone reductase [Arabidopsis
  misc_feature (71)..(226): Homolog of NCBI NO: 6457349 NR Description: short chain alcohol dehydrogenase [Arabidopsis
  misc_feature (1)..(62): Homolog of NCBI NO: 6457349 NR Description: short chain alcohol dehydrogenase [Arabidopsis
  misc_feature (1)..(227): Homolog of NCBI NO: 15227069 NR Description: putative tropinone reductase; protein id: [Arabidopsis thaliana] >gi|25283126|pir||E84694 probable
  misc_feature (1)..(224): Homolog of NCBI NO: 25283134 NR Description: probable tropinone reductase [imported] - thaliana >gi|3980398|gb|AAC95201.1| putative tropinone reductase
  misc_feature (1)..(227): Homolog of NCBI NO: 15239327 NR Description: short chain alcohol dehydrogenase-like; protein
  misc_feature (1)..(229): Homolog of NCBI NO: 15227043 NR Description: putative tropinone reductase; protein id: [Arabidopsis thaliana] >gi|25283125|pir||C84693 probable
  misc_feature (1)..(227): Homolog of NCBI NO: 15227040 NR Description: putative tropinone reductase; protein id: [Arabidopsis thaliana] >gi|25283124|pir||B84693 probable
MLGARVHTCARNETQLQECVREWQAKGFEVTTSVCDVSSRDQREKLMENVASIFQGKLNILVNNAGTGITKPTTEYTAQDYSFLMATNLDSAFHLSQLAHPLLKASGSGSIVLMSSTAGVVHINVGSIYGATKGAMNQLAKNLACEWARDNIRVNSVCPWFIATPLYLNDEELKKEVERKTPMGRVGNANEVSSLVAFLCFPAASYITGQTICVDGGFTVNCFSFKPVL

SEQ ID NO: 70454 - DNA, 1158 bp, Arabidopsis thaliana
  misc_feature (1)..(1158): Ceres Seq. ID no. 2708181
  misc_feature: MA Experiment ID: 20000227 Result: Up-regulated in Transcription
  misc_feature: MA Experiment 20000227 PARAMETER Experiment Name: At_Root-Tips-vs-Tops_P Parameter: Tissue Value: Root Tips vs. Root Tops
  misc_feature: MA Experiment ID: 20001757 Result: Down-regulated in Transcription
  misc_feature: MA Experiment 20001757 PARAMETER Experiment Name: At_50mM_NH4NO3_L-to-H_P Parameter: Timepoint (hr) Value: 6
  misc_feature: MA Experiment 20001757 PARAMETER Experiment Name: At_50mM_NH4NO3_L-to-H_P Parameter: Tissue Value: Leaf
  misc_feature: MA Experiment 20001757 PARAMETER Experiment Name: At_50mM_NH4NO3_L-to-H_P Parameter: Treatment Value: 50mM NH4NO3 vs 100mM Mannitol
  misc_feature: MA Experiment ID: 20001905 Result: Up-regulated in Transcription
  misc_feature: MA Experiment 20001905 PARAMETER Experiment Name: At_Drought_Reproduction_P Parameter: Age (day) Value: 40
  misc_feature: MA Experiment 20001905 PARAMETER Experiment Name: At_Drought_Reproduction_P Parameter: Organism Value: A. thaliana
  misc_feature: MA Experiment 20001905 PARAMETER Experiment Name: At_Drought_Reproduction_P Parameter: Plant Line Value: WS
  misc_feature: MA Experiment 20001905 PARAMETER Experiment Name: At_Drought_Reproduction_P Parameter: Timepoint (day) Value: 10
  misc_feature: MA Experiment 20001905 PARAMETER Experiment Name: At_Drought_Reproduction_P Parameter: Tissue Value: Rosettes
  misc_feature: MA Experiment 20001905 PARAMETER Experiment Name: At_Drought_Reproduction_P Parameter: Treatment Value: Drought vs. No Drought
  misc_feature: MA Experiment ID: 20001911 Result: Up-regulated in Transcription
  misc_feature: MA Experiment 20001911 PARAMETER Experiment Name: At_Drought_Reproduction_P Parameter: Age (day) Value: 40
  misc_feature: MA Experiment 20001911 PARAMETER Experiment Name: At_Drought_Reproduction_P Parameter: Organism Value: A. thaliana
  misc_feature: MA Experiment 20001911 PARAMETER Experiment Name: At_Drought_Reproduction_P Parameter: Plant Line Value: WS
  misc_feature: MA Experiment 20001911 PARAMETER Experiment Name: At_Drought_Reproduction_P Parameter: Timepoint (day) Value: 10
  misc_feature: MA Experiment 20001911 PARAMETER Experiment Name: At_Drought_Reproduction_P Parameter: Tissue Value: Flowers
  misc_feature: MA Experiment 20001911 PARAMETER Experiment Name: At_Drought_Reproduction_P Parameter: Treatment Value: Drought vs. No Drought
atgaaagtttgtgtaacgtataaacagcttatggaattggagcaaatctgcattttgaaacccgatgatgaggaagaaatggagtcaccatcaccatcgaaaacagaggaaaatttaggcgtggttcctctgtcttgcgcgtttacgagacaagaacattgcgtttccgagacgaaagaacgcgaagaatcgactagaagactaagcagccttatttttctttacctcatcgttatgtccgtacagattgtgggaggttttaaggcgaatagtcttgcggttatgacagatgctgcgcatttgttgtcggatgtggcgggtttgtgtgtctctttgttggcgatcaaggtctcgagctgggaagctaatccgcgaaactcgttcgggtttaaacggcttgaagttttagcggcgttcttgtctgttcagctcatatggcttgtctctggagtgataatccatgaagccattcaaagactacttagcagaagcagagaggttaatggagaaatcatgtttgggatttcggctttcgggtttttcatgaacttggttatggtcctttggttaggacataaccatagccaccaccaccacgaccatcatcaccatcatcataatcataaacatcaacatcaacatcatcacaaggaggtggtggcagaagaggaggaggaggaaatgaatcctttaaaaggtgagaaatcgtcttcaaaggagatgaacattaacatacaaggagcttatcttcacgcaatggctgatatgattcagtcactaggtgttatgattggtggaggtatcatttgggtaaaaccaaaatgggttttggttgatttgatttgcactcttgttttctctgcttttgctcttgctgctactctaccaattctcaagaacatatttggaatactgatggaacgcgtaccgcgtgatatggacatagagaagctcgaaagaggacttaagcgaatcgatggagttaagattgtttatgatctccatgtatgggagataacagtagggagaatcgtattgtcctgtcatatcttaccagagcctggagctagtcctaaagagatcattactggtgttagaaatttctgtaggaagtcttatgggatttatcatgcaactgttcaggttgaatcagagtag

SEQ ID NO: 70455 - protein, 385 aa, Arabidopsis thaliana
  peptide (1)..(385): Ceres Seq. ID no. 2708182
  misc_feature (71)..(385): Pfam Name: Cation efflux family Pfam Description: Cation efflux family
  misc_feature (1)..(385): Homolog of NCBI NO: 15227081 NR Description: putative zinc transporter; protein id: [Arabidopsis thaliana] >gi|25408029|pir||A84696 probable zinc
  misc_feature (15)..(216): Homolog of NCBI NO: 40287442 NR Description: heavy metal transporter MTP1 [Thlaspi arvense]
  misc_feature (191)..(383): Homolog of NCBI NO: 40287442 NR Description: heavy metal transporter MTP1 [Thlaspi arvense]
  misc_feature (189)..(383): Homolog of NCBI NO: 4206640 NR Description: zinc transporter ZAT [Arabidopsis thaliana]
  misc_feature (46)..(216): Homolog of NCBI NO: 4206640 NR Description: zinc transporter ZAT [Arabidopsis thaliana]
  misc_feature (192)..(383): Homolog of NCBI NO: 40287444 NR Description: heavy metal transporter MTP1 [Thlaspi
  misc_feature (46)..(216): Homolog of NCBI NO: 40287444 NR Description: heavy metal transporter MTP1 [Thlaspi
  misc_feature (191)..(383): Homolog of NCBI NO: 39919138 NR Description: zinc transporter CDF1-3 [Arabidopsis halleri
  misc_feature (46)..(224): Homolog of NCBI NO: 39919138 NR Description: zinc transporter CDF1-3 [Arabidopsis halleri
  misc_feature (191)..(383): Homolog of NCBI NO: 28315876 NR Description: putative vacuolar metal-ion transport protein
MKVCVTYKQLMELEQICILKPDDEEEMESPSPSKTEENLGVVPLSCAFTRQEHCVSETKEREESTRRLSSLIFLYLIVMSVQIVGGFKANSLAVMTDAAHLLSDVAGLCVSLLAIKVSSWEANPRNSFGFKRLEVLAAFLSVQLIWLVSGVIIHEAIQRLLSRSREVNGEIMFGISAFGFFMNLVMVLWLGHNHSHHHHDHHHHHHNHKHQHQHHHKEVVAEEEEEEMNPLKGEKSSSKEMNINIQGAYLHAMADMIQSLGVMIGGGIIWVKPKWVLVDLICTLVFSAFALAATLPILKNIFGILMERVPRDMDIEKLERGLKRIDGVKIVYDLHVWEITVGRIVLSCHILPEPGASPKEIITGVRNFCRKSYGIYHATVQVESE

SEQ ID NO: 70456 - protein, 375 aa, Arabidopsis thaliana
  peptide (1)..(375): Ceres Seq. ID no. 2708183
  misc_feature (61)..(375): Pfam Name: Cation efflux family Pfam Description: Cation efflux family
  misc_feature (1)..(375): Homolog of NCBI NO: 15227081 NR Description: putative zinc transporter; protein id: [Arabidopsis thaliana] >gi|25408029|pir||A84696 probable zinc
  misc_feature (5)..(206): Homolog of NCBI NO: 40287442 NR Description: heavy metal transporter MTP1 [Thlaspi arvense]
  misc_feature (181)..(373): Homolog of NCBI NO: 40287442 NR Description: heavy metal transporter MTP1 [Thlaspi arvense]
  misc_feature (179)..(373): Homolog of NCBI NO: 4206640 NR Description: zinc transporter ZAT [Arabidopsis thaliana]
  misc_feature (36)..(206): Homolog of NCBI NO: 4206640 NR Description: zinc transporter ZAT [Arabidopsis thaliana]
  misc_feature (182)..(373): Homolog of NCBI NO: 40287444 NR Description: heavy metal transporter MTP1 [Thlaspi
  misc_feature (36)..(206): Homolog of NCBI NO: 40287444 NR Description: heavy metal transporter MTP1 [Thlaspi
  misc_feature (181)..(373): Homolog of NCBI NO: 39919138 NR Description: zinc transporter CDF1-3 [Arabidopsis halleri
  misc_feature (36)..(214): Homolog of NCBI NO: 39919138 NR Description: zinc transporter CDF1-3 [Arabidopsis halleri
  misc_feature (181)..(373): Homolog of NCBI NO: 28315876 NR Description: putative vacuolar metal-ion transport protein
MELEQICILKPDDEEEMESPSPSKTEENLGVVPLSCAFTRQEHCVSETKEREESTRRLSSLIFLYLIVMSVQIVGGFKANSLAVMTDAAHLLSDVAGLCVSLLAIKVSSWEANPRNSFGFKRLEVLAAFLSVQLIWLVSGVIIHEAIQRLLSRSREVNGEIMFGISAFGFFMNLVMVLWLGHNHSHHHHDHHHHHHNHKHQHQHHHKEVVAEEEEEEMNPLKGEKSSSKEMNINIQGAYLHAMADMIQSLGVMIGGGIIWVKPKWVLVDLICTLVFSAFALAATLPILKNIFGILMERVPRDMDIEKLERGLKRIDGVKIVYDLHVWEITVGRIVLSCHILPEPGASPKEIITGVRNFCRKSYGIYHATVQVESE

SEQ ID NO: 70457 - protein, 359 aa, Arabidopsis thaliana; identical to SEQ ID NO: 44655
  peptide (1)..(359): Ceres Seq. ID no. 2708184
  misc_feature (45)..(359): Pfam Name: Cation efflux family Pfam Description: Cation efflux family
  misc_feature (1)..(359): Homolog of NCBI NO: 15227081 NR Description: putative zinc transporter; protein id: [Arabidopsis thaliana] >gi|25408029|pir||A84696 probable zinc
  misc_feature (1)..(190): Homolog of NCBI NO: 40287442 NR Description: heavy metal transporter MTP1 [Thlaspi arvense]
  misc_feature (165)..(357): Homolog of NCBI NO: 40287442 NR Description: heavy metal transporter MTP1 [Thlaspi arvense]
  misc_feature (163)..(357): Homolog of NCBI NO: 4206640 NR Description: zinc transporter ZAT [Arabidopsis thaliana]
  misc_feature (20)..(190): Homolog of NCBI NO: 4206640 NR Description: zinc transporter ZAT [Arabidopsis thaliana]
  misc_feature (166)..(357): Homolog of NCBI NO: 40287444 NR Description: heavy metal transporter MTP1 [Thlaspi
  misc_feature (20)..(190): Homolog of NCBI NO: 40287444 NR Description: heavy metal transporter MTP1 [Thlaspi
  misc_feature (165)..(357): Homolog of NCBI NO: 39919138 NR Description: zinc transporter CDF1-3 [Arabidopsis halleri
  misc_feature (20)..(198): Homolog of NCBI NO: 39919138 NR Description: zinc transporter CDF1-3 [Arabidopsis halleri
  misc_feature (165)..(357): Homolog of NCBI NO: 28315876 NR Description: putative vacuolar metal-ion transport protein

SEQ ID NO: 70458 - DNA, 2907 bp, Arabidopsis thaliana
  misc_feature (1)..(2907): Ceres Seq. ID no. 2708201
  misc_feature: MA Experiment ID: 20000307 Result: Down-regulated in Transcription
  misc_feature: MA Experiment 20000307 PARAMETER Experiment Name: At_Germinating_Seeds_Sub_P Parameter: Age (hr) Value: 24 vs. 0
  misc_feature: MA Experiment 20000307 PARAMETER Experiment Name: At_Germinating_Seeds_Sub_P Parameter: Organism Value: A. thaliana
  misc_feature: MA Experiment 20000307 PARAMETER Experiment Name: At_Germinating_Seeds_Sub_P Parameter: Plant Line Value: WS
  misc_feature: MA Experiment 20000307 PARAMETER Experiment Name: At_Germinating_Seeds_Sub_P Parameter: Tissue Value: Germinating Seeds
  misc_feature: MA Experiment ID: 20000315 Result: Down-regulated in Transcription
  misc_feature: MA Experiment 20000315 PARAMETER Experiment Name: At_14day_Shoots-Roots_Sub_P Parameter: Age (day) Value: 14
  misc_feature: MA Experiment 20000315 PARAMETER Experiment Name: At_14day_Shoots-Roots_Sub_P Parameter: Organism Value: A. thaliana
  misc_feature: MA Experiment 20000315 PARAMETER Experiment Name: At_14day_Shoots-Roots_Sub_P Parameter: Plant Line Value: WS
  misc_feature: MA Experiment 20000315 PARAMETER Experiment Name: At_14day_Shoots-Roots_Sub_P Parameter: Tissue Value: Shoots vs. Whole Plant
  misc_feature: MA Experiment ID: 20000327 Result: Down-regulated in Transcription
  misc_feature: MA Experiment 20000327 PARAMETER Experiment Name: At_42deg_Heat_Sub_P Parameter: Age (day) Value: 14
  misc_feature: MA Experiment 20000327 PARAMETER Experiment Name: At_42deg_Heat_Sub_P Parameter: Organism Value: A. thaliana
  misc_feature: MA Experiment 20000327 PARAMETER Experiment Name: At_42deg_Heat_Sub_P Parameter: Plant Line Value: WS
  misc_feature: MA Experiment 20000327 PARAMETER Experiment Name: At_42deg_Heat_Sub_P Parameter: Temperature (deg C) Value: 42 vs. 22
  misc_feature: MA Experiment 20000327 PARAMETER Experiment Name: At_42deg_Heat_Sub_P Parameter: Timepoint (hr) Value: 1
  misc_feature: MA Experiment 20000327 PARAMETER Experiment Name: At_42deg_Heat_Sub_P Parameter: Tissue Value: Aerial
  misc_feature: MA Experiment ID: 20000328 Result: Down-regulated in Transcription
  misc_feature: MA Experiment 20000328 PARAMETER Experiment Name: At_42deg_Heat_Sub_P Parameter: Age (day) Value: 14
  misc_feature: MA Experiment 20000328 PARAMETER Experiment Name: At_42deg_Heat_Sub_P Parameter: Organism Value: A. thaliana
  misc_feature: MA Experiment 20000328 PARAMETER Experiment Name: At_42deg_Heat_Sub_P Parameter: Plant Line Value: WS
  misc_feature: MA Experiment 20000328 PARAMETER Experiment Name: At_42deg_Heat_Sub_P Parameter: Temperature (deg C) Value: 42 vs. 22
  misc_feature: MA Experiment 20000328 PARAMETER Experiment Name: At_42deg_Heat_Sub_P Parameter: Timepoint (hr) Value: 6
  misc_feature: MA Experiment 20000328 PARAMETER Experiment Name: At_42deg_Heat_Sub_P Parameter: Tissue Value: Aerial
atgataccggaactagggagaagaccgatgcatagaggtaacgaagattcatcttttggggatgattatgagaaagagattggagtattgcttggtgagcagcagagaaggcaagtagaagctgatgagcttgagagagagcttaacttgtttagaagtggctctgctccaccgactgttgatggttctgttagtgctgccggagggctttttagcggcggaggtggggctccttttttggagtttggtggtgttaataagggtaatgggtttggtggtgatgatgaggagtttaggaaagatccggcttacttgtcttattactatgctaatatgaagttgaatccgaggttgccaccgcctttgatgtctagggaggatttgagggttgctcagaggcttaaagggagtaataatgtgttaggtggtgttggggataggagaaaagttaatgataatcgatctttgttctctatgccaccgggttttgaaggtgagaaaactggtgcttctgcttctgaatgggatgctaatggattgattggtttaccgggtttgggacttggaggcaagcagaagagttttgctgatatctttcaggctgatatggggcatggacatcctgtcgcacaacagccctcacgtcctgcaagtcgtaatacctttgatgaaaatgttgactctaataataatctgtctccgtctgcatcacaaggcattggtgcaccatctccatacagctatgcagctgttctaggctcttctttgtctagaaatggaactccagatccacaggccattgctagggtgcctagtccctgtcttactcccattgggagtggaagaatgagttcaaatgataagaggaacacaagtaaccagagcccattcaatggtgttacctctggtctcaacgagtcttctgatcttgtcaatgctttatctggcttgaacctgtcatgcagtgttgggttagatgatcggagtcaggctgagcaagatgtcgaaaaggtcaggaactatatgtttggactgcaaggtgggcataacgaagtcaatcaacatgagttcccaaacaaatctgatcaagcccataaggcaactggctcgttgaggaattcacaattgagagggccacacggatctgcctataatggtggagttggattagctaatccttaccagcaacttgatagcccaaattattgtctcaacaattacgcattaaatccagctgtagcctctatgatggctaaccaacttgggaacaataactttgctccaatgtatgataatgtatccgctttgggattttctggaatggactctagacatcatggacgaggctttgtatcttctggtcaaaacctctctgaatcacgtaatcttggcagattcagtaatcgaatgatgggaggaggtgctggtctccagtcacatatggtagacccaatgtataatcagtatgctgattcacttgatcttctcaatgatccttccatggataggaactttatgggtggttcatcatacatggatatgcttgaactccagagggcttatcttggagctcagaaatcacagtatggtgtcccttacaaatccgggagccctaacagccatagctattatgggagtccaacatttgggtctaatatgtcatatcctggcagcccattggctcatcatggtatgccaaactctcttatgtcaccttatagccctatgagacgggatgaagttaatatgcgatttccttctgcaacaagaaattattcgggagggttaatgggttcttggcacatggatgctagttttgatgaaggctttggatcttcaatgcttgaagagttcaaaagtaacaaaacaagaggatttgaactttctgaaatagctggccatgttgtggagttcagttcggatcaatatggaagccgctttattcagcagaaactcgagacagcaacaactgatgagaaaaacatggtctatgaggagatcatgccacaagctcttgtcctgatgactgacgtttttggaaactatgtgattcagaagttctttgagcatggactcccgccacagaggagagaattggcagagaaactctttgaccatgttttgcctcttagcttacagatgtatggttgccgtgtcatccagaaggcaattgaggtggttgatctagaccagaaaattaaaatggtgaaagaacttgatggacatgtaatgcgatgtgtacgtgatcagaatgggaaccatgtggttcaaaagtgtattgaatgtgtgcctgaagaaaacatcgagtttattatttcaactttctttggccatgtggtgaccctctccactcacccatatgggtgccgtgttattcagagagtattggaacactgccatgaccctgatacacagagtaaggttatggaagaaatcctgtccactgttagtatgctggcccaagatcagtatggaaactatgttgttcagcatgtgctggagcatggaaagcctgatgagcgcactgtgataatcaaagaattggcggggaagattgttcagatgagccagcagaagttcgcatcaaacgttgttgagaaatgtttgacttttggaggtcctgaggaacgagaattgcttgtgaatgagatgctgggaacaactgatgaaaacgagcctcttcaggcgatgatgaaggatcagttcgcaaactatgtagtgcagaaagttttggagacctgtgatgaccaacaacgtgagctgatacttactcgcatcaaagtgcatcttactgctttaaaaaagtacacttatggaaagcatgtcgttgcgcgtattgaaaaactcgttgctgctggagagaggagaatggctttgcagtccctaacccagccccagatggcttaa

SEQ ID NO: 70459 - protein, 968 aa, Arabidopsis thaliana
  peptide (1)..(968): Ceres Seq. ID no. 2708202
  misc_feature (774)..(809): Pfam Name: Pumilio-family RNA binding repeat Pfam Description: Pumilio-family RNA binding repeat
  misc_feature (407)..(960): Homolog of NCBI NO: 20513851 NR Description: BPM [Hordeum vulgare]
  misc_feature (218)..(365): Homolog of NCBI NO: 20513851 NR Description: BPM [Hordeum vulgare]
  misc_feature (70)..(131): Homolog of NCBI NO: 20513851 NR Description: BPM [Hordeum vulgare]
  misc_feature (182)..(961): Homolog of NCBI NO: 34908236 NR Description: putative pumilio/Mpt5 family RNA-binding protein
  misc_feature (39)..(81): Homolog of NCBI NO: 20513851 NR Description: BPM [Hordeum vulgare]
  misc_feature (180)..(961): Homolog of NCBI NO: 22330960 NR Description: pumilio-family RNA-binding protein, putative;
  misc_feature (10)..(167): Homolog of NCBI NO: 22330960 NR Description: pumilio-family RNA-binding protein, putative;
  misc_feature (344)..(960): Homolog of NCBI NO: 14719326 NR Description: putative pumilio/Mpt5 family RNA-binding protein
  misc_feature (70)..(173): Homolog of NCBI NO: 14719326 NR Description: putative pumilio/Mpt5 family RNA-binding protein
  misc_feature (180)..(963): Homolog of NCBI NO: 6056191 NR Description: putative RNA binding protein [Arabidopsis
MIPELGRRPMHRGNEDSSFGDDYEKEIGVLLGEQQRRQVEADELERELNLFRSGSAPPTVDGSVSAAGGLFSGGGGAPFLEFGGVNKGNGFGGDDEEFRKDPAYLSYYYANMKLNPRLPPPLMSREDLRVAQRLKGSNNVLGGVGDRRKVNDNRSLFSMPPGFEGEKTGASASEWDANGLIGLPGLGLGGKQKSFADIFQADMGHGHPVAQQPSRPASRNTFDENVDSNNNLSPSASQGIGAPSPYSYAAVLGSSLSRNGTPDPQAIARVPSPCLTPIGSGRMSSNDKRNTSNQSPFNGVTSGLNESSDLVNALSGLNLSCSVGLDDRSQAEQDVEKVRNYMFGLQGGHNEVNQHEFPNKSDQAHKATGSLRNSQLRGPHGSAYNGGVGLANPYQQLDSPNYCLNNYALNPAVASMMANQLGNNNFAPMYDNVSALGFSGMDSRHHGRGFVSSGQNLSESRNLGRFSNRMMGGGAGLQSHMVDPMYNQYADSLDLLNDPSMDRNFMGGSSYMDMLELQRAYLGAQKSQYGVPYKSGSPNSHSYYGSPTFGSNMSYPGSPLAHHGMPNSLMSPYSPMRRDEVNMRFPSATRNYSGGLMGSWHMDASFDEGFGSSMLEEFKSNKTRGFELSEIAGHVVEFSSDQYGSRFIQQKLETATTDEKNMVYEEIMPQALVLMTDVFGNYVIQKFFEHGLPPQRRELAEKLFDHVLPLSLQMYGCRVIQKAIEVVDLDQKIKMVKELDGHVMRCVRDQNGNHVVQKCIECVPEENIEFIISTFFGHVVTLSTHPYGCRVIQRVLEHCHDPDTQSKVMEEILSTVSMLAQDQYGNYVVQHVLEHGKPDERTVIIKELAGKIVQMSQQKFASNVVEKCLTFGGPEERELLVNEMLGTTDENEPLQAMMKDQFANYVVQKVLETCDDQQRELILTRIKVHLTALKKYTYGKHVVARIEKLVAAGERRMALQSLTQPQMA

SEQ ID NO: 70460 - protein, 959 aa, Arabidopsis thaliana
  peptide (1)..(959): Ceres Seq. ID no. 2708203
  misc_feature (765)..(800): Pfam Name: Pumilio-family RNA binding repeat Pfam Description: Pumilio-family RNA binding repeat
  misc_feature (398)..(951): Homolog of NCBI NO: 20513851 NR Description: BPM [Hordeum vulgare]
  misc_feature (209)..(356): Homolog of NCBI NO: 20513851 NR Description: BPM [Hordeum vulgare]
  misc_feature (61)..(122): Homolog of NCBI NO: 20513851 NR Description: BPM [Hordeum vulgare]
  misc_feature (173)..(952): Homolog of NCBI NO: 34908236 NR Description: putative pumilio/Mpt5 family RNA-binding protein
  misc_feature (30)..(72): Homolog of NCBI NO: 20513851 NR Description: BPM [Hordeum vulgare]
  misc_feature (171)..(952): Homolog of NCBI NO: 22330960 NR Description: pumilio-family RNA-binding protein, putative;
  misc_feature (1)..(158): Homolog of NCBI NO: 22330960 NR Description: pumilio-family RNA-binding protein, putative;
  misc_feature (335)..(951): Homolog of NCBI NO: 14719326 NR Description: putative pumilio/Mpt5 family RNA-binding protein
  misc_feature (61)..(164): Homolog of NCBI NO: 14719326 NR Description: putative pumilio/Mpt5 family RNA-binding protein
  misc_feature (171)..(954): Homolog of NCBI NO: 6056191 NR Description: putative RNA binding protein [Arabidopsis
MHRGNEDSSFGDDYEKEIGVLLGEQQRRQVEADELERELNLFRSGSAPPTVDGSVSAAGGLFSGGGGAPFLEFGGVNKGNGFGGDDEEFRKDPAYLSYYYANMKLNPRLPPPLMSREDLRVAQRLKGSNNVLGGVGDRRKVNDNRSLFSMPPGFEGEKTGASASEWDANGLIGLPGLGLGGKQKSFADIFQADMGHGHPVAQQPSRPASRNTFDENVDSNNNLSPSASQGIGAPSPYSYAAVLGSSLSRNGTPDPQAIARVPSPCLTPIGSGRMSSNDKRNTSNQSPFNGVTSGLNESSDLVNALSGLNLSCSVGLDDRSQAEQDVEKVRNYMFGLQGGHNEVNQHEFPNKSDQAHKATGSLRNSQLRGPHGSAYNGGVGLANPYQQLDSPNYCLNNYALNPAVASMMANQLGNNNFAPMYDNVSALGFSGMDSRHHGRGFVSSGQNLSESRNLGRFSNRMMGGGAGLQSHMVDPMYNQYADSLDLLNDPSMDRNFMGGSSYMDMLELQRAYLGAQKSQYGVPYKSGSPNSHSYYGSPTFGSNMSYPGSPLAHHGMPNSLMSPYSPMRRDEVNMRFPSATRNYSGGLMGSWHMDASFDEGFGSSMLEEFKSNKTRGFELSEIAGHVVEFSSDQYGSRFIQQKLETATTDEKNMVYEEIMPQALVLMTDVFGNYVIQKFFEHGLPPQRRELAEKLFDHVLPLSLQMYGCRVIQKAIEVVDLDQKIKMVKELDGHVMRCVRDQNGNHVVQKCIECVPEENIEFIISTFFGHVVTLSTHPYGCRVIQRVLEHCHDPDTQSKVMEEILSTVSMLAQDQYGNYVVQHVLEHGKPDERTVIIKELAGKIVQMSQQKFASNVVEKCLTFGGPEERELLVNEMLGTTDENEPLQAMMKDQFANYVVQKVLETCDDQQRELILTRIKVHLTALKKYTYGKHVVARIEKLVAAGERRMALQSLTQPQMA

SEQ ID NO: 70461 - protein, 857 aa, Arabidopsis thaliana
  peptide (1)..(857): Ceres Seq. ID no. 2708204
  misc_feature (663)..(698): Pfam Name: Pumilio-family RNA binding repeat Pfam Description: Pumilio-family RNA binding repeat
  misc_feature (296)..(849): Homolog of NCBI NO: 20513851 NR Description: BPM [Hordeum vulgare]
  misc_feature (107)..(254): Homolog of NCBI NO: 20513851 NR Description: BPM [Hordeum vulgare]
  misc_feature (1)..(20): Homolog of NCBI NO: 20513851 NR Description: BPM [Hordeum vulgare]
  misc_feature (71)..(850): Homolog of NCBI NO: 34908236 NR Description: putative pumilio/Mpt5 family RNA-binding protein
  misc_feature (69)..(850): Homolog of NCBI NO: 22330960 NR Description: pumilio-family RNA-binding protein, putative;
  misc_feature (1)..(56): Homolog of NCBI NO: 22330960 NR Description: pumilio-family RNA-binding protein, putative;
  misc_feature (233)..(849): Homolog of NCBI NO: 14719326 NR Description: putative pumilio/Mpt5 family RNA-binding protein
  misc_feature (1)..(62): Homolog of NCBI NO: 14719326 NR Description: putative pumilio/Mpt5 family RNA-binding protein
  misc_feature (69)..(852): Homolog of NCBI NO: 6056191 NR Description: putative RNA binding protein [Arabidopsis
  misc_feature (1)..(56): Homolog of NCBI NO: 6056191 NR Description: putative RNA binding protein [Arabidopsis
MKLNPRLPPPLMSREDLRVAQRLKGSNNVLGGVGDRRKVNDNRSLFSMPPGFEGEKTGASASEWDANGLIGLPGLGLGGKQKSFADIFQADMGHGHPVAQQPSRPASRNTFDENVDSNNNLSPSASQGIGAPSPYSYAAVLGSSLSRNGTPDPQAIARVPSPCLTPIGSGRMSSNDKRNTSNQSPFNGVTSGLNESSDLVNALSGLNLSCSVGLDDRSQAEQDVEKVRNYMFGLQGGHNEVNQHEFPNKSDQAHKATGSLRNSQLRGPHGSAYNGGVGLANPYQQLDSPNYCLNNYALNPAVASMMANQLGNNNFAPMYDNVSALGFSGMDSRHHGRGFVSSGQNLSESRNLGRFSNRMMGGGAGLQSHMVDPMYNQYADSLDLLNDPSMDRNFMGGSSYMDMLELQRAYLGAQKSQYGVPYKSGSPNSHSYYGSPTFGSNMSYPGSPLAHHGMPNSLMSPYSPMRRDEVNMRFPSATRNYSGGLMGSWHMDASFDEGFGSSMLEEFKSNKTRGFELSEIAGHVVEFSSDQYGSRFIQQKLETATTDEKNMVYEEIMPQALVLMTDVFGNYVIQKFFEHGLPPQRRELAEKLFDHVLPLSLQMYGCRVIQKAIEVVDLDQKIKMVKELDGHVMRCVRDQNGNHVVQKCIECVPEENIEFIISTFFGHVVTLSTHPYGCRVIQRVLEHCHDPDTQSKVMEEILSTVSMLAQDQYGNYVVQHVLEHGKPDERTVIIKELAGKIVQMSQQKFASNVVEKCLTFGGPEERELLVNEMLGTTDENEPLQAMMKDQFANYVVQKVLETCDDQQRELILTRIKVHLTALKKYTYGKHVVARIEKLVAAGERRMALQSLTQPQMA

SEQ ID NO: 70462 - DNA, 1077 bp, Arabidopsis thaliana
  misc_feature (1)..(1077): Ceres Seq. ID no. 2708379
  misc_feature: MA Experiment ID: 20000496 Result: Down-regulated in Transcription
  misc_feature: MA Experiment 20000496 PARAMETER Experiment Name: At_Guard_Cells_P Parameter: Harvest Date Value: 7/19/2002
  misc_feature: MA Experiment 20000496 PARAMETER Experiment Name: At_Guard_Cells_P Parameter: Organism Value: Canola
  misc_feature: MA Experiment 20000496 PARAMETER Experiment Name: At_Guard_Cells_P Parameter: Tissue Value: Guard Cells vs. Leaves
atggcgggcaactatgatcgtgctggtgaggtaaaagcattcgaccagatgaagatcggcgtgaagggtcttgtcgacgccggaatcacaaaagttcctcgcattttccatcaccaagatgtggccgttacaaaccctaaaccttcctcaacgttagaaattccaacaatcgatgttggaggtggcgtgttcgagtccacggtcacgcgaaagagcgtgatcgcgaaagtgagagctgcggttgagaagttcgggttctttcaggtgattaaccatgggattccactcgaggtgatggagagtatgaaagatgggattcgtgggtttcatgagcaggactcagaagttaagaaaacgttctatagtcgtgacatcactaaaaaggttaagtataacactaatttcgatctctatagctctcaagctgcgaattggagagatactttaactatggttatggctcctgatgttccacaagcaggggacttacccgtgatttgtcgagaaatcatgttggagtactccaagcgaatgatgaagttaggggagctaatctttgagcttttatcagaagctcttggtttaaaacctaaccaccttaaagagctaaattgcgcaaagagtttgtcgttgctctcccattactacccgccttgtccagagcctgaccgaacctttggtatcagttcacatacagatatctcttttatcactattcttcttcaagaccacattggaggacttcaagttctccatgatggttactggatcgatgttcctcctaatcccgaagctctaatcgttaaccttggagatcttttacagcttataacaaacgataagtttgtaagtgtggagcacagggttttggcaaatagaggcgaagaacctcgcatttcaagcgcatctttcttcatgcacaccataccaaatgagcaagtatatggacctatgaaagagcttctatctaaacaaaaccctcccaagtacagaaacacaaccacgaccgagatggcgaggcattacttggctagaggactcgatgggacctcaccgttgctccatttcaggatctga

SEQ ID NO: 70463 - protein, 358 aa, Arabidopsis thaliana
  peptide (1)..(358): Ceres Seq. ID no. 2708380
  misc_feature (207)..(307): Pfam Name: 2OG-Fe(II) oxygenase superfamily Pfam Description: 2OG-Fe(II) oxygenase superfamily
  misc_feature (1)..(358): Homolog of NCBI NO: 15224575 NR Description: putative dioxygenase; protein id: At2g30830.1
  misc_feature (1)..(358): Homolog of NCBI NO: 15224576 NR Description: putative dioxygenase; protein id: At2g30840.1
  misc_feature (1)..(358): Homolog of NCBI NO: 15224730 NR Description: putative dioxygenase; protein id: At2g25450.1, by cDNA: gi_15292706, supported by cDNA: gi_21280916 [Arabidopsis >gi|25285700|pir||E84648 probable dioxygenase [imported] putative
  misc_feature (6)..(358): Homolog of NCBI NO: 30679748 NR Description: 2-oxoglutarate-dependent dioxygenase, putative thaliana] >gi|30102640|gb|AAP21238.1| At1g06620 [Arabidopsis
  misc_feature (1)..(358): Homolog of NCBI NO: 15221544 NR Description: oxidoreductase, putative; protein id: supported by cDNA: gi_13430545 [Arabidopsis thaliana] putative oxidoreductase [Arabidopsis thaliana]
  misc_feature (5)..(358): Homolog of NCBI NO: 13878119 NR Description: putative oxidoreductase [Arabidopsis thaliana]
  misc_feature (5)..(358): Homolog of NCBI NO: 15221545 NR Description: oxidoreductase, putative; protein id: supported by cDNA: gi_13878118 [Arabidopsis thaliana]
  misc_feature (1)..(283): Homolog of NCBI NO: 25406927 NR Description: protein F12K11.6 [imported] - Arabidopsis >gi|6692693|gb|AAF24827.1|AC007592_20 F12K11.6 [Arabidopsis
  misc_feature (273)..(358): Homolog of NCBI NO: 25406927 NR Description: protein F12K11.6 [imported] - Arabidopsis >gi|6692693|gb|AAF24827.1|AC007592_20 F12K11.6 [Arabidopsis
  misc_feature (5)..(287): Homolog of NCBI NO: 25406927 NR Description: protein F12K11.6 [imported] - Arabidopsis >gi|6692693|gb|AAF24827.1|AC007592_20 F12K11.6 [Arabidopsis
MAGNYDRAGEVKAFDQMKIGVKGLVDAGITKVPRIFHHQDVAVTNPKPSSTLEIPTIDVGGGVFESTVTRKSVIAKVRAAVEKFGFFQVINHGIPLEVMESMKDGIRGFHEQDSEVKKTFYSRDITKKVKYNTNFDLYSSQAANWRDTLTMVMAPDVPQAGDLPVICREIMLEYSKRMMKLGELIFELLSEALGLKPNHLKELNCAKSLSLLSHYYPPCPEPDRTFGISSHTDISFITILLQDHIGGLQVLHDGYWIDVPPNPEALIVNLGDLLQLITNDKFVSVEHRVLANRGEEPRISSASFFMHTIPNEQVYGPMKELLSKQNPPKYRNTTTTEMARHYLARGLDGTSPLLHFRI

SEQ ID NO: 70464 - protein, 342 aa, Arabidopsis thaliana
  peptide (1)..(342): Ceres Seq. ID no. 2708381
  misc_feature (191)..(291): Pfam Name: 2OG-Fe(II) oxygenase superfamily Pfam Description: 2OG-Fe(II) oxygenase superfamily
  misc_feature (1)..(342): Homolog of NCBI NO: 15224575 NR Description: putative dioxygenase; protein id: At2g30830.1
  misc_feature (1)..(342): Homolog of NCBI NO: 15224576 NR Description: putative dioxygenase; protein id: At2g30840.1
  misc_feature (1)..(342): Homolog of NCBI NO: 15224730 NR Description: putative dioxygenase; protein id: At2g25450.1, by cDNA: gi_15292706, supported by cDNA: gi_21280916 [Arabidopsis >gi|25285700|pir||E84648 probable dioxygenase [imported] putative
  misc_feature (1)..(342): Homolog of NCBI NO: 30679748 NR Description: 2-oxoglutarate-dependent dioxygenase, putative thaliana] >gi|30102640|gb|AAP21238.1| At1g06620 [Arabidopsis
  misc_feature (1)..(342): Homolog of NCBI NO: 15221544 NR Description: oxidoreductase, putative; protein id: supported by cDNA: gi_13430545 [Arabidopsis thaliana] putative oxidoreductase [Arabidopsis thaliana]
  misc_feature (1)..(342): Homolog of NCBI NO: 13878119 NR Description: putative oxidoreductase [Arabidopsis thaliana]
  misc_feature (1)..(342): Homolog of NCBI NO: 15221545 NR Description: oxidoreductase, putative; protein id: supported by cDNA: gi_13878118 [Arabidopsis thaliana]
  misc_feature (1)..(267): Homolog of NCBI NO: 25406927 NR Description: protein F12K11.6 [imported] - Arabidopsis >gi|6692693|gb|AAF24827.1|AC007592_20 F12K11.6 [Arabidopsis
  misc_feature (257)..(342): Homolog of NCBI NO: 25406927 NR Description: protein F12K11.6 [imported] - Arabidopsis >gi|6692693|gb|AAF24827.1|AC007592_20 F12K11.6 [Arabidopsis
  misc_feature (1)..(271): Homolog of NCBI NO: 25406927 NR Description: protein F12K11.6 [imported] - Arabidopsis >gi|6692693|gb|AAF24827.1|AC007592_20 F12K11.6 [Arabidopsis
MKIGVKGLVDAGITKVPRIFHHQDVAVTNPKPSSTLEIPTIDVGGGVFESTVTRKSVIAKVRAAVEKFGFFQVINHGIPLEVMESMKDGIRGFHEQDSEVKKTFYSRDITKKVKYNTNFDLYSSQAANWRDTLTMVMAPDVPQAGDLPVICREIMLEYSKRMMKLGELIFELLSEALGLKPNHLKELNCAKSLSLLSHYYPPCPEPDRTFGISSHTDISFITILLQDHIGGLQVLHDGYWIDVPPNPEALIVNLGDLLQLITNDKFVSVEHRVLANRGEEPRISSASFFMHTIPNEQVYGPMKELLSKQNPPKYRNTTTTEMARHYLARGLDGTSPLLHFRI

SEQ ID NO: 70465 - protein, 260 aa, Arabidopsis thaliana
  peptide (1)..(260): Ceres Seq. ID no. 2708382
  misc_feature (109)..(209): Pfam Name: 2OG-Fe(II) oxygenase superfamily Pfam Description: 2OG-Fe(II) oxygenase superfamily
  misc_feature (1)..(260): Homolog of NCBI NO: 15224575 NR Description: putative dioxygenase; protein id: At2g30830.1
  misc_feature (1)..(260): Homolog of NCBI NO: 15224576 NR Description: putative dioxygenase; protein id: At2g30840.1
  misc_feature (1)..(260): Homolog of NCBI NO: 15224730 NR Description: putative dioxygenase; protein id: At2g25450.1, by cDNA: gi_15292706, supported by cDNA: gi_21280916 [Arabidopsis >gi|25285700|pir||E84648 probable dioxygenase [imported] putative
  misc_feature (1)..(260): Homolog of NCBI NO: 30679748 NR Description: 2-oxoglutarate-dependent dioxygenase, putative thaliana] >gi|30102640|gb|AAP21238.1| At1g06620 [Arabidopsis
  misc_feature (1)..(260): Homolog of NCBI NO: 15221544 NR Description: oxidoreductase, putative; protein id: supported by cDNA: gi_13430545 [Arabidopsis thaliana] putative oxidoreductase [Arabidopsis thaliana]
  misc_feature (1)..(260): Homolog of NCBI NO: 13878119 NR Description: putative oxidoreductase [Arabidopsis thaliana]
  misc_feature (1)..(260): Homolog of NCBI NO: 15221545 NR Description: oxidoreductase, putative; protein id: supported by cDNA: gi_13878118 [Arabidopsis thaliana]
  misc_feature (1)..(185): Homolog of NCBI NO: 25406927 NR Description: protein F12K11.6 [imported] - Arabidopsis >gi|6692693|gb|AAF24827.1|AC007592_20 F12K11.6 [Arabidopsis
  misc_feature (175)..(260): Homolog of NCBI NO: 25406927 NR Description: protein F12K11.6 [imported] - Arabidopsis >gi|6692693|gb|AAF24827.1|AC007592_20 F12K11.6 [Arabidopsis
  misc_feature (1)..(189): Homolog of NCBI NO: 25406927 NR Description: protein F12K11.6 [imported] - Arabidopsis >gi|6692693|gb|AAF24827.1|AC007592_20 F12K11.6 [Arabidopsis
MESMKDGIRGFHEQDSEVKKTFYSRDITKKVKYNTNFDLYSSQAANWRDTLTMVMAPDVPQAGDLPVICREIMLEYSKRMMKLGELIFELLSEALGLKPNHLKELNCAKSLSLLSHYYPPCPEPDRTFGISSHTDISFITILLQDHIGGLQVLHDGYWIDVPPNPEALIVNLGDLLQLITNDKFVSVEHRVLANRGEEPRISSASFFMHTIPNEQVYGPMKELLSKQNPPKYRNTTTTEMARHYLARGLDGTSPLLHFRI

SEQ ID NO: 70466 - DNA, 672 bp, Arabidopsis thaliana
  misc_feature (1)..(672): Ceres Seq. ID no. 2708879
  misc_feature: MA Experiment ID: 20000314 Result: Up-regulated in Transcription
  misc_feature: MA Experiment 20000314 PARAMETER Experiment Name: At_14day_Shoots-Roots_Sub_P Parameter: Age (day) Value: 14
  misc_feature: MA Experiment 20000314 PARAMETER Experiment Name: At_14day_Shoots-Roots_Sub_P Parameter: Organism Value: A. thaliana
  misc_feature: MA Experiment 20000314 PARAMETER Experiment Name: At_14day_Shoots-Roots_Sub_P Parameter: Plant Line Value: WS
  misc_feature: MA Experiment 20000314 PARAMETER Experiment Name: At_14day_Shoots-Roots_Sub_P Parameter: Tissue Value: Roots vs. Whole Plant
  misc_feature: MA Experiment ID: 20000315 Result: Down-regulated in Transcription
  misc_feature: MA Experiment 20000315 PARAMETER Experiment Name: At_14day_Shoots-Roots_Sub_P Parameter: Age (day) Value: 14
  misc_feature: MA Experiment 20000315 PARAMETER Experiment Name: At_14day_Shoots-Roots_Sub_P Parameter: Organism Value: A. thaliana
  misc_feature: MA Experiment 20000315 PARAMETER Experiment Name: At_14day_Shoots-Roots_Sub_P Parameter: Plant Line Value: WS
  misc_feature: MA Experiment 20000315 PARAMETER Experiment Name: At_14day_Shoots-Roots_Sub_P Parameter: Tissue Value: Shoots vs. Whole Plant
  misc_feature: MA Experiment ID: 20000440 Result: Down-regulated in Transcription
  misc_feature: MA Experiment 20000440 PARAMETER Experiment Name: At_Closed-Flower__Sub_P Parameter: Tissue Value: Closed Flower vs. Whole Plant
  misc_feature: Pfam Name: GST_C Pfam Description: Glutathione S-transferase, C-terminal domain
atgtcttatgttaccgatttttatcaggcgaagttgaagctctactcttactggagaagctcatgtgctcatcgcgtccgtatcgccctcactttaaaagggcttgattatgaatatataccggttaatttgctcaaaggggatcaatccgattcagatttcaagaagatcaatccaatgggcactgtaccagcgcttgttgatggtgatgttgtgattaatgactctttcgcaataataatgtacctggatgataagtatccggagccaccgctgttaccaagtgactaccataaacgggcggtaaattaccaggcgacgagtattgtcatgtctggtatacagcctcatcaaaatatggctctttttaggtatctcgaggacaagataaatgctgaggagaaaactgcttggattactaatgctatcacaaaaggattcacagctctcgagaaactgttggtgagttgcgctggaaaatacgcgactggtgatgaagtttacttggctgatcttttcctagcaccacagatccacgcagcattcaacagattccatattaacatggaaccattcccgactcttgcaaggttttacgagtcatacaacgaactgcctgcatttcaaaatgcagtcccggagaagcaaccagatactccttccaccatctga

SEQ ID NO: 70467 - protein, 223 aa, Arabidopsis thaliana
  peptide (1)..(223): Ceres Seq. ID no. 2708880
  misc_feature: Pfam Name: GST_C Pfam Description: Glutathione S-transferase, C-terminal domain
  misc_feature (1)..(223): Homolog of NCBI NO: 15226949 NR Description: glutathione transferase, putative; protein id:
  misc_feature (9)..(222): Homolog of NCBI NO: 15226952 NR Description: glutathione transferase, putative; protein id: supported by cDNA: gi_11095997, supported by cDNA: gi_15450462, by cDNA: gi_16974448 [Arabidopsis thaliana]
  misc_feature (9)..(222): Homolog of NCBI NO: 30677995 NR Description: glutathione transferase, putative [Arabidopsis
  misc_feature (11)..(222): Homolog of NCBI NO: 28932694 NR Description: glutathione S-transferase zeta [Brassica napus]
  misc_feature (9)..(222): Homolog of NCBI NO: 28932698 NR Description: glutathione S-transferase zeta [Brassica napus]
  misc_feature (1)..(221): Homolog of NCBI NO: 11132235 NR Description: Glutathione S-transferase zeta class
  misc_feature (11)..(222): Homolog of NCBI NO: 29420155 NR Description: glutathione S-transferase Z1 [Malva pusilla]
  misc_feature (11)..(221): Homolog of NCBI NO: 24061762 NR Description: glutathione S-transferase [Capsicum annuum]
MSYVTDFYQAKLKLYSYWRSSCAHRVRIALTLKGLDYEYIPVNLLKGDQSDSDFKKINPMGTVPALVDGDVVINDSFAIIMYLDDKYPEPPLLPSDYHKRAVNYQATSIVMSGIQPHQNMALFRYLEDKINAEEKTAWITNAITKGFTALEKLLVSCAGKYATGDEVYLADLFLAPQIHAAFNRFHINMEPFPTLARFYESYNELPAFQNAVPEKQPDTPSTI

SEQ ID NO: 70468 - protein, 164 aa, Arabidopsis thaliana
  peptide (1)..(164): Ceres Seq. ID no. 2708881
  misc_feature: Pfam Name: GST_C Pfam Description: Glutathione S-transferase, C-terminal domain
  misc_feature (1)..(164): Homolog of NCBI NO: 15226949 NR Description: glutathione transferase, putative; protein id:
  misc_feature (1)..(163): Homolog of NCBI NO: 15226952 NR Description: glutathione transferase, putative; protein id: supported by cDNA: gi_11095997, supported by cDNA: gi_15450462, by cDNA: gi_16974448 [Arabidopsis thaliana]
  misc_feature (1)..(163): Homolog of NCBI NO: 30677995 NR Description: glutathione transferase, putative [Arabidopsis
  misc_feature (1)..(163): Homolog of NCBI NO: 28932694 NR Description: glutathione S-transferase zeta [Brassica napus]
  misc_feature (1)..(163): Homolog of NCBI NO: 28932698 NR Description: glutathione S-transferase zeta [Brassica napus]
  misc_feature (1)..(162): Homolog of NCBI NO: 11132235 NR Description: Glutathione S-transferase zeta class
  misc_feature (1)..(163): Homolog of NCBI NO: 29420155 NR Description: glutathione S-transferase Z1 [Malva pusilla]
  misc_feature (1)..(162): Homolog of NCBI NO: 24061762 NR Description: glutathione S-transferase [Capsicum annuum]
MGTVPALVDGDVVINDSFAIIMYLDDKYPEPPLLPSDYHKRAVNYQATSIVMSGIQPHQNMALFRYLEDKINAEEKTAWITNAITKGFTALEKLLVSCAGKYATGDEVYLADLFLAPQIHAAFNRFHINMEPFPTLARFYESYNELPAFQNAVPEKQPDTPSTI

SEQ ID NO: 70469 - protein, 143 aa, Arabidopsis thaliana
  peptide (1)..(143): Ceres Seq. ID no. 2708882
  misc_feature: Pfam Name: GST_C Pfam Description: Glutathione S-transferase, C-terminal domain
  misc_feature (1)..(142): Homolog of NCBI NO: 15226952 NR Description: glutathione transferase, putative; protein id: supported by cDNA: gi_11095997, supported by cDNA: gi_15450462, by cDNA: gi_16974448 [Arabidopsis thaliana]
  misc_feature (1)..(142): Homolog of NCBI NO: 30677995 NR Description: glutathione transferase, putative [Arabidopsis
  misc_feature (1)..(142): Homolog of NCBI NO: 28932694 NR Description: glutathione S-transferase zeta [Brassica napus]
  misc_feature (1)..(142): Homolog of NCBI NO: 28932698 NR Description: glutathione S-transferase zeta [Brassica napus]
  misc_feature (1)..(141): Homolog of NCBI NO: 11132235 NR Description: Glutathione S-transferase zeta class
  misc_feature (1)..(142): Homolog of NCBI NO: 29420155 NR Description: glutathione S-transferase Z1 [Malva pusilla]
  misc_feature (1)..(141): Homolog of NCBI NO: 24061762 NR Description: glutathione S-transferase [Capsicum annuum]
  misc_feature (1)..(143): Homolog of NCBI NO: 15226949 NR Description: glutathione transferase, putative; protein id:
MYLDDKYPEPPLLPSDYHKRAVNYQATSIVMSGIQPHQNMALFRYLEDKINAEEKTAWITNAITKGFTALEKLLVSCAGKYATGDEVYLADLFLAPQIHAAFNRFHINMEPFPTLARFYESYNELPAFQNAVPEKQPDTPSTI

SEQ ID NO: 70470 - DNA, 2640 bp, Arabidopsis thaliana
  misc_feature (1)..(2640): Ceres Seq. ID no. 2708977
  misc_feature: MA Experiment ID: 20000439 Result: Up-regulated in Transcription
  misc_feature: MA Experiment 20000439 PARAMETER Experiment Name: At_Roots__P Parameter: Age (day) Value: 14 vs. 21
  misc_feature: MA Experiment 20000439 PARAMETER Experiment Name: At_Roots__P Parameter: Organism Value: A. thaliana
  misc_feature: MA Experiment 20000439 PARAMETER Experiment Name: At_Roots__P Parameter: Tissue Value: Roots vs. Whole Plant
  misc_feature: MA Experiment ID: 20000460 Result: Down-regulated in Transcription
  misc_feature: MA Experiment 20000460 PARAMETER Experiment Name: At_10percent_PEG_P Parameter: Age (day) Value: 12
  misc_feature: MA Experiment 20000460 PARAMETER Experiment Name: At_10percent_PEG_P Parameter: Organism Value: A. thaliana
  misc_feature: MA Experiment 20000460 PARAMETER Experiment Name: At_10percent_PEG_P Parameter: Plant Line Value: WS
  misc_feature: MA Experiment 20000460 PARAMETER Experiment Name: At_10percent_PEG_P Parameter: Timepoint (day) Value: 12
  misc_feature: MA Experiment 20000460 PARAMETER Experiment Name: At_10percent_PEG_P Parameter: Tissue Value: Whole Plant
  misc_feature: MA Experiment 20000460 PARAMETER Experiment Name: At_10percent_PEG_P Parameter: Treatment Value: 10percent PEG vs. No Treatment
  misc_feature: Pfam Name: Pkinase Pfam Description: Protein kinase domain
atggaaggtcgtcgtcaacgtttactggtgttcatctttggggctttggccattacacatcttgttcaagctcagccgcctgatcaacgaggattcatcagtttggattgcggtttacccgttaatgagtctccttataccgacccacgaaccggattaacattctcatctgatgctgattttattttaagtggtttacgtggtgaagctggggatgataacacatatatctacaggcagtacaaggatttgagatattttcccgatggaatacgaaactgctataatctgaaagtagagcaaggcatcaactatttgataagagcagggttcggatatggaaattatgatggtcttaatgtatatcccaaatttgatttacatgttgggcctaacatgtggattgcggttgatttggaattcggaaaagatcgtgagatcatttacatgacaacgtcgaacttattgcagatttgtcttgtcaaaacaggatcaactataccaatgatatcaaccttggaactacggccactaagaaatgattcatatttgactcaattcggtcccttagacctcatctaccggcgggcctatagtagcaattctaccggttttatacggtatcctgatgatatttttgatcgcaaatgggaccgatataatgaatttgaaacggatgtgaacaccaccctcaacgtgagatcctcgagtccctttcaagtaccagaagctgtaagtaggatgggaatcacgcccgaaaatgccagcttgccattgagattttacgtgtctctagatgacgacagtgacaaggttaacgtgtactttcactttgccgaaatccaagctttgaggggcaatgagactagagaattcgacattgaattggaagaagatattattcagtcagcatatagtcctacgatgttacaatcagataccaaatataacctatcacctcacaaatgtagctccgggttgtgctacttgaaactcgttagaactccaaggtcaactcttccaccgctgattagtgctattgaggctttcaaggttgtggactttccatacgctgaaacaaatccaaatgacgtcgctgctatgaaggatatcgaagcattttatggattgaagatgattagttggcaaggagatccttgtgtccctgaactattaaagtgggaagatctaaaatgcagctacacaaataagtctactcctccaagaattatttctttagatttgtcatcacgagggttaaaaggggtcattgcgcctgccttccaaaatttgaccgagcttcgaaaactagacttgtcaaataatagttttactggaggagtgcccgagtttctagccagcatgaagtcattatcgatcataaatttaaattggaatgaccttacgggtcctcttcctaaattgcttcttgatagagaaaagaatgggcttaagctaacgatccaaggaaacccaaagttgtgtaacgatgcgtcatgcaaaaataataacaatcaaacgtacattgtaccagttgttgcgtcagtagcttctgtgctcatcattatagccgtactgattctcattcttgttttcaaaaagagaaggccaacgcaagttgattcattacctacagtgcaacatgggttaccaaatagaccgtctatatttactcaaacgaaaaggttcacttattcagaggtagaagcattaacagataattttgaaagagttcttggagaaggagggtttggggtagtgtatcatggtattttaaatggtacgcaaccaatagctgttaaactactctctcaatcatcagtacaaggctataaggaattcaaagctgaggttgaacttcttttgagagtgcaccacgtcaatttggttagtttggttggatattgtgatgaagaaagcaacttggccctgctttatgagtatgcaccgaacggagacttaaaacaacatctatcagaacggggtggctctccattgaagtggtcaagtagactaaaaattgtcgtcgaaactgcgcaaggattagaatacttgcatacgggttgcaaacctccaatggtacatcgtgatgtaaaaacaacaaatatacttttagacgaacacttccaagcaaaactcgccgattttggcctttcaagatcatttccagttggaggtgaaactcatgtttcaacagctgttgctggaactcctggatatttggatcccgaatattatcgaacaaataggttgaacgaaaagagtgatgtatatagctttgggattgtattattggagatcatcacaagtcgacctgtgattcagcaaacccgagagaagccgcacatagcagcatgggtgggatacatgcttactaagggagatattgagaacgttgtggatccaagactcaatagagattatgagcctacttctgtttggaaggctcttgagatagcaatgtcttgcgtgaatccttcttcggagaaaagaccaaccatgtctcaagttactaatgaactaaagcaatgtctaacattagaaaactcaaagcgaggagtgagagaagacatgggatcaagaagttctgttgaaatgagcacaagctttacaaccgaaattaacccaaaagcacgataa

SEQ ID NO: 70471 - protein, 879 aa, Arabidopsis thaliana
  peptide (1)..(879): Ceres Seq. ID no. 2708978
  misc_feature: Pfam Name: Pkinase Pfam Description: Protein kinase domain
  misc_feature (8)..(879): Homolog of NCBI NO: 15227017 NR Description: putative receptor-like protein kinase; protein id:
  misc_feature (7)..(879): Homolog of NCBI NO: 15232537 NR Description: serine/threonine-specific protein kinase,
  misc_feature (6)..(879): Homolog of NCBI NO: 25387123 NR Description: probable protein kinase [imported] - Arabidopsis >gi|9802784|gb|AAF99853.1|AC015448_3 Putative protein kinase
  misc_feature (14)..(879): Homolog of NCBI NO: 9758831 NR Description: receptor-like protein kinase [Arabidopsis
  misc_feature (6)..(879): Homolog of NCBI NO: 25387148 NR Description: probable protein kinase [imported] - Arabidopsis >gi|9802795|gb|AAF99864.1|AC015448_14 Putative protein kinase
  misc_feature (1)..(879): Homolog of NCBI NO: 9758834 NR Description: receptor-like protein kinase [Arabidopsis
  misc_feature (31)..(879): Homolog of NCBI NO: 25387154 NR Description: protein F22G5.6 [imported] - Arabidopsis thaliana
  misc_feature (8)..(879): Homolog of NCBI NO: 15222042 NR Description: light repressible receptor protein kinase,
  misc_feature (10)..(879): Homolog of NCBI NO: 22330177 NR Description: receptor protein kinase, putative; protein id:
  misc_feature (206)..(878): Homolog of NCBI NO: 15220696 NR Description: hypothetical protein; protein id: At1g62090.1
MEGRRQRLLVFIFGALAITHLVQAQPPDQRGFISLDCGLPVNESPYTDPRTGLTFSSDADFILSGLRGEAGDDNTYIYRQYKDLRYFPDGIRNCYNLKVEQGINYLIRAGFGYGNYDGLNVYPKFDLHVGPNMWIAVDLEFGKDREIIYMTTSNLLQICLVKTGSTIPMISTLELRPLRNDSYLTQFGPLDLIYRRAYSSNSTGFIRYPDDIFDRKWDRYNEFETDVNTTLNVRSSSPFQVPEAVSRMGITPENASLPLRFYVSLDDDSDKVNVYFHFAEIQALRGNETREFDIELEEDIIQSAYSPTMLQSDTKYNLSPHKCSSGLCYLKLVRTPRSTLPPLISAIEAFKVVDFPYAETNPNDVAAMKDIEAFYGLKMISWQGDPCVPELLKWEDLKCSYTNKSTPPRIISLDLSSRGLKGVIAPAFQNLTELRKLDLSNNSFTGGVPEFLASMKSLSIINLNWNDLTGPLPKLLLDREKNGLKLTIQGNPKLCNDASCKNNNNQTYIVPVVASVASVLIIIAVLILILVFKKRRPTQVDSLPTVQHGLPNRPSIFTQTKRFTYSEVEALTDNFERVLGEGGFGVVYHGILNGTQPIAVKLLSQSSVQGYKEFKAEVELLLRVHHVNLVSLVGYCDEESNLALLYEYAPNGDLKQHLSERGGSPLKWSSRLKIVVETAQGLEYLHTGCKPPMVHRDVKTTNILLDEHFQAKLADFGLSRSFPVGGETHVSTAVAGTPGYLDPEYYRTNRLNEKSDVYSFGIVLLEIITSRPVIQQTREKPHIAAWVGYMLTKGDIENVVDPRLNRDYEPTSVWKALEIAMSCVNPSSEKRPTMSQVTNELKQCLTLENSKRGVREDMGSRSSVEMSTSFTTEINPKAR

SEQ ID NO: 70472 - protein, 747 aa, Arabidopsis thaliana
  peptide (1)..(747): Ceres Seq. ID no. 2708979
  misc_feature: Pfam Name: Pkinase Pfam Description: Protein kinase domain
  misc_feature (1)..(747): Homolog of NCBI NO: 15227017 NR Description: putative receptor-like protein kinase; protein id:
  misc_feature (1)..(747): Homolog of NCBI NO: 15232537 NR Description: serine/threonine-specific protein kinase,
  misc_feature (1)..(747): Homolog of NCBI NO: 25387123 NR Description: probable protein kinase [imported] - Arabidopsis >gi|9802784|gb|AAF99853.1|AC015448_3 Putative protein kinase
  misc_feature (1)..(747): Homolog of NCBI NO: 9758831 NR Description: receptor-like protein kinase [Arabidopsis
  misc_feature (1)..(747): Homolog of NCBI NO: 25387148 NR Description: probable protein kinase [imported] - Arabidopsis >gi|9802795|gb|AAF99864.1|AC015448_14 Putative protein kinase
  misc_feature (1)..(747): Homolog of NCBI NO: 9758834 NR Description: receptor-like protein kinase [Arabidopsis
  misc_feature (1)..(747): Homolog of NCBI NO: 25387154 NR Description: protein F22G5.6 [imported] - Arabidopsis thaliana
  misc_feature (1)..(747): Homolog of NCBI NO: 15222042 NR Description: light repressible receptor protein kinase,
  misc_feature (1)..(747): Homolog of NCBI NO: 22330177 NR Description: receptor protein kinase, putative; protein id:
  misc_feature (74)..(746): Homolog of NCBI NO: 15220696 NR Description: hypothetical protein; protein id: At1g62090.1
MWIAVDLEFGKDREIIYMTTSNLLQICLVKTGSTIPMISTLELRPLRNDSYLTQFGPLDLIYRRAYSSNSTGFIRYPDDIFDRKWDRYNEFETDVNTTLNVRSSSPFQVPEAVSRMGITPENASLPLRFYVSLDDDSDKVNVYFHFAEIQALRGNETREFDIELEEDIIQSAYSPTMLQSDTKYNLSPHKCSSGLCYLKLVRTPRSTLPPLISAIEAFKVVDFPYAETNPNDVAAMKDIEAFYGLKMISWQGDPCVPELLKWEDLKCSYTNKSTPPRIISLDLSSRGLKGVIAPAFQNLTELRKLDLSNNSFTGGVPEFLASMKSLSIINLNWNDLTGPLPKLLLDREKNGLKLTIQGNPKLCNDASCKNNNNQTYIVPVVASVASVLIIIAVLILILVFKKRRPTQVDSLPTVQHGLPNRPSIFTQTKRFTYSEVEALTDNFERVLGEGGFGVVYHGILNGTQPIAVKLLSQSSVQGYKEFKAEVELLLRVHHVNLVSLVGYCDEESNLALLYEYAPNGDLKQHLSERGGSPLKWSSRLKIVVETAQGLEYLHTGCKPPMVHRDVKTTNILLDEHFQAKLADFGLSRSFPVGGETHVSTAVAGTPGYLDPEYYRTNRLNEKSDVYSFGIVLLEIITSRPVIQQTREKPHIAAWVGYMLTKGDIENVVDPRLNRDYEPTSVWKALEIAMSCVNPSSEKRPTMSQVTNELKQCLTLENSKRGVREDMGSRSSVEMSTSFTTEINPKAR

SEQ ID NO: 70473 - protein, 730 aa, Arabidopsis thaliana
  peptide (1)..(730): Ceres Seq. ID no. 2708980
  misc_feature: Pfam Name: Pkinase Pfam Description: Protein kinase domain
  misc_feature (1)..(730): Homolog of NCBI NO: 15227017 NR Description: putative receptor-like protein kinase; protein id:
  misc_feature (1)..(730): Homolog of NCBI NO: 15232537 NR Description: serine/threonine-specific protein kinase,
  misc_feature (1)..(730): Homolog of NCBI NO: 25387123 NR Description: probable protein kinase [imported] - Arabidopsis >gi|9802784|gb|AAF99853.1|AC015448_3 Putative protein kinase
  misc_feature (1)..(730): Homolog of NCBI NO: 9758831 NR Description: receptor-like protein kinase [Arabidopsis
  misc_feature (1)..(730): Homolog of NCBI NO: 25387148 NR Description: probable protein kinase [imported] - Arabidopsis >gi|9802795|gb|AAF99864.1|AC015448_14 Putative protein kinase
  misc_feature (1)..(730): Homolog of NCBI NO: 9758834 NR Description: receptor-like protein kinase [Arabidopsis
  misc_feature (1)..(730): Homolog of NCBI NO: 25387154 NR Description: protein F22G5.6 [imported] - Arabidopsis thaliana
  misc_feature (1)..(730): Homolog of NCBI NO: 15222042 NR Description: light repressible receptor protein kinase,
  misc_feature (1)..(730): Homolog of NCBI NO: 22330177 NR Description: receptor protein kinase, putative; protein id:
  misc_feature (57)..(729): Homolog of NCBI NO: 15220696 NR Description: hypothetical protein; protein id: At1g62090.1
MTTSNLLQICLVKTGSTIPMISTLELRPLRNDSYLTQFGPLDLIYRRAYSSNSTGFIRYPDDIFDRKWDRYNEFETDVNTTLNVRSSSPFQVPEAVSRMGITPENASLPLRFYVSLDDDSDKVNVYFHFAEIQALRGNETREFDIELEEDIIQSAYSPTMLQSDTKYNLSPHKCSSGLCYLKLVRTPRSTLPPLISAIEAFKVVDFPYAETNPNDVAAMKDIEAFYGLKMISWQGDPCVPELLKWEDLKCSYTNKSTPPRIISLDLSSRGLKGVIAPAFQNLTELRKLDLSNNSFTGGVPEFLASMKSLSIINLNWNDLTGPLPKLLLDREKNGLKLTIQGNPKLCNDASCKNNNNQTYIVPVVASVASVLIIIAVLILILVFKKRRPTQVDSLPTVQHGLPNRPSIFTQTKRFTYSEVEALTDNFERVLGEGGFGVVYHGILNGTQPIAVKLLSQSSVQGYKEFKAEVELLLRVHHVNLVSLVGYCDEESNLALLYEYAPNGDLKQHLSERGGSPLKWSSRLKIVVETAQGLEYLHTGCKPPMVHRDVKTTNILLDEHFQAKLADFGLSRSFPVGGETHVSTAVAGTPGYLDPEYYRTNRLNEKSDVYSFGIVLLEIITSRPVIQQTREKPHIAAWVGYMLTKGDIENVVDPRLNRDYEPTSVWKALEIAMSCVNPSSEKRPTMSQVTNELKQCLTLENSKRGVREDMGSRSSVEMSTSFTTEINPKAR

SEQ ID NO: 70474 - DNA, 1134 bp, Arabidopsis thaliana
  misc_feature (1)..(1134): Ceres Seq. ID no. 2709140
  misc_feature: MA Experiment ID: 20000234 Result: Up-regulated in Transcription
  misc_feature: MA Experiment 20000234 PARAMETER Experiment Name: At_Siliques_P Parameter: Age (day) Value: 21
  misc_feature: MA Experiment 20000234 PARAMETER Experiment Name: At_Siliques_P Parameter: Organism Value: A. thaliana
  misc_feature: MA Experiment 20000234 PARAMETER Experiment Name: At_Siliques_P Parameter: Plant Line Value: WS
  misc_feature: MA Experiment 20000234 PARAMETER Experiment Name: At_Siliques_P Parameter: Tissue Value: Less Than 5mm Siliques vs. Whole Plant
  misc_feature: MA Experiment ID: 20000265 Result: Up-regulated in Transcription
  misc_feature: MA Experiment 20000265 PARAMETER Experiment Name: At_Open_Flower_P Parameter: Age (day) Value: 21
  misc_feature: MA Experiment 20000265 PARAMETER Experiment Name: At_Open_Flower_P Parameter: Plant Line Value: WS
  misc_feature: MA Experiment 20000265 PARAMETER Experiment Name: At_Open_Flower_P Parameter: Tissue Value: Closed Flower vs. Whole Plant
  misc_feature: MA Experiment ID: 20000286 Result: Up-regulated in Transcription
  misc_feature: MA Experiment 20000286 PARAMETER Experiment Name: At_Open_Flower_P Parameter: Age (day) Value: 21
  misc_feature: MA Experiment 20000286 PARAMETER Experiment Name: At_Open_Flower_P Parameter: Plant Line Value: WS
  misc_feature: MA Experiment 20000286 PARAMETER Experiment Name: At_Open_Flower_P Parameter: Tissue Value: Half Open vs. Whole Plant
  misc_feature: MA Experiment ID: 20000439 Result: Up-regulated in Transcription
  misc_feature: MA Experiment 20000439 PARAMETER Experiment Name: At_Roots__P Parameter: Age (day) Value: 14 vs. 21
  misc_feature: MA Experiment 20000439 PARAMETER Experiment Name: At_Roots__P Parameter: Organism Value: A. thaliana
  misc_feature: MA Experiment 20000439 PARAMETER Experiment Name: At_Roots__P Parameter: Tissue Value: Roots vs. Whole Plant
  misc_feature: MA Experiment ID: 20001451 Result: Down-regulated in Transcription
  misc_feature: MA Experiment 20001451 PARAMETER Experiment Name: At_Far-red-induction_P Parameter: Age (day) Value: 7
  misc_feature: MA Experiment 20001451 PARAMETER Experiment Name: At_Far-red-induction_P Parameter: Light Value: Far-red vs. White
  misc_feature: MA Experiment 20001451 PARAMETER Experiment Name: At_Far-red-induction_P Parameter: Organism Value: A. thaliana
  misc_feature: MA Experiment 20001451 PARAMETER Experiment Name: At_Far-red-induction_P Parameter: Plant Line Value: Columbia
  misc_feature: MA Experiment 20001451 PARAMETER Experiment Name: At_Far-red-induction_P Parameter: Timepoint (hr) Value: 24
  misc_feature: MA Experiment 20001451 PARAMETER Experiment Name: At_Far-red-induction_P Parameter: Tissue Value: Whole Plant
atggaagacgacaagaagaagaagagaaacaagaaaaagaagaataagcagaataataaacgtgttgacgacgctttagcttctggtgcaacgacctccgtcgatgaaaatcatatcggagatggtgacgttcctcaaattagcggaggtccagatgccgatgagtcgcaatcatctcatcagatcgatgtcgtcgcaactgaagatgattctggtgttgagaacaagtctcagggaagtgaggtgctgttggaagaaacaattaaacagttacgtgaggaaaatggttcctaccttcagaaagaggaaaagttggaggaaagacttgtgcagtataaaaacaagaacgacatgcttcttcgtgaaatgtctagcacagaagcccagatgagacaattgctagatgaaagatctaccttcactcagaaagaggcgagtctagaaaagaaagttcaacaacttcaacacgatgaagaatccttggtggctgaggagaagtcatccagagaaatgatatctagccttaacaatgaaattgcaaggctgcgagcacaggttacggagttggaaaaatctaagagtaatcttctagagcagaatcagagtcttaaggaaactatatccaatcttcaagtccagcatgaaaaccatgatagtaacgcaaagggtgcttctgaggaagaattaaactcacagattgaagcagcttgtactctagttgaaaagcttatcactgaaaatgctgatctagttgaaaaggtgaacgaattgtgtattaagctaaaccaatcacagcatgcttcccctgagagcctagcaattgaagtagagaaatctgaatccttagaagaaatacccatacacgacgagttgattagaattgataactctagggacatggatactgcatcaataaagagaaacttttcagaaggtgaaatagaagaaacggtgccgctctctctgaacgcgaatggggaagtagacgtggaatcacaggttgcagtagctggagaagacgaaataaatgctggtgtgcctctggcggacgctccacttatcggtgctccattcaggctcgtctcgtttgtagcaagatacgtgagtggtgcagatttggcggcaaagaaatag

SEQ ID NO: 70475 - protein, 377 aa, Arabidopsis thaliana
  peptide (1)..(377): Ceres Seq. ID no. 2709141
  misc_feature (71)..(284): Pfam Name: Myosin tail Pfam Description: Myosin tail
  misc_feature (1)..(377): Homolog of NCBI NO: 15224904 NR Description: hypothetical protein; protein id: At2g38580.1
  misc_feature (54)..(352): Homolog of NCBI NO: 13936996 NR Description: ORF73 [Human herpesvirus 8]
  misc_feature (52)..(352): Homolog of NCBI NO: 2246532 NR Description: ORF 73, contains large complex repeat CR 73
  misc_feature (54)..(352): Homolog of NCBI NO: 11037008 NR Description: latent nuclear antigen [Human herpesvirus 8]
  misc_feature (45)..(348): Homolog of NCBI NO: 13936996 NR Description: ORF73 [Human herpesvirus 8]
  misc_feature (54)..(348): Homolog of NCBI NO: 2246532 NR Description: ORF 73, contains large complex repeat CR 73
  misc_feature (2)..(352): Homolog of NCBI NO: 5669894 NR Description: latent nuclear antigen [Human herpesvirus 8]
  misc_feature (45)..(348): Homolog of NCBI NO: 11037008 NR Description: latent nuclear antigen [Human herpesvirus 8]
  misc_feature (51)..(352): Homolog of NCBI NO: 9886896 NR Description: Orf73 [Human herpesvirus 8]
  misc_feature (2)..(350): Homolog of NCBI NO: 18846043 NR Description: ORF 73; extensive acidic domains, potential zipper; immediate early protein homolog [Human herpesvirus 8]
MEDDKKKKRNKKKKNKQNNKRVDDALASGATTSVDENHIGDGDVPQISGGPDADESQSSHQIDVVATEDDSGVENKSQGSEVLLEETIKQLREENGSYLQKEEKLEERLVQYKNKNDMLLREMSSTEAQMRQLLDERSTFTQKEASLEKKVQQLQHDEESLVAEEKSSREMISSLNNEIARLRAQVTELEKSKSNLLEQNQSLKETISNLQVQHENHDSNAKGASEEELNSQIEAACTLVEKLITENADLVEKVNELCIKLNQSQHASPESLAIEVEKSESLEEIPIHDELIRIDNSRDMDTASIKRNFSEGEIEETVPLSLNANGEVDVESQVAVAGEDEINAGVPLADAPLIGAPFRLVSFVARYVSGADLAAKK

SEQ ID NO: 70476 - protein, 260 aa, Arabidopsis thaliana
  peptide (1)..(260): Ceres Seq. ID no. 2709142
  misc_feature (1)..(167): Pfam Name: Myosin tail Pfam Description: Myosin tail
  misc_feature (1)..(260): Homolog of NCBI NO: 15224904 NR Description: hypothetical protein; protein id: At2g38580.1
  misc_feature (1)..(235): Homolog of NCBI NO: 13936996 NR Description: ORF73 [Human herpesvirus 8]
  misc_feature (1)..(235): Homolog of NCBI NO: 2246532 NR Description: ORF 73, contains large complex repeat CR 73
  misc_feature (1)..(235): Homolog of NCBI NO: 11037008 NR Description: latent nuclear antigen [Human herpesvirus 8]
  misc_feature (1)..(231): Homolog of NCBI NO: 13936996 NR Description: ORF73 [Human herpesvirus 8]
  misc_feature (1)..(231): Homolog of NCBI NO: 2246532 NR Description: ORF 73, contains large complex repeat CR 73
  misc_feature (1)..(235): Homolog of NCBI NO: 5669894 NR Description: latent nuclear antigen [Human herpesvirus 8]
  misc_feature (1)..(231): Homolog of NCBI NO: 11037008 NR Description: latent nuclear antigen [Human herpesvirus 8]
  misc_feature (1)..(235): Homolog of NCBI NO: 9886896 NR Description: Orf73 [Human herpesvirus 8]
  misc_feature (1)..(233): Homolog of NCBI NO: 18846043 NR Description: ORF 73; extensive acidic domains, potential zipper; immediate early protein homolog [Human herpesvirus 8]
MLLREMSSTEAQMRQLLDERSTFTQKEASLEKKVQQLQHDEESLVAEEKSSREMISSLNNEIARLRAQVTELEKSKSNLLEQNQSLKETISNLQVQHENHDSNAKGASEEELNSQIEAACTLVEKLITENADLVEKVNELCIKLNQSQHASPESLAIEVEKSESLEEIPIHDELIRIDNSRDMDTASIKRNFSEGEIEETVPLSLNANGEVDVESQVAVAGEDEINAGVPLADAPLIGAPFRLVSFVARYVSGADLAAKK

SEQ ID NO: 70477 - protein, 255 aa, Arabidopsis thaliana
  peptide (1)..(255): Ceres Seq. ID no. 2709143
  misc_feature (1)..(162): Pfam Name: Myosin tail Pfam Description: Myosin tail
  misc_feature (1)..(255): Homolog of NCBI NO: 15224904 NR Description: hypothetical protein; protein id: At2g38580.1
  misc_feature (1)..(230): Homolog of NCBI NO: 13936996 NR Description: ORF73 [Human herpesvirus 8]
  misc_feature (1)..(230): Homolog of NCBI NO: 2246532 NR Description: ORF 73, contains large complex repeat CR 73
  misc_feature (1)..(230): Homolog of NCBI NO: 11037008 NR Description: latent nuclear antigen [Human herpesvirus 8]
  misc_feature (1)..(226): Homolog of NCBI NO: 13936996 NR Description: ORF73 [Human herpesvirus 8]
  misc_feature (1)..(226): Homolog of NCBI NO: 2246532 NR Description: ORF 73, contains large complex repeat CR 73
  misc_feature (1)..(230): Homolog of NCBI NO: 5669894 NR Description: latent nuclear antigen [Human herpesvirus 8]
  misc_feature (1)..(226): Homolog of NCBI NO: 11037008 NR Description: latent nuclear antigen [Human herpesvirus 8]
  misc_feature (1)..(230): Homolog of NCBI NO: 9886896 NR Description: Orf73 [Human herpesvirus 8]
  misc_feature (1)..(228): Homolog of NCBI NO: 18846043 NR Description: ORF 73; extensive acidic domains, potential zipper; immediate early protein homolog [Human herpesvirus 8]
MSSTEAQMRQLLDERSTFTQKEASLEKKVQQLQHDEESLVAEEKSSREMISSLNNEIARLRAQVTELEKSKSNLLEQNQSLKETISNLQVQHENHDSNAKGASEEELNSQIEAACTLVEKLITENADLVEKVNELCIKLNQSQHASPESLAIEVEKSESLEEIPIHDELIRIDNSRDMDTASIKRNFSEGEIEETVPLSLNANGEVDVESQVAVAGEDEINAGVPLADAPLIGAPFRLVSFVARYVSGADLAAKK

SEQ ID NO: 70478 - DNA, 1764 bp, Arabidopsis thaliana
  misc_feature (1)..(1764): Ceres Seq. ID no. 2709167
  misc_feature: MA Experiment ID: 20000180 Result: Up-regulated in Transcription
  misc_feature: MA Experiment 20000180 PARAMETER Experiment Name: At_Germinating_Seeds_P Parameter: Age (hr) Value: 24 vs. 0
  misc_feature: MA Experiment 20000180 PARAMETER Experiment Name: At_Germinating_Seeds_P Parameter: Tissue Value: Germinating Seeds
  misc_feature: MA Experiment ID: 20000234 Result: Up-regulated in Transcription
  misc_feature: MA Experiment 20000234 PARAMETER Experiment Name: At_Siliques_P Parameter: Age (day) Value: 21
  misc_feature: MA Experiment 20000234 PARAMETER Experiment Name: At_Siliques_P Parameter: Organism Value: A. thaliana
  misc_feature: MA Experiment 20000234 PARAMETER Experiment Name: At_Siliques_P Parameter: Plant Line Value: WS
  misc_feature: MA Experiment 20000234 PARAMETER Experiment Name: At_Siliques_P Parameter: Tissue Value: Less Than 5mm Siliques vs. Whole Plant
  misc_feature: MA Experiment ID: 20000441 Result: Down-regulated in Transcription
  misc_feature: MA Experiment 20000441 PARAMETER Experiment Name: At_1uM_BR-BRZ__P Parameter: Tissue Value: Shoot Apices
  misc_feature: MA Experiment 20000441 PARAMETER Experiment Name: At_1uM_BR-BRZ__P Parameter: Treatment Value: 1uM BR vs. No Treatment
  misc_feature: MA Experiment ID: 20000443 Result: Down-regulated in Transcription
  misc_feature: MA Experiment 20000443 PARAMETER Experiment Name: At_1uM_BR-BRZ__P Parameter: Tissue Value: Shoot Apices
  misc_feature: MA Experiment 20000443 PARAMETER Experiment Name: At_1uM_BR-BRZ__P Parameter: Treatment Value: 1uM BRZ vs. No Treatment
  misc_feature: MA Experiment ID: 20000573 Result: Up-regulated in Transcription
  misc_feature: MA Experiment 20000573 PARAMETER Experiment Name: At_100uM_ABA_Mutants__P Parameter: Organism Value: A. thaliana
  misc_feature: MA Experiment 20000573 PARAMETER Experiment Name: At_100uM_ABA_Mutants__P Parameter: Plant Line Value: CS22 vs. Ler wt
  misc_feature: MA Experiment 20000573 PARAMETER Experiment Name: At_100uM_ABA_Mutants__P Parameter: Timepoint (hr) Value: N/A
  misc_feature: MA Experiment 20000573 PARAMETER Experiment Name: At_100uM_ABA_Mutants__P Parameter: Tissue Value: Whole Plant
  misc_feature: MA Experiment 20000573 PARAMETER Experiment Name: At_100uM_ABA_Mutants__P Parameter: Treatment Value: None
atgtctccgtcttcaaccactacttgcacttcccttcttgaagagttgcagatgatatgggatgagattggtgaaagttacaatgaaagagataagatgctgctagaacttgagcaggaatgtctggatatatacaataagaaggttgagaaaactcgtaagttcagagctgagttacagcgatcattagctcaagctgaagctgagattgccagcctcatgtctgcgcttggtgaaaaagtttcgtttgccaagaagaaagaaggctctttgaaggagcagatttccagtgtaaagcctgtactggaagatctactgatgaaaaaggatcgaagaaggaaagagctctctgagacactgaatcaaatagcagagatcacgtctaacatagcagggaatgattatactgttagttctggttcagaagttgatgaaagtgacttgacacaaagaaagttggatgaacttagagcagatctgcaggatcttcgaaatgaaaaggctgttcgactgcagaaagtaaactcttatatcagtgctgtccatgagctgtcagagattctgtcttttgatttctccaaggccctgaatagtgtccatagcagcttgactgagttttcaaagactcattcgaaaagcattagtaatgatactcttgctaggttcacagaacttgtaaagtctctgaaggcggagaaacatgagaggctgcttaagctacaaggtttgggaagaagcatgcaagagctgtggaacctaatggaaacacctatggatgagaggagaagatttgaccattgcagcagcttactttctagtctacctgatgatgccttgaaaaaaggatgcctcagcctagacattatccgagaggccgaagatgaagtgagaagactgaattccctgaagtccagcaaaatgaaggaattggtgtttaagaggcagtgtgaactagaagagatctgcagagggaatcatatggatatcaatagtgatgctgcaagaaagagtcttgtcgaactcattgaatctggtgatggtgatctgtctgatattcttgcaagcatagatggtcagatcgagaaggcaagagaagaagctttaagcagaaaggaaatattggacaaagttgataagtggagacacgcaaaggaggaagaaacatggcttgatgattatgaaaaggatgaaaatcgcttcagtgctgtgagaggagcacacaaaaatctaaaacgggcagaaaaagctaggagccttatcagcaaaattcctgtttttaagcagttcaacaagaaattttgggctcttcttttttcgcctaaacagttgttcaaattctctaactcgatcattgattactgcgaaaactcgaccactcattcaatggtggatgttctgaccacgaaagtgaaggcctgggagaaagaaagaggggtccccttcttatgcgataagcaaccgttattacaaacactagaagatgacattgttatccgtgctcaaagagaagaggaaaagcgtcaattccgagagcagaaacgactacaaggtcagcttgctacagagaaagaagcaaagtatggttccaagtctgcaaagaagaagccattgggacagagtcttaacacagacaatgtgactaaaactcccattggtcggcgcattggaaatacacctggacgttctgttacttctggtggcaaagattatagaggcaatgcggtgataccattgaactatgttgctcttcagaaagacgattga

SEQ ID NO: 70479 - protein, 587 aa, Arabidopsis thaliana
  peptide (1)..(587): Ceres Seq. ID no. 2709168
  misc_feature (29)..(585): Pfam Name: Microtubule associated protein (MAP65/ASE1 family) Pfam Description: Microtubule associated protein (MAP65/ASE1
  misc_feature (1)..(587): Homolog of NCBI NO: 15224935 NR Description: hypothetical protein; protein id: At2g38720.1
  misc_feature (7)..(424): Homolog of NCBI NO: 28200790 NR Description: 65kD microtubule associated protein [Daucus
  misc_feature (461)..(578): Homolog of NCBI NO: 28200790 NR Description: 65kD microtubule associated protein [Daucus
  misc_feature (7)..(424): Homolog of NCBI NO: 11558254 NR Description: microtubule-associated protein MAP65-1b
  misc_feature (461)..(587): Homolog of NCBI NO: 11558254 NR Description: microtubule-associated protein MAP65-1b
  misc_feature (7)..(424): Homolog of NCBI NO: 11558256 NR Description: microtubule-associated protein MAP65-1c
  misc_feature (461)..(587): Homolog of NCBI NO: 11558256 NR Description: microtubule-associated protein MAP65-1c
  misc_feature (2)..(424): Homolog of NCBI NO: 27357984 NR Description: Unknown protein [Oryza sativa (japonica
  misc_feature (461)..(566): Homolog of NCBI NO: 27357984 NR Description: Unknown protein [Oryza sativa (japonica
  misc_feature (7)..(424): Homolog of NCBI NO: 11558252 NR Description: microtubule-associated protein MAP65-1a
MSPSSTTTCTSLLEELQMIWDEIGESYNERDKMLLELEQECLDIYNKKVEKTRKFRAELQRSLAQAEAEIASLMSALGEKVSFAKKKEGSLKEQISSVKPVLEDLLMKKDRRRKELSETLNQIAEITSNIAGNDYTVSSGSEVDESDLTQRKLDELRADLQDLRNEKAVRLQKVNSYISAVHELSEILSFDFSKALNSVHSSLTEFSKTHSKSISNDTLARFTELVKSLKAEKHERLLKLQGLGRSMQELWNLMETPMDERRRFDHCSSLLSSLPDDALKKGCLSLDIIREAEDEVRRLNSLKSSKMKELVFKRQCELEEICRGNHMDINSDAARKSLVELIESGDGDLSDILASIDGQIEKAREEALSRKEILDKVDKWRHAKEEETWLDDYEKDENRFSAVRGAHKNLKRAEKARSLISKIPVFKQFNKKFWALLFSPKQLFKFSNSIIDYCENSTTHSMVDVLTTKVKAWEKERGVPFLCDKQPLLQTLEDDIVIRAQREEEKRQFREQKRLQGQLATEKEAKYGSKSAKKKPLGQSLNTDNVTKTPIGRRIGNTPGRSVTSGGKDYRGNAVIPLNYVALQKDD

SEQ ID NO: 70480 - protein, 570 aa, Arabidopsis thaliana
  peptide (1)..(570): Ceres Seq. ID no. 2709169
  misc_feature (12)..(568): Pfam Name: Microtubule associated protein (MAP65/ASE1 family) Pfam Description: Microtubule associated protein (MAP65/ASE1
  misc_feature (1)..(570): Homolog of NCBI NO: 15224935 NR Description: hypothetical protein; protein id: At2g38720.1
  misc_feature (1)..(407): Homolog of NCBI NO: 28200790 NR Description: 65kD microtubule associated protein [Daucus
  misc_feature (444)..(561): Homolog of NCBI NO: 28200790 NR Description: 65kD microtubule associated protein [Daucus
  misc_feature (1)..(407): Homolog of NCBI NO: 11558254 NR Description: microtubule-associated protein MAP65-1b
  misc_feature (444)..(570): Homolog of NCBI NO: 11558254 NR Description: microtubule-associated protein MAP65-1b
  misc_feature (1)..(407): Homolog of NCBI NO: 11558256 NR Description: microtubule-associated protein MAP65-1c
  misc_feature (444)..(570): Homolog of NCBI NO: 11558256 NR Description: microtubule-associated protein MAP65-1c
  misc_feature (1)..(407): Homolog of NCBI NO: 27357984 NR Description: Unknown protein [Oryza sativa (japonica
  misc_feature (444)..(549): Homolog of NCBI NO: 27357984 NR Description: Unknown protein [Oryza sativa (japonica
  misc_feature (1)..(407): Homolog of NCBI NO: 11558252 NR Description: microtubule-associated protein MAP65-1a
MIWDEIGESYNERDKMLLELEQECLDIYNKKVEKTRKFRAELQRSLAQAEAEIASLMSALGEKVSFAKKKEGSLKEQISSVKPVLEDLLMKKDRRRKELSETLNQIAEITSNIAGNDYTVSSGSEVDESDLTQRKLDELRADLQDLRNEKAVRLQKVNSYISAVHELSEILSFDFSKALNSVHSSLTEFSKTHSKSISNDTLARFTELVKSLKAEKHERLLKLQGLGRSMQELWNLMETPMDERRRFDHCSSLLSSLPDDALKKGCLSLDIIREAEDEVRRLNSLKSSKMKELVFKRQCELEEICRGNHMDINSDAARKSLVELIESGDGDLSDILASIDGQIEKAREEALSRKEILDKVDKWRHAKEEETWLDDYEKDENRFSAVRGAHKNLKRAEKARSLISKIPVFKQFNKKFWALLFSPKQLFKFSNSIIDYCENSTTHSMVDVLTTKVKAWEKERGVPFLCDKQPLLQTLEDDIVIRAQREEEKRQFREQKRLQGQLATEKEAKYGSKSAKKKPLGQSLNTDNVTKTPIGRRIGNTPGRSVTSGGKDYRGNAVIPLNYVALQKDD

SEQ ID NO: 70481 - protein, 555 aa, Arabidopsis thaliana
  peptide (1)..(555): Ceres Seq. ID no. 2709170
  misc_feature (1)..(553): Pfam Name: Microtubule associated protein (MAP65/ASE1 family) Pfam Description: Microtubule associated protein (MAP65/ASE1
  misc_feature (1)..(555): Homolog of NCBI NO: 15224935 NR Description: hypothetical protein; protein id: At2g38720.1
  misc_feature (1)..(392): Homolog of NCBI NO: 28200790 NR Description: 65kD microtubule associated protein [Daucus
  misc_feature (429)..(546): Homolog of NCBI NO: 28200790 NR Description: 65kD microtubule associated protein [Daucus
  misc_feature (1)..(392): Homolog of NCBI NO: 11558254 NR Description: microtubule-associated protein MAP65-1b
  misc_feature (429)..(555): Homolog of NCBI NO: 11558254 NR Description: microtubule-associated protein MAP65-1b
  misc_feature (1)..(392): Homolog of NCBI NO: 11558256 NR Description: microtubule-associated protein MAP65-1c
  misc_feature (429)..(555): Homolog of NCBI NO: 11558256 NR Description: microtubule-associated protein MAP65-1c
  misc_feature (1)..(392): Homolog of NCBI NO: 27357984 NR Description: Unknown protein [Oryza sativa (japonica
  misc_feature (429)..(534): Homolog of NCBI NO: 27357984 NR Description: Unknown protein [Oryza sativa (japonica
  misc_feature (1)..(392): Homolog of NCBI NO: 11558252 NR Description: microtubule-associated protein MAP65-1a
MLLELEQECLDIYNKKVEKTRKFRAELQRSLAQAEAEIASLMSALGEKVSFAKKKEGSLKEQISSVKPVLEDLLMKKDRRRKELSETLNQIAEITSNIAGNDYTVSSGSEVDESDLTQRKLDELRADLQDLRNEKAVRLQKVNSYISAVHELSEILSFDFSKALNSVHSSLTEFSKTHSKSISNDTLARFTELVKSLKAEKHERLLKLQGLGRSMQELWNLMETPMDERRRFDHCSSLLSSLPDDALKKGCLSLDIIREAEDEVRRLNSLKSSKMKELVFKRQCELEEICRGNHMDINSDAARKSLVELIESGDGDLSDILASIDGQIEKAREEALSRKEILDKVDKWRHAKEEETWLDDYEKDENRFSAVRGAHKNLKRAEKARSLISKIPVFKQFNKKFWALLFSPKQLFKFSNSIIDYCENSTTHSMVDVLTTKVKAWEKERGVPFLCDKQPLLQTLEDDIVIRAQREEEKRQFREQKRLQGQLATEKEAKYGSKSAKKKPLGQSLNTDNVTKTPIGRRIGNTPGRSVTSGGKDYRGNAVIPLNYVALQKDD

SEQ ID NO: 70482 - DNA, 1389 bp, Arabidopsis thaliana
  misc_feature (1)..(1389): Ceres Seq. ID no. 2709449
  misc_feature: MA Experiment ID: 20000173 Result: Down-regulated in Transcription
  misc_feature: MA Experiment 20000173 PARAMETER Experiment Name: At_42deg_Heat_P Parameter: Age (day) Value: 14
  misc_feature: MA Experiment 20000173 PARAMETER Experiment Name: At_42deg_Heat_P Parameter: Organism Value: A. thaliana
  misc_feature: MA Experiment 20000173 PARAMETER Experiment Name: At_42deg_Heat_P Parameter: Plant Line Value: WS
  misc_feature: MA Experiment 20000173 PARAMETER Experiment Name: At_42deg_Heat_P Parameter: Temperature (deg C) Value: 42 vs. 22
  misc_feature: MA Experiment 20000173 PARAMETER Experiment Name: At_42deg_Heat_P Parameter: Timepoint (hr) Value: 6
  misc_feature: MA Experiment 20000173 PARAMETER Experiment Name: At_42deg_Heat_P Parameter: Tissue Value: Aerial
  misc_feature: MA Experiment ID: 20000182 Result: Up-regulated in Transcription
  misc_feature: MA Experiment 20000182 PARAMETER Experiment Name: At_2mM_SA_P Parameter: Age (day) Value: 14
  misc_feature: MA Experiment 20000182 PARAMETER Experiment Name: At_2mM_SA_P Parameter: Organism Value: A. thaliana
  misc_feature: MA Experiment 20000182 PARAMETER Experiment Name: At_2mM_SA_P Parameter: Plant Line Value: WS
  misc_feature: MA Experiment 20000182 PARAMETER Experiment Name: At_2mM_SA_P Parameter: Timepoint (hr) Value: 6
  misc_feature: MA Experiment 20000182 PARAMETER Experiment Name: At_2mM_SA_P Parameter: Tissue Value: Aerial
  misc_feature: MA Experiment 20000182 PARAMETER Experiment Name: At_2mM_SA_P Parameter: Treatment Value: 2mM SA vs. No Treatment
  misc_feature: MA Experiment ID: 20000184 Result: Down-regulated in Transcription
  misc_feature: MA Experiment 20000184 PARAMETER Experiment Name: At_Shoots__P Parameter: Age (day) Value: 7
  misc_feature: MA Experiment 20000184 PARAMETER Experiment Name: At_Shoots__P Parameter: Tissue Value: Shoots vs. Whole Plant
  misc_feature: MA Experiment ID: 20000234 Result: Down-regulated in Transcription
  misc_feature: MA Experiment 20000234 PARAMETER Experiment Name: At_Siliques_P Parameter: Age (day) Value: 21
  misc_feature: MA Experiment 20000234 PARAMETER Experiment Name: At_Siliques_P Parameter: Organism Value: A. thaliana
  misc_feature: MA Experiment 20000234 PARAMETER Experiment Name: At_Siliques_P Parameter: Plant Line Value: WS
  misc_feature: MA Experiment 20000234 PARAMETER Experiment Name: At_Siliques_P Parameter: Tissue Value: Less Than 5mm Siliques vs. Whole Plant
  misc_feature: MA Experiment ID: 20000264 Result: Down-regulated in Transcription
  misc_feature: MA Experiment 20000264 PARAMETER Experiment Name: At_Open_Flower_P Parameter: Age (day) Value: 21
  misc_feature: MA Experiment 20000264 PARAMETER Experiment Name: At_Open_Flower_P Parameter: Plant Line Value: WS
  misc_feature: MA Experiment 20000264 PARAMETER Experiment Name: At_Open_Flower_P Parameter: Tissue Value: Open Flower vs. Whole Plant
  misc_feature: MA Experiment ID: 20000496 Result: Up-regulated in Transcription
  misc_feature: MA Experiment 20000496 PARAMETER Experiment Name: At_Guard_Cells_P Parameter: Harvest Date Value: 7/19/2002
  misc_feature: MA Experiment 20000496 PARAMETER Experiment Name: At_Guard_Cells_P Parameter: Organism Value: Canola
  misc_feature: MA Experiment 20000496 PARAMETER Experiment Name: At_Guard_Cells_P Parameter: Tissue Value: Guard Cells vs. Leaves
  misc_feature: MA Experiment ID: 20000794 Result: Down-regulated in Transcription
  misc_feature: MA Experiment 20000794 PARAMETER Experiment Name: At_Petals_P Parameter: Age (day) Value: 23-25 days
  misc_feature: MA Experiment 20000794 PARAMETER Experiment Name: At_Petals_P Parameter: Plant Line Value: WS
  misc_feature: MA Experiment 20000794 PARAMETER Experiment Name: At_Petals_P Parameter: Tissue Value: Petals vs. Whole plant
  misc_feature: MA Experiment ID: 20001557 Result: Down-regulated in Transcription
  misc_feature: MA Experiment 20001557 PARAMETER Experiment Name: At_Drought_Soil_Dry_P Parameter: Age (day) Value: 27
  misc_feature: MA Experiment 20001557 PARAMETER Experiment Name: At_Drought_Soil_Dry_P Parameter: Organism Value: A. thaliana
  misc_feature: MA Experiment 20001557 PARAMETER Experiment Name: At_Drought_Soil_Dry_P Parameter: Plant Line Value: WS
  misc_feature: MA Experiment 20001557 PARAMETER Experiment Name: At_Drought_Soil_Dry_P Parameter: Post Timepoint (hr) Value: 3
  misc_feature: MA Experiment 20001557 PARAMETER Experiment Name: At_Drought_Soil_Dry_P Parameter: Post-Treatment Value: Re-Water vs. No Drought
  misc_feature: MA Experiment 20001557 PARAMETER Experiment Name: At_Drought_Soil_Dry_P Parameter: Timepoint (day) Value: 13
  misc_feature: MA Experiment 20001557 PARAMETER Experiment Name: At_Drought_Soil_Dry_P Parameter: Treatment Value: Drought vs. No Drought
  misc_feature: MA Experiment ID: 20001558 Result: Down-regulated in Transcription
  misc_feature: MA Experiment 20001558 PARAMETER Experiment Name: At_Drought_Soil_Dry_P Parameter: Age (day) Value: 27
  misc_feature: MA Experiment 20001558 PARAMETER Experiment Name: At_Drought_Soil_Dry_P Parameter: Organism Value: A. thaliana
  misc_feature: MA Experiment 20001558 PARAMETER Experiment Name: At_Drought_Soil_Dry_P Parameter: Plant Line Value: WS
  misc_feature: MA Experiment 20001558 PARAMETER Experiment Name: At_Drought_Soil_Dry_P Parameter: Post Timepoint (hr) Value: 6
  misc_feature: MA Experiment 20001558 PARAMETER Experiment Name: At_Drought_Soil_Dry_P Parameter: Post-Treatment Value: Re-Water vs. No Drought
  misc_feature: MA Experiment 20001558 PARAMETER Experiment Name: At_Drought_Soil_Dry_P Parameter: Timepoint (day) Value: 13
  misc_feature: MA Experiment 20001558 PARAMETER Experiment Name: At_Drought_Soil_Dry_P Parameter: Treatment Value: Drought vs. No Drought
  misc_feature: MA Experiment ID: 20001904 Result: Down-regulated in Transcription
  misc_feature: MA Experiment 20001904 PARAMETER Experiment Name: At_Drought_Reproduction_P Parameter: Age (day) Value: 37
  misc_feature: MA Experiment 20001904 PARAMETER Experiment Name: At_Drought_Reproduction_P Parameter: Organism Value: A. thaliana
  misc_feature: MA Experiment 20001904 PARAMETER Experiment Name: At_Drought_Reproduction_P Parameter: Plant Line Value: WS
  misc_feature: MA Experiment 20001904 PARAMETER Experiment Name: At_Drought_Reproduction_P Parameter: Timepoint (day) Value: 7
  misc_feature: MA Experiment 20001904 PARAMETER Experiment Name: At_Drought_Reproduction_P Parameter: Tissue Value: Rosettes
  misc_feature: MA Experiment 20001904 PARAMETER Experiment Name: At_Drought_Reproduction_P Parameter: Treatment Value: Drought vs. No Drought
  misc_feature: MA Experiment ID: 20001905 Result: Down-regulated in Transcription
  misc_feature: MA Experiment 20001905 PARAMETER Experiment Name: At_Drought_Reproduction_P Parameter: Age (day) Value: 40
  misc_feature: MA Experiment 20001905 PARAMETER Experiment Name: At_Drought_Reproduction_P Parameter: Organism Value: A. thaliana
  misc_feature: MA Experiment 20001905 PARAMETER Experiment Name: At_Drought_Reproduction_P Parameter: Plant Line Value: WS
  misc_feature: MA Experiment 20001905 PARAMETER Experiment Name: At_Drought_Reproduction_P Parameter: Timepoint (day) Value: 10
  misc_feature: MA Experiment 20001905 PARAMETER Experiment Name: At_Drought_Reproduction_P Parameter: Tissue Value: Rosettes
  misc_feature: MA Experiment 20001905 PARAMETER Experiment Name: At_Drought_Reproduction_P Parameter: Treatment Value: Drought vs. No Drought
atgaagtgttttcacttcaccaatggcgacaagagaacaacaacaacaatcgaagaaggagtaggaggaggagacagtgttgtttcaagagcttcaagactctcatgggctcgttctctaagcgtagcatcatccaccacttcagacccaactcgccggtccgagtttgactcagactggagtttctcaccggaaagacttacttttcccaagccattaagtcaacgttggatcggtggacttgttcctgagaatgatctaaaggtgtttactttcaaagagctgaaaatagctactaaaggtttcaatagaggtcttttgattggcgaaggagggtttggttgcgtttatagaggtgttgttgatgtttcagactctaatggttttgattcgaagattaatgttgctgttaaacagcttaatcgtcaaggtttacaggggcataaggaatggatcaatgaggtgaattttctaggagtagtgaatcatccaaatcttgtgaagttagttgggtattgtgctgatgatgatgaaagagggatgcaaaggcttctagtctatgaacttatgtgtaataagagcttggaggatcatctcgtaggccgagttgtgtcggtatctctaccgtggatgatgaggttgaagattgcgcaagatgctgctcaaggcttagcttatcttcatgaagaaatggattttcagttgatatttcgagatttcaagtcttcaaacatcttgcttgatgagagattcggtgcaaagctctcggattttggattagctaggcaaggacctcctgaaggacttggtcatgtctcaacttcagttgtaggtacggttggttacgcagctcctgagtatgtacaaaccgggaaattgacggcaaagagtgatgtatggagctttggggtagtgttgtatgaactgatcacgggaagacgagcagtggatagaaatcgacctcgaggtgaacagaagcttttagaatgggtgaagccttatgtatcagactcgaagaagttccatctgattgtcgatccacggctcgaaggccagtactactgtatgaagtctgttcaaagagtagctgctttagcaaacaaatgtctaatgaagcaaccgaaatctcggcctaaaatgagcgaagtcgtatcactacttggacgcatcatcgatgaagaagcggaaaacgttcctccgccagttgctgatgaaacagaagagataatcaaagctgagctcaatggagagagtgagcctgagctaaagaagcaaggtagtagttatcgtaagaaggttcttgatcttagggataagatgaacttaaacaagtcgctttcgaagctagactggcgaaactggacaccaggactggtcagaacatggtag

SEQ ID NO: 70483 - protein, 462 aa, Arabidopsis thaliana
  peptide (1)..(462): Ceres Seq. ID no. 2709450
  misc_feature (1)..(462): Homolog of NCBI NO: 7488278 NR Description: probable protein kinase [imported] - Arabidopsis >gi|3461836|gb|AAC33222.1| putative protein kinase [Arabidopsis >gi|20197438|gb|AAM15076.1| putative protein kinase [Arabidopsis
  misc_feature (145)..(462): Homolog of NCBI NO: 30684071 NR Description: protein kinase family [Arabidopsis thaliana]
  misc_feature (1)..(461): Homolog of NCBI NO: 7248457 NR Description: protein serine/threonine kinase [Lophopyrum >gi|13022177|gb|AAK11674.1|AF339747_1 protein kinase [Lophopyrum
  misc_feature (37)..(399): Homolog of NCBI NO: 30687780 NR Description: protein kinase, putative [Arabidopsis thaliana]
  misc_feature (37)..(399): Homolog of NCBI NO: 28416693 NR Description: At2g39110 [Arabidopsis thaliana]
  misc_feature (37)..(399): Homolog of NCBI NO: 25287613 NR Description: probable protein kinase [imported] - Arabidopsis >gi|3928095|gb|AAC79621.1| putative protein kinase [Arabidopsis
  misc_feature (85)..(400): Homolog of NCBI NO: 15232764 NR Description: putative protein kinase; protein id: At3g09830.1, by cDNA: gi_20268726 [Arabidopsis thaliana] putative protein kinase [Arabidopsis thaliana]
  misc_feature (1)..(461): Homolog of NCBI NO: 37534774 NR Description: putative serine/threonine kinase [Oryza sativa
  misc_feature (84)..(435): Homolog of NCBI NO: 15242720 NR Description: putative protein; protein id: At5g03320.1
  misc_feature (51)..(430): Homolog of NCBI NO: 15238002 NR Description: protein serine threonine kinase-like; protein id:
MKCFHFTNGDKRTTTTIEEGVGGGDSVVSRASRLSWARSLSVASSTTSDPTRRSEFDSDWSFSPERLTFPKPLSQRWIGGLVPENDLKVFTFKELKIATKGFNRGLLIGEGGFGCVYRGVVDVSDSNGFDSKINVAVKQLNRQGLQGHKEWINEVNFLGVVNHPNLVKLVGYCADDDERGMQRLLVYELMCNKSLEDHLVGRVVSVSLPWMMRLKIAQDAAQGLAYLHEEMDFQLIFRDFKSSNILLDERFGAKLSDFGLARQGPPEGLGHVSTSVVGTVGYAAPEYVQTGKLTAKSDVWSFGVVLYELITGRRAVDRNRPRGEQKLLEWVKPYVSDSKKFHLIVDPRLEGQYYCMKSVQRVAALANKCLMKQPKSRPKMSEVVSLLGRIIDEEAENVPPPVADETEEIIKAELNGESEPELKKQGSSYRKKVLDLRDKMNLNKSLSKLDWRNWTPGLVRTW

SEQ ID NO: 70484 - protein, 282 aa, Arabidopsis thaliana
  peptide (1)..(282): Ceres Seq. ID no. 2709451
  misc_feature (1)..(282): Homolog of NCBI NO: 7488278 NR Description: probable protein kinase [imported] - Arabidopsis >gi|3461836|gb|AAC33222.1| putative protein kinase [Arabidopsis >gi|20197438|gb|AAM15076.1| putative protein kinase [Arabidopsis
  misc_feature (1)..(282): Homolog of NCBI NO: 30684071 NR Description: protein kinase family [Arabidopsis thaliana]
  misc_feature (1)..(281): Homolog of NCBI NO: 7248457 NR Description: protein serine/threonine kinase [Lophopyrum >gi|13022177|gb|AAK11674.1|AF339747_1 protein kinase [Lophopyrum
  misc_feature (1)..(219): Homolog of NCBI NO: 30687780 NR Description: protein kinase, putative [Arabidopsis thaliana]
  misc_feature (1)..(219): Homolog of NCBI NO: 28416693 NR Description: At2g39110 [Arabidopsis thaliana]
  misc_feature (1)..(219): Homolog of NCBI NO: 25287613 NR Description: probable protein kinase [imported] - Arabidopsis >gi|3928095|gb|AAC79621.1| putative protein kinase [Arabidopsis
  misc_feature (1)..(220): Homolog of NCBI NO: 15232764 NR Description: putative protein kinase; protein id: At3g09830.1, by cDNA: gi_20268726 [Arabidopsis thaliana] putative protein kinase [Arabidopsis thaliana]
  misc_feature (1)..(281): Homolog of NCBI NO: 37534774 NR Description: putative serine/threonine kinase [Oryza sativa
  misc_feature (1)..(255): Homolog of NCBI NO: 15242720 NR Description: putative protein; protein id: At5g03320.1
  misc_feature (1)..(250): Homolog of NCBI NO: 15238002 NR Description: protein serine threonine kinase-like; protein id:
MQRLLVYELMCNKSLEDHLVGRVVSVSLPWMMRLKIAQDAAQGLAYLHEEMDFQLIFRDFKSSNILLDERFGAKLSDFGLARQGPPEGLGHVSTSVVGTVGYAAPEYVQTGKLTAKSDVWSFGVVLYELITGRRAVDRNRPRGEQKLLEWVKPYVSDSKKFHLIVDPRLEGQYYCMKSVQRVAALANKCLMKQPKSRPKMSEVVSLLGRIIDEEAENVPPPVADETEEIIKAELNGESEPELKKQGSSYRKKVLDLRDKMNLNKSLSKLDWRNWTPGLVRTW

SEQ ID NO: 70485 - protein, 273 aa, Arabidopsis thaliana
  peptide (1)..(273): Ceres Seq. ID no. 2709452
  misc_feature (1)..(210): Homolog of NCBI NO: 25287613 NR Description: probable protein kinase [imported] - Arabidopsis >gi|3928095|gb|AAC79621.1| putative protein kinase [Arabidopsis
  misc_feature (1)..(211): Homolog of NCBI NO: 15232764 NR Description: putative protein kinase; protein id: At3g09830.1, by cDNA: gi_20268726 [Arabidopsis thaliana] putative protein kinase [Arabidopsis thaliana]
  misc_feature (1)..(272): Homolog of NCBI NO: 37534774 NR Description: putative serine/threonine kinase [Oryza sativa
  misc_feature (1)..(246): Homolog of NCBI NO: 15242720 NR Description: putative protein; protein id: At5g03320.1
  misc_feature (1)..(241): Homolog of NCBI NO: 15238002 NR Description: protein serine threonine kinase-like; protein id:
  misc_feature (1)..(273): Homolog of NCBI NO: 7488278 NR Description: probable protein kinase [imported] - Arabidopsis >gi|3461836|gb|AAC33222.1| putative protein kinase [Arabidopsis >gi|20197438|gb|AAM15076.1| putative protein kinase [Arabidopsis
  misc_feature (1)..(273): Homolog of NCBI NO: 30684071 NR Description: protein kinase family [Arabidopsis thaliana]
  misc_feature (1)..(272): Homolog of NCBI NO: 7248457 NR Description: protein serine/threonine kinase [Lophopyrum >gi|13022177|gb|AAK11674.1|AF339747_1 protein kinase [Lophopyrum
  misc_feature (1)..(210): Homolog of NCBI NO: 30687780 NR Description: protein kinase, putative [Arabidopsis thaliana]
  misc_feature (1)..(210): Homolog of NCBI NO: 28416693 NR Description: At2g39110 [Arabidopsis thaliana]
MCNKSLEDHLVGRVVSVSLPWMMRLKIAQDAAQGLAYLHEEMDFQLIFRDFKSSNILLDERFGAKLSDFGLARQGPPEGLGHVSTSVVGTVGYAAPEYVQTGKLTAKSDVWSFGVVLYELITGRRAVDRNRPRGEQKLLEWVKPYVSDSKKFHLIVDPRLEGQYYCMKSVQRVAALANKCLMKQPKSRPKMSEVVSLLGRIIDEEAENVPPPVADETEEIIKAELNGESEPELKKQGSSYRKKVLDLRDKMNLNKSLSKLDWRNWTPGLVRTW

SEQ ID NO: 70486 - DNA, 981 bp, Arabidopsis thaliana
  misc_feature (1)..(981): Ceres Seq. ID no. 2709504
  misc_feature: MA Experiment ID: 108434 Result: Down-regulated in Transcription
  misc_feature: MA Experiment 108434 PARAMETER Experiment Name: At_Root_Tips_cDNA_P Parameter: Tissue Value: Root Tips
  misc_feature: MA Experiment ID: 108462 Result: Up-regulated in Transcription
  misc_feature: MA Experiment 108462 PARAMETER Experiment Name: At_Germinating_Seeds_cDNA_P Parameter: Age (day) Value: 2 vs. 0
  misc_feature: MA Experiment 108462 PARAMETER Experiment Name: At_Germinating_Seeds_cDNA_P Parameter: Tissue Value: Germinating Seeds
  misc_feature: MA Experiment ID: 108463 Result: Up-regulated in Transcription
  misc_feature: MA Experiment 108463 PARAMETER Experiment Name: At_Germinating_Seeds_cDNA_P Parameter: Age (day) Value: 3 vs. 0
  misc_feature: MA Experiment 108463 PARAMETER Experiment Name: At_Germinating_Seeds_cDNA_P Parameter: Tissue Value: Germinating Seeds
  misc_feature: MA Experiment ID: 108464 Result: Up-regulated in Transcription
  misc_feature: MA Experiment 108464 PARAMETER Experiment Name: At_Germinating_Seeds_cDNA_P Parameter: Age (day) Value: 4 vs. 0
  misc_feature: MA Experiment 108464 PARAMETER Experiment Name: At_Germinating_Seeds_cDNA_P Parameter: Tissue Value: Germinating Seeds
  misc_feature: MA Experiment ID: 108488 Result: Down-regulated in Transcription
  misc_feature: MA Experiment ID: 108561 Result: Up-regulated in Transcription
  misc_feature: MA Experiment 108561 PARAMETER Experiment Name: At_100uM_ABA_cDNA_P Parameter: Timepoint (hr) Value: 6
  misc_feature: MA Experiment 108561 PARAMETER Experiment Name: At_100uM_ABA_cDNA_P Parameter: Tissue Value: Aerial
  misc_feature: MA Experiment 108561 PARAMETER Experiment Name: At_100uM_ABA_cDNA_P Parameter: Treatment Value: 100uM ABA vs. No Treatment
  misc_feature: MA Experiment ID: 108572 Result: Up-regulated in Transcription
  misc_feature: MA Experiment 108572 PARAMETER Experiment Name: At_Drought_cDNA_P Parameter: Timepoint (hr) Value: 1
  misc_feature: MA Experiment 108572 PARAMETER Experiment Name: At_Drought_cDNA_P Parameter: Tissue Value: Aerial
  misc_feature: MA Experiment 108572 PARAMETER Experiment Name: At_Drought_cDNA_P Parameter: Treatment Value: Drought vs. No Drought
  misc_feature: MA Experiment ID: 108573 Result: Up-regulated in Transcription
  misc_feature: MA Experiment 108573 PARAMETER Experiment Name: At_Drought_cDNA_P Parameter: Timepoint (hr) Value: 6
  misc_feature: MA Experiment 108573 PARAMETER Experiment Name: At_Drought_cDNA_P Parameter: Tissue Value: Aerial
  misc_feature: MA Experiment 108573 PARAMETER Experiment Name: At_Drought_cDNA_P Parameter: Treatment Value: Drought vs. No Drought
  misc_feature: MA Experiment ID: 108585 Result: Up-regulated in Transcription
  misc_feature: MA Experiment 108585 PARAMETER Experiment Name: At_5mM_NaNP_cDNA_P Parameter: Timepoint (hr) Value: 6
  misc_feature: MA Experiment 108585 PARAMETER Experiment Name: At_5mM_NaNP_cDNA_P Parameter: Tissue Value: Aerial
  misc_feature: MA Experiment 108585 PARAMETER Experiment Name: At_5mM_NaNP_cDNA_P Parameter: Treatment Value: null
  misc_feature: MA Experiment ID: 108594 Result: Down-regulated in Transcription
  misc_feature: MA Experiment 108594 PARAMETER Experiment Name: At_Ler-rhl_Root_cDNA_P Parameter: Plant Line Value: null
  misc_feature: MA Experiment ID: 108605 Result: Up-regulated in Transcription
  misc_feature: MA Experiment 108605 PARAMETER Experiment Name: At_100uM_ABA_cDNA_P Parameter: Timepoint (hr) Value: 6
  misc_feature: MA Experiment 108605 PARAMETER Experiment Name: At_100uM_ABA_cDNA_P Parameter: Tissue Value: Aerial
  misc_feature: MA Experiment 108605 PARAMETER Experiment Name: At_100uM_ABA_cDNA_P Parameter: Treatment Value: 100uM ABA vs. No Treatment
  misc_feature: MA Experiment ID: 108607 Result: Up-regulated in Transcription
  misc_feature: MA Experiment 108607 PARAMETER Experiment Name: At_100uM_ABA_cDNA_P Parameter: Timepoint (hr) Value: 4
  misc_feature: MA Experiment 108607 PARAMETER Experiment Name: At_100uM_ABA_cDNA_P Parameter: Tissue Value: Aerial
  misc_feature: MA Experiment 108607 PARAMETER Experiment Name: At_100uM_ABA_cDNA_P Parameter: Treatment Value: 100uM ABA vs. No Treatment
  misc_feature: MA Experiment ID: 108609 Result: Up-regulated in Transcription
  misc_feature: MA Experiment 108609 PARAMETER Experiment Name: At_100uM_ABA_cDNA_P Parameter: Timepoint (hr) Value: 24
  misc_feature: MA Experiment 108609 PARAMETER Experiment Name: At_100uM_ABA_cDNA_P Parameter: Tissue Value: Aerial
  misc_feature: MA Experiment 108609 PARAMETER Experiment Name: At_100uM_ABA_cDNA_P Parameter: Treatment Value: 100uM ABA vs. No Treatment
  misc_feature: MA Experiment ID: 108668 Result: Up-regulated in Transcription
  misc_feature: MA Experiment 108668 PARAMETER Experiment Name: At_2mM_SA_cDNA_P Parameter: Plant Line Value: WS
  misc_feature: MA Experiment 108668 PARAMETER Experiment Name: At_2mM_SA_cDNA_P Parameter: Timepoint (hr) Value: 6
  misc_feature: MA Experiment 108668 PARAMETER Experiment Name: At_2mM_SA_cDNA_P Parameter: Treatment Value: 2mM SA vs. No Treatment
  misc_feature: MA Experiment ID: 20000069 Result: Up-regulated in Transcription
  misc_feature: MA Experiment 20000069 PARAMETER Experiment Name: At_100uM_ABA_Mutants_cDNA_P Parameter: Plant Line Value: CS23
  misc_feature: MA Experiment 20000069 PARAMETER Experiment Name: At_100uM_ABA_Mutants_cDNA_P Parameter: Timepoint (hr) Value: 6
  misc_feature: MA Experiment 20000069 PARAMETER Experiment Name: At_100uM_ABA_Mutants_cDNA_P Parameter: Tissue Value: Aerial
  misc_feature: MA Experiment 20000069 PARAMETER Experiment Name: At_100uM_ABA_Mutants_cDNA_P Parameter: Treatment Value: 100uM ABA vs. No Treatment
  misc_feature: MA Experiment ID: 20000070 Result: Up-regulated in Transcription
  misc_feature: MA Experiment 20000070 PARAMETER Experiment Name: At_100uM_ABA_Mutants_cDNA_P Parameter: Plant Line Value: CS24
  misc_feature: MA Experiment 20000070 PARAMETER Experiment Name: At_100uM_ABA_Mutants_cDNA_P Parameter: Timepoint (hr) Value: 6
  misc_feature: MA Experiment 20000070 PARAMETER Experiment Name: At_100uM_ABA_Mutants_cDNA_P Parameter: Tissue Value: Aerial
  misc_feature: MA Experiment 20000070 PARAMETER Experiment Name: At_100uM_ABA_Mutants_cDNA_P Parameter: Treatment Value: 100uM ABA vs. No Treatment
  misc_feature: MA Experiment ID: 20000071 Result: Up-regulated in Transcription
  misc_feature: MA Experiment 20000071 PARAMETER Experiment Name: At_100uM_ABA_Mutants_cDNA_P Parameter: Plant Line Value: CS8104
  misc_feature: MA Experiment 20000071 PARAMETER Experiment Name: At_100uM_ABA_Mutants_cDNA_P Parameter: Timepoint (hr) Value: 6
  misc_feature: MA Experiment 20000071 PARAMETER Experiment Name: At_100uM_ABA_Mutants_cDNA_P Parameter: Tissue Value: Aerial
  misc_feature: MA Experiment 20000071 PARAMETER Experiment Name: At_100uM_ABA_Mutants_cDNA_P Parameter: Treatment Value: 100uM ABA vs. No Treatment
  misc_feature: MA Experiment ID: 20000072 Result: Up-regulated in Transcription
  misc_feature: MA Experiment 20000072 PARAMETER Experiment Name: At_100uM_ABA_Mutants_cDNA_P Parameter: Plant Line Value: CS8105
  misc_feature: MA Experiment 20000072 PARAMETER Experiment Name: At_100uM_ABA_Mutants_cDNA_P Parameter: Timepoint (hr) Value: 6
  misc_feature: MA Experiment 20000072 PARAMETER Experiment Name: At_100uM_ABA_Mutants_cDNA_P Parameter: Tissue Value: Aerial
  misc_feature: MA Experiment 20000072 PARAMETER Experiment Name: At_100uM_ABA_Mutants_cDNA_P Parameter: Treatment Value: 100uM ABA vs. No Treatment
  misc_feature: MA Experiment ID: 20000086 Result: Up-regulated in Transcription
  misc_feature: MA Experiment 20000086 PARAMETER Experiment Name: At_100uM_ABA_Mutants_cDNA_P Parameter: Plant Line Value: CS22
  misc_feature: MA Experiment 20000086 PARAMETER Experiment Name: At_100uM_ABA_Mutants_cDNA_P Parameter: Timepoint (hr) Value: 6
  misc_feature: MA Experiment 20000086 PARAMETER Experiment Name: At_100uM_ABA_Mutants_cDNA_P Parameter: Tissue Value: Aerial
  misc_feature: MA Experiment 20000086 PARAMETER Experiment Name: At_100uM_ABA_Mutants_cDNA_P Parameter: Treatment Value: 100uM ABA vs. No Treatment
  misc_feature: MA Experiment ID: 20000087 Result: Up-regulated in Transcription
  misc_feature: MA Experiment 20000087 PARAMETER Experiment Name: At_100uM_ABA_Mutants_cDNA_P Parameter: Plant Line Value: WS
  misc_feature: MA Experiment 20000087 PARAMETER Experiment Name: At_100uM_ABA_Mutants_cDNA_P Parameter: Timepoint (hr) Value: 6
  misc_feature: MA Experiment 20000087 PARAMETER Experiment Name: At_100uM_ABA_Mutants_cDNA_P Parameter: Tissue Value: Aerial
  misc_feature: MA Experiment 20000087 PARAMETER Experiment Name: At_100uM_ABA_Mutants_cDNA_P Parameter: Treatment Value: 100uM ABA vs. No Treatment
  misc_feature: MA Experiment ID: 20000088 Result: Up-regulated in Transcription
  misc_feature: MA Experiment 20000088 PARAMETER Experiment Name: At_100uM_ABA_Mutants_cDNA_P Parameter: Plant Line Value: Landsberg
  misc_feature: MA Experiment 20000088 PARAMETER Experiment Name: At_100uM_ABA_Mutants_cDNA_P Parameter: Timepoint (hr) Value: 6
  misc_feature: MA Experiment 20000088 PARAMETER Experiment Name: At_100uM_ABA_Mutants_cDNA_P Parameter: Tissue Value: Aerial
  misc_feature: MA Experiment 20000088 PARAMETER Experiment Name: At_100uM_ABA_Mutants_cDNA_P Parameter: Treatment Value: 100uM ABA vs. No Treatment
  misc_feature: MA Experiment ID: 20000117 Result: Up-regulated in Transcription
  misc_feature: MA Experiment 20000117 PARAMETER Experiment Name: At_100uM_ABA_Mutants_cDNA_P Parameter: Plant Line Value: Columbia
  misc_feature: MA Experiment 20000117 PARAMETER Experiment Name: At_100uM_ABA_Mutants_cDNA_P Parameter: Timepoint (hr) Value: 6
  misc_feature: MA Experiment 20000117 PARAMETER Experiment Name: At_100uM_ABA_Mutants_cDNA_P Parameter: Tissue Value: Aerial
  misc_feature: MA Experiment 20000117 PARAMETER Experiment Name: At_100uM_ABA_Mutants_cDNA_P Parameter: Treatment Value: 100uM ABA vs. No Treatment
atggagcaccaccaccagcatcaccgtcaccaccaacgcgacgacggagaagacgatcgtcaatcctttggagtaccaccgccacacgtcgatgctccgccacaacctcatggtctttaccagtcacagcctcattttgatccttacgcgcctactcctcaagctccggcgccttaccgatcagaaactcaattcgaaccccacgcgcctccgccttaccgatcagagccttactttgaaactccggcaccaccgccttcatttggtcatgtgagtcatgttggtcaccaatcacccaacgaatcttacccaccggaacaccaccgttacggaggttatcaacagccgtctaattccttactggaaagtcatggagatcacagtggagtcacgcacgtggctcaccatagctcaaatcagccccaatcgtcttctggtgtctaccacaagcctgatgagaatcgtctacctgataatcttgctggactcgccggaagagcaacggtgaaggtgtattccaaggcggagcctaactataatttgacgatcagagatggtaaggttattctcgccccagcggatccatctgatgaagcacagcattggtacaaagacgagaagtatagtactaaagtgaaggacgcagacggtcatccttgttttgctcttgtaaacaaagctactggtgaagcaatgaagcattctgtgggagctactcatcccgtgcatctgattcgatatgtgcctgataagcttgacgagtcagtactatggacagagagcaaggattttggcgatggatatcgcacaataagaatggtaaacaatacgaggctaaacgtggatgcatatcatggtgacagcaaatctggtggtgtacgtgatggcacgactatcgtcctctgggactggaacaaaggcgacaaccagctctggaagatctttcctttctgtaagcttttctttaccgtttctgcttag

SEQ ID NO: 70487 - protein, 326 aa, Arabidopsis thaliana
  peptide (1)..(326): Ceres Seq. ID no. 2709505
  misc_feature (269)..(317): Pfam Name: QXW lectin repeat Pfam Description: QXW lectin repeat
  misc_feature (1)..(326): Homolog of NCBI NO: 25408635 NR Description: hypothetical protein At2g39050 [imported] -
  misc_feature (1)..(317): Homolog of NCBI NO: 18404934 NR Description: expressed protein; protein id: At2g39050.1, by cDNA: 39558., supported by cDNA: gi_15724196, supported by gi_20147402 [Arabidopsis thaliana]
  misc_feature (82)..(317): Homolog of NCBI NO: 34894060 NR Description: putative r40c1 protein [Oryza sativa (japonica group)] >gi|10697200|dbj|BAB16331.1| putative r40c1 protein
  misc_feature (163)..(317): Homolog of NCBI NO: 7489573 NR Description: r40g3 protein - rice >gi|1658315|emb|CAA70175.1|
  misc_feature (170)..(317): Homolog of NCBI NO: 7489572 NR Description: r40g2 protein - rice (fragment)
  misc_feature (170)..(317): Homolog of NCBI NO: 34394517 NR Description: r40g2 protein [Oryza sativa (japonica
  misc_feature (129)..(317): Homolog of NCBI NO: 7489571 NR Description: r40c1 protein - rice >gi|1296955|emb|CAA64683.1|
  misc_feature (129)..(317): Homolog of NCBI NO: 34902150 NR Description: Putative r40c1 protein - rice [Oryza sativa
  misc_feature (168)..(320): Homolog of NCBI NO: 34902150 NR Description: Putative r40c1 protein - rice [Oryza sativa
  misc_feature (168)..(317): Homolog of NCBI NO: 34394517 NR Description: r40g2 protein [Oryza sativa (japonica
MEHHHQHHRHHQRDDGEDDRQSFGVPPPHVDAPPQPHGLYQSQPHFDPYAPTPQAPAPYRSETQFEPHAPPPYRSEPYFETPAPPPSFGHVSHVGHQSPNESYPPEHHRYGGYQQPSNSLLESHGDHSGVTHVAHHSSNQPQSSSGVYHKPDENRLPDNLAGLAGRATVKVYSKAEPNYNLTIRDGKVILAPADPSDEAQHWYKDEKYSTKVKDADGHPCFALVNKATGEAMKHSVGATHPVHLIRYVPDKLDESVLWTESKDFGDGYRTIRMVNNTRLNVDAYHGDSKSGGVRDGTTIVLWDWNKGDNQLWKIFPFCKLFFTVSA

SEQ ID NO: 70488 - DNA, 1425 bp, Arabidopsis thaliana
  misc_feature (1)..(1425): Ceres Seq. ID no. 2709603
  misc_feature: MA Experiment ID: 20000173 Result: Down-regulated in Transcription
  misc_feature: MA Experiment 20000173 PARAMETER Experiment Name: At_42deg_Heat_P Parameter: Age (day) Value: 14
  misc_feature: MA Experiment 20000173 PARAMETER Experiment Name: At_42deg_Heat_P Parameter: Organism Value: A. thaliana
  misc_feature: MA Experiment 20000173 PARAMETER Experiment Name: At_42deg_Heat_P Parameter: Plant Line Value: WS
  misc_feature: MA Experiment 20000173 PARAMETER Experiment Name: At_42deg_Heat_P Parameter: Temperature (deg C) Value: 42 vs. 22
  misc_feature: MA Experiment 20000173 PARAMETER Experiment Name: At_42deg_Heat_P Parameter: Timepoint (hr) Value: 6
  misc_feature: MA Experiment 20000173 PARAMETER Experiment Name: At_42deg_Heat_P Parameter: Tissue Value: Aerial
  misc_feature: MA Experiment ID: 20000185 Result: Up-regulated in Transcription
  misc_feature: MA Experiment 20000185 PARAMETER Experiment Name: At_Roots__P Parameter: Age (day) Value: 7 vs. 21
  misc_feature: MA Experiment 20000185 PARAMETER Experiment Name: At_Roots__P Parameter: Organism Value: A. thaliana
  misc_feature: MA Experiment 20000185 PARAMETER Experiment Name: At_Roots__P Parameter: Tissue Value: Roots vs. Whole Plant
  misc_feature: MA Experiment ID: 20000265 Result: Up-regulated in Transcription
  misc_feature: MA Experiment 20000265 PARAMETER Experiment Name: At_Open_Flower_P Parameter: Age (day) Value: 21
  misc_feature: MA Experiment 20000265 PARAMETER Experiment Name: At_Open_Flower_P Parameter: Plant Line Value: WS
  misc_feature: MA Experiment 20000265 PARAMETER Experiment Name: At_Open_Flower_P Parameter: Tissue Value: Closed Flower vs. Whole Plant
  misc_feature: MA Experiment ID: 20000286 Result: Up-regulated in Transcription
  misc_feature: MA Experiment 20000286 PARAMETER Experiment Name: At_Open_Flower_P Parameter: Age (day) Value: 21
  misc_feature: MA Experiment 20000286 PARAMETER Experiment Name: At_Open_Flower_P Parameter: Plant Line Value: WS
  misc_feature: MA Experiment 20000286 PARAMETER Experiment Name: At_Open_Flower_P Parameter: Tissue Value: Half Open vs. Whole Plant
  misc_feature: MA Experiment ID: 20000439 Result: Up-regulated in Transcription
  misc_feature: MA Experiment 20000439 PARAMETER Experiment Name: At_Roots__P Parameter: Age (day) Value: 14 vs. 21
  misc_feature: MA Experiment 20000439 PARAMETER Experiment Name: At_Roots__P Parameter: Organism Value: A. thaliana
  misc_feature: MA Experiment 20000439 PARAMETER Experiment Name: At_Roots__P Parameter: Tissue Value: Roots vs. Whole Plant
  misc_feature: MA Experiment ID: 20001451 Result: Down-regulated in Transcription
  misc_feature: MA Experiment 20001451 PARAMETER Experiment Name: At_Far-red-induction_P Parameter: Age (day) Value: 7
  misc_feature: MA Experiment 20001451 PARAMETER Experiment Name: At_Far-red-induction_P Parameter: Light Value: Far-red vs. White
  misc_feature: MA Experiment 20001451 PARAMETER Experiment Name: At_Far-red-induction_P Parameter: Organism Value: A. thaliana
  misc_feature: MA Experiment 20001451 PARAMETER Experiment Name: At_Far-red-induction_P Parameter: Plant Line Value: Columbia
  misc_feature: MA Experiment 20001451 PARAMETER Experiment Name: At_Far-red-induction_P Parameter: Timepoint (hr) Value: 24
  misc_feature: MA Experiment 20001451 PARAMETER Experiment Name: At_Far-red-induction_P Parameter: Tissue Value: Whole Plant
  misc_feature: MA Experiment ID: 20001557 Result: Down-regulated in Transcription
  misc_feature: MA Experiment 20001557 PARAMETER Experiment Name: At_Drought_Soil_Dry_P Parameter: Age (day) Value: 27
  misc_feature: MA Experiment 20001557 PARAMETER Experiment Name: At_Drought_Soil_Dry_P Parameter: Organism Value: A. thaliana
  misc_feature: MA Experiment 20001557 PARAMETER Experiment Name: At_Drought_Soil_Dry_P Parameter: Plant Line Value: WS
  misc_feature: MA Experiment 20001557 PARAMETER Experiment Name: At_Drought_Soil_Dry_P Parameter: Post Timepoint (hr) Value: 3
  misc_feature: MA Experiment 20001557 PARAMETER Experiment Name: At_Drought_Soil_Dry_P Parameter: Post-Treatment Value: Re-Water vs. No Drought
  misc_feature: MA Experiment 20001557 PARAMETER Experiment Name: At_Drought_Soil_Dry_P Parameter: Timepoint (day) Value: 13
  misc_feature: MA Experiment 20001557 PARAMETER Experiment Name: At_Drought_Soil_Dry_P Parameter: Treatment Value: Drought vs. No Drought
  misc_feature: Pfam Name: Pkinase Pfam Description: Protein kinase domain
atgggtttatttcttcttgcagctcaaaagataagttcaagaccaagttctgaactctctgaaggattttcagacaaagatcttgcgaaaacaacgggtcaagagaagagaaagatatcaggaagatctctatctcttccatcggtagaggtagtagaccagacaccaggttggccattactaagaacatccactttagctactccaatggttcaacatcagactaggaaaatatcagttgtcaattgggtcatgagcttgcctgaaagatttccacatcatccgaatcagacttgtcaacagagcttttgtgataaacaacttaaagacatactcaaggacataaacagatggtttagctatgatgttctcaagacagcaacatcagatttctctttagagaatctgatcggaaaaggaggatgtaatgaagtttacaaagggtttcttgaagatggtaaaggcgtggcagtgaagatcttgaaaccatctgtaaaagaagcagtgaaggagtttgttcatgaagtgagcatagtctcttctttgagtcactcaaacatctctcctttgattggtgtatgcgttcattacaacgacctaatctctgtttacaatctctcttccaaagggagtttggaggagactcttcaggtttctgtaggtaagcatgtcttgagatgggaagagagactcaagatagcaatagggttaggggaagctcttgattatctacataaccaatgttctaatcctgtgatccacagagatgtcaaatcttccaatgttcttctctcagatgagttcgaacctcagctttcggatttcggtctttcgatgtggggatcgaagtcttgtcgatacacgatacaaagagatgtggtgggtacatttggatatctagctcctgagtactttatgtatggaaaagttagcgataaagtcgatgtatatgcctttggagtagttttgcttgaactcatttcaggaagaacttctatttcatctgatagcccaagagggcaagagagtttggtcatgtgggcaaaaccaatgatcgaaaaaggcaatgcaaaagagctcttggatccgaatattgctggtactttcgacgaggatcagtttcataagatggttcttgctgctacacattgtctcacaagagcagccacttatcgtcccaatatcaaggagatattgaagctgctaagaggcgaagatgatgtctcgaaatgggtgaagatagaagaagatgacgaagatggtttcgacgacgaggtttacccaaattcgaacacagaattacacttgagcctcgcgatggttgacgtggaggataatgactctgtgtcaaacagtagcttggagagaagtaacaacagccttttttcttcttcttcttcttcctctcaggagcttcagtcttaa

SEQ ID NO: 70489 - protein, 474 aa, Arabidopsis thaliana
  peptide (1)..(474): Ceres Seq. ID no. 2709604
  misc_feature: Pfam Name: Pkinase Pfam Description: Protein kinase domain
  misc_feature (1)..(474): Homolog of NCBI NO: 15227291 NR Description: putative protein kinase; protein id: At2g16750.1
  misc_feature (33)..(474): Homolog of NCBI NO: 15236248 NR Description: protein kinase - like; protein id: At4g35030.1
  misc_feature (33)..(272): Homolog of NCBI NO: 27754592 NR Description: putative protein kinase [Arabidopsis thaliana]
  misc_feature (40)..(347): Homolog of NCBI NO: 15223890 NR Description: hypothetical protein; protein id: At1g77280.1
  misc_feature (348)..(456): Homolog of NCBI NO: 15223890 NR Description: hypothetical protein; protein id: At1g77280.1
  misc_feature (117)..(456): Homolog of NCBI NO: 22329713 NR Description: hypothetical protein; protein id: At1g21590.1, by cDNA: gi_18086337 [Arabidopsis thaliana] At1g21590/F24J8_9 [Arabidopsis thaliana]
  misc_feature (117)..(461): Homolog of NCBI NO: 15237563 NR Description: putative protein; protein id: At5g63940.1, by cDNA: gi_20260317 [Arabidopsis thaliana] contains similarity to protein kinase~gene_id:MBM17.4
  misc_feature (117)..(467): Homolog of NCBI NO: 28376688 NR Description: putative serine/threonine kinase [Oryza sativa
  misc_feature (50)..(456): Homolog of NCBI NO: 25518708 NR Description: hypothetical protein F24J8.18 - Arabidopsis >gi|9454581|gb|AAF87904.1|AC015447_14 Similar to protein kinases
  misc_feature (117)..(424): Homolog of NCBI NO: 40253745 NR Description: SERK1 protein-like [Oryza sativa (japonica
MGLFLLAAQKISSRPSSELSEGFSDKDLAKTTGQEKRKISGRSLSLPSVEVVDQTPGWPLLRTSTLATPMVQHQTRKISVVNWVMSLPERFPHHPNQTCQQSFCDKQLKDILKDINRWFSYDVLKTATSDFSLENLIGKGGCNEVYKGFLEDGKGVAVKILKPSVKEAVKEFVHEVSIVSSLSHSNISPLIGVCVHYNDLISVYNLSSKGSLEETLQVSVGKHVLRWEERLKIAIGLGEALDYLHNQCSNPVIHRDVKSSNVLLSDEFEPQLSDFGLSMWGSKSCRYTIQRDVVGTFGYLAPEYFMYGKVSDKVDVYAFGVVLLELISGRTSISSDSPRGQESLVMWAKPMIEKGNAKELLDPNIAGTFDEDQFHKMVLAATHCLTRAATYRPNIKEILKLLRGEDDVSKWVKIEEDDEDGFDDEVYPNSNTELHLSLAMVDVEDNDSVSNSSLERSNNSLFSSSSSSSQELQS

SEQ ID NO: 70490 - protein, 405 aa, Arabidopsis thaliana
  peptide (1)..(405): Ceres Seq. ID no. 2709605
  misc_feature: Pfam Name: Pkinase Pfam Description: Protein kinase domain
  misc_feature (1)..(405): Homolog of NCBI NO: 15227291 NR Description: putative protein kinase; protein id: At2g16750.1
  misc_feature (1)..(405): Homolog of NCBI NO: 15236248 NR Description: protein kinase - like; protein id: At4g35030.1
  misc_feature (1)..(203): Homolog of NCBI NO: 27754592 NR Description: putative protein kinase [Arabidopsis thaliana]
  misc_feature (1)..(278): Homolog of NCBI NO: 15223890 NR Description: hypothetical protein; protein id: At1g77280.1
  misc_feature (279)..(387): Homolog of NCBI NO: 15223890 NR Description: hypothetical protein; protein id: At1g77280.1
  misc_feature (48)..(387): Homolog of NCBI NO: 22329713 NR Description: hypothetical protein; protein id: At1g21590.1, by cDNA: gi_18086337 [Arabidopsis thaliana] At1g21590/F24J8_9 [Arabidopsis thaliana]
  misc_feature (48)..(392): Homolog of NCBI NO: 15237563 NR Description: putative protein; protein id: At5g63940.1, by cDNA: gi_20260317 [Arabidopsis thaliana] contains similarity to protein kinase~gene_id:MBM17.4
  misc_feature (48)..(398): Homolog of NCBI NO: 28376688 NR Description: putative serine/threonine kinase [Oryza sativa
  misc_feature (1)..(387): Homolog of NCBI NO: 25518708 NR Description: hypothetical protein F24J8.18 - Arabidopsis >gi|9454581|gb|AAF87904.1|AC015447_14 Similar to protein kinases
  misc_feature (48)..(355): Homolog of NCBI NO: 40253745 NR Description: SERK1 protein-like [Oryza sativa (japonica
MVQHQTRKISVVNWVMSLPERFPHHPNQTCQQSFCDKQLKDILKDINRWFSYDVLKTATSDFSLENLIGKGGCNEVYKGFLEDGKGVAVKILKPSVKEAVKEFVHEVSIVSSLSHSNISPLIGVCVHYNDLISVYNLSSKGSLEETLQVSVGKHVLRWEERLKIAIGLGEALDYLHNQCSNPVIHRDVKSSNVLLSDEFEPQLSDFGLSMWGSKSCRYTIQRDVVGTFGYLAPEYFMYGKVSDKVDVYAFGVVLLELISGRTSISSDSPRGQESLVMWAKPMIEKGNAKELLDPNIAGTFDEDQFHKMVLAATHCLTRAATYRPNIKEILKLLRGEDDVSKWVKIEEDDEDGFDDEVYPNSNTELHLSLAMVDVEDNDSVSNSSLERSNNSLFSSSSSSSQELQS

SEQ ID NO: 70491 - protein, 390 aa, Arabidopsis thaliana
  peptide (1)..(390): Ceres Seq. ID no. 2709606
  misc_feature: Pfam Name: Pkinase Pfam Description: Protein kinase domain
  misc_feature (1)..(390): Homolog of NCBI NO: 15227291 NR Description: putative protein kinase; protein id: At2g16750.1
  misc_feature (1)..(390): Homolog of NCBI NO: 15236248 NR Description: protein kinase - like; protein id: At4g35030.1
  misc_feature (1)..(188): Homolog of NCBI NO: 27754592 NR Description: putative protein kinase [Arabidopsis thaliana]
  misc_feature (1)..(263): Homolog of NCBI NO: 15223890 NR Description: hypothetical protein; protein id: At1g77280.1
  misc_feature (264)..(372): Homolog of NCBI NO: 15223890 NR Description: hypothetical protein; protein id: At1g77280.1
  misc_feature (33)..(372): Homolog of NCBI NO: 22329713 NR Description: hypothetical protein; protein id: At1g21590.1, by cDNA: gi_18086337 [Arabidopsis thaliana] At1g21590/F24J8_9 [Arabidopsis thaliana]
  misc_feature (33)..(377): Homolog of NCBI NO: 15237563 NR Description: putative protein; protein id: At5g63940.1, by cDNA: gi_20260317 [Arabidopsis thaliana] contains similarity to protein kinase~gene_id:MBM17.4
  misc_feature (33)..(383): Homolog of NCBI NO: 28376688 NR Description: putative serine/threonine kinase [Oryza sativa
  misc_feature (1)..(372): Homolog of NCBI NO: 25518708 NR Description: hypothetical protein F24J8.18 - Arabidopsis >gi|9454581|gb|AAF87904.1|AC015447_14 Similar to protein kinases
  misc_feature (33)..(340): Homolog of NCBI NO: 40253745 NR Description: SERK1 protein-like [Oryza sativa (japonica
MSLPERFPHHPNQTCQQSFCDKQLKDILKDINRWFSYDVLKTATSDFSLENLIGKGGCNEVYKGFLEDGKGVAVKILKPSVKEAVKEFVHEVSIVSSLSHSNISPLIGVCVHYNDLISVYNLSSKGSLEETLQVSVGKHVLRWEERLKIAIGLGEALDYLHNQCSNPVIHRDVKSSNVLLSDEFEPQLSDFGLSMWGSKSCRYTIQRDVVGTFGYLAPEYFMYGKVSDKVDVYAFGVVLLELISGRTSISSDSPRGQESLVMWAKPMIEKGNAKELLDPNIAGTFDEDQFHKMVLAATHCLTRAATYRPNIKEILKLLRGEDDVSKWVKIEEDDEDGFDDEVYPNSNTELHLSLAMVDVEDNDSVSNSSLERSNNSLFSSSSSSSQELQS

SEQ ID NO: 70492 - DNA, 996 bp, Arabidopsis thaliana
  misc_feature (1)..(996): Ceres Seq. ID no. 2709963
  misc_feature: MA Experiment ID: 20000328 Result: Up-regulated in Transcription
  misc_feature: MA Experiment 20000328 PARAMETER Experiment Name: At_42deg_Heat_Sub_P Parameter: Age (day) Value: 14
  misc_feature: MA Experiment 20000328 PARAMETER Experiment Name: At_42deg_Heat_Sub_P Parameter: Organism Value: A. thaliana
  misc_feature: MA Experiment 20000328 PARAMETER Experiment Name: At_42deg_Heat_Sub_P Parameter: Plant Line Value: WS
  misc_feature: MA Experiment 20000328 PARAMETER Experiment Name: At_42deg_Heat_Sub_P Parameter: Temperature (deg C) Value: 42 vs. 22
  misc_feature: MA Experiment 20000328 PARAMETER Experiment Name: At_42deg_Heat_Sub_P Parameter: Timepoint (hr) Value: 6
  misc_feature: MA Experiment 20000328 PARAMETER Experiment Name: At_42deg_Heat_Sub_P Parameter: Tissue Value: Aerial
  misc_feature: Pfam Name: Serpin Pfam Description: Serpin (serine protease inhibitor)
atggaccgagaagcagtaaaggatcaatacgacatccttatcgacctggaaggatcagtagggactcaaagcgacattgttctgaggtggactcagaccagattatctctttacttcaggcttcttcaacggatgagcttaacgctgtcttctccaggatcgtcaccaccatcctcgccgacagcaccccgagtggcggcccgacgatattggcagcgaatggcgtttggatcgaaaagactctctctgtggaaccttctttcaaggatctctttgaataaagaggtgaattcatgggttgaagagcagacaaatggactcatcactgatcttcttccaccaaactctgcttctcctttgactgatctcatatttgctaatgccttgtttttcaacggaagatgggatagtcaattcaatccatcgctaacaaaagaatccgactttcaccttcttgatggaaccaaagtacgtgtgcccttcatgaccggtgcccacgaagacagtcttgatgtttacgaagctttcaaagtcctcaatctaccgtatagagaaggacgcgaagacagtcgtggtttctctatgcaaatctatctccctgatgagaaagatgggttgccttcaatgctggagagcttagcttctactcgtggattcttgaaggacaacaaggttcttcctagccagaaggcgggtgtcaaggaactcaagattccaaggtttaaatttgcttttgatttcgaagcctcgaaagctctcaagggtttgggtttgaaggtgccattgtctacgatcatccacaagtcttgcatcgaggtcgatgaagtgggatcgaaagctgcagctgctgccgcattaagatcatgtggaggttgttattttccgccaaagaagtatgacttcgtggctgatcatccttttctcttcatcgtcaaagagtacataagcggactagttttgtttcttggtcatgtcatggatccttctaagcactaa

SEQ ID NO: 70493 - protein, 331 aa, Arabidopsis thaliana
  peptide (1)..(331): Ceres Seq. ID no. 2709964
  misc_feature: Pfam Name: Serpin Pfam Description: Serpin (serine protease inhibitor)
  misc_feature (1)..(331): Homolog of NCBI NO: 15227450 NR Description: putative serpin; protein id: At2g35590.1
  misc_feature (92)..(331): Homolog of NCBI NO: 15227449 NR Description: putative serpin; protein id: At2g35580.1
  misc_feature (1)..(55): Homolog of NCBI NO: 15227449 NR Description: putative serpin; protein id: At2g35580.1
  misc_feature (95)..(263): Homolog of NCBI NO: 15220298 NR Description: serpin, putative; protein id: At1g47710.1
  misc_feature (256)..(328): Homolog of NCBI NO: 15220298 NR Description: serpin, putative; protein id: At1g47710.1
  misc_feature (92)..(263): Homolog of NCBI NO: 26224736 NR Description: serpin-like protein [Citrus x paradisi]
  misc_feature (256)..(328): Homolog of NCBI NO: 26224736 NR Description: serpin-like protein [Citrus x paradisi]
  misc_feature (92)..(329): Homolog of NCBI NO: 15222606 NR Description: hypothetical protein; protein id: At1g64030.1
  misc_feature (92)..(322): Homolog of NCBI NO: 25404920 NR Description: protein F22C12.22 [imported] - Arabidopsis >gi|6692103|gb|AAF24568.1|AC007764_10 F22C12.22 [Arabidopsis
  misc_feature (92)..(172): Homolog of NCBI NO: 15227448 NR Description: putative serpin; protein id: At2g35570.1
MDREAVKDQYDILIDLEGSVGTQSDIVLRWTQTRLSLYFRLLQRMSLTLSSPGSSPPSSPTAPRVAARRYWQRMAFGSKRLSLWNLLSRISLNKEVNSWVEEQTNGLITDLLPPNSASPLTDLIFANALFFNGRWDSQFNPSLTKESDFHLLDGTKVRVPFMTGAHEDSLDVYEAFKVLNLPYREGREDSRGFSMQIYLPDEKDGLPSMLESLASTRGFLKDNKVLPSQKAGVKELKIPRFKFAFDFEASKALKGLGLKVPLSTIIHKSCIEVDEVGSKAAAAAALRSCGGCYFPPKKYDFVADHPFLFIVKEYISGLVLFLGHVMDPSKH

SEQ ID NO: 70494 - protein, 287 aa, Arabidopsis thaliana
  peptide (1)..(287): Ceres Seq. ID no. 2709965
  misc_feature: Pfam Name: Serpin Pfam Description: Serpin (serine protease inhibitor)
  misc_feature (1)..(287): Homolog of NCBI NO: 15227450 NR Description: putative serpin; protein id: At2g35590.1
  misc_feature (48)..(287): Homolog of NCBI NO: 15227449 NR Description: putative serpin; protein id: At2g35580.1
  misc_feature (1)..(11): Homolog of NCBI NO: 15227449 NR Description: putative serpin; protein id: At2g35580.1
  misc_feature (51)..(219): Homolog of NCBI NO: 15220298 NR Description: serpin, putative; protein id: At1g47710.1
  misc_feature (212)..(284): Homolog of NCBI NO: 15220298 NR Description: serpin, putative; protein id: At1g47710.1
  misc_feature (48)..(219): Homolog of NCBI NO: 26224736 NR Description: serpin-like protein [Citrus x paradisi]
  misc_feature (212)..(284): Homolog of NCBI NO: 26224736 NR Description: serpin-like protein [Citrus x paradisi]
  misc_feature (48)..(285): Homolog of NCBI NO: 15222606 NR Description: hypothetical protein; protein id: At1g64030.1
  misc_feature (48)..(278): Homolog of NCBI NO: 25404920 NR Description: protein F22C12.22 [imported] - Arabidopsis >gi|6692103|gb|AAF24568.1|AC007764_10 F22C12.22 [Arabidopsis
  misc_feature (48)..(128): Homolog of NCBI NO: 15227448 NR Description: putative serpin; protein id: At2g35570.1
MSLTLSSPGSSPPSSPTAPRVAARRYWQRMAFGSKRLSLWNLLSRISLNKEVNSWVEEQTNGLITDLLPPNSASPLTDLIFANALFFNGRWDSQFNPSLTKESDFHLLDGTKVRVPFMTGAHEDSLDVYEAFKVLNLPYREGREDSRGFSMQIYLPDEKDGLPSMLESLASTRGFLKDNKVLPSQKAGVKELKIPRFKFAFDFEASKALKGLGLKVPLSTIIHKSCIEVDEVGSKAAAAAALRSCGGCYFPPKKYDFVADHPFLFIVKEYISGLVLFLGHVMDPSKH

SEQ ID NO: 70495 - protein, 258 aa, Arabidopsis thaliana
  peptide (1)..(258): Ceres Seq. ID no. 2709966
  misc_feature: Pfam Name: Serpin Pfam Description: Serpin (serine protease inhibitor)
  misc_feature (1)..(258): Homolog of NCBI NO: 15227450 NR Description: putative serpin; protein id: At2g35590.1
  misc_feature (19)..(258): Homolog of NCBI NO: 15227449 NR Description: putative serpin; protein id: At2g35580.1
  misc_feature (22)..(190): Homolog of NCBI NO: 15220298 NR Description: serpin, putative; protein id: At1g47710.1
  misc_feature (183)..(255): Homolog of NCBI NO: 15220298 NR Description: serpin, putative; protein id: At1g47710.1
  misc_feature (19)..(190): Homolog of NCBI NO: 26224736 NR Description: serpin-like protein [Citrus x paradisi]
  misc_feature (183)..(255): Homolog of NCBI NO: 26224736 NR Description: serpin-like protein [Citrus x paradisi]
  misc_feature (19)..(256): Homolog of NCBI NO: 15222606 NR Description: hypothetical protein; protein id: At1g64030.1
  misc_feature (19)..(249): Homolog of NCBI NO: 25404920 NR Description: protein F22C12.22 [imported] - Arabidopsis >gi|6692103|gb|AAF24568.1|AC007764_10 F22C12.22 [Arabidopsis
  misc_feature (19)..(99): Homolog of NCBI NO: 15227448 NR Description: putative serpin; protein id: At2g35570.1
  misc_feature (19)..(256): Homolog of NCBI NO: 6692102 NR Description: F22C12.21 [Arabidopsis thaliana]
MAFGSKRLSLWNLLSRISLNKEVNSWVEEQTNGLITDLLPPNSASPLTDLIFANALFFNGRWDSQFNPSLTKESDFHLLDGTKVRVPFMTGAHEDSLDVYEAFKVLNLPYREGREDSRGFSMQIYLPDEKDGLPSMLESLASTRGFLKDNKVLPSQKAGVKELKIPRFKFAFDFEASKALKGLGLKVPLSTIIHKSCIEVDEVGSKAAAAAALRSCGGCYFPPKKYDFVADHPFLFIVKEYISGLVLFLGHVMDPSKH

SEQ ID NO: 70496 - DNA, 1275 bp, Arabidopsis thaliana
  misc_feature (1)..(1275): Ceres Seq. ID no. 2710402
  misc_feature: MA Experiment ID: 20000314 Result: Down-regulated in Transcription
  misc_feature: MA Experiment 20000314 PARAMETER Experiment Name: At_14day_Shoots-Roots_Sub_P Parameter: Age (day) Value: 14
  misc_feature: MA Experiment 20000314 PARAMETER Experiment Name: At_14day_Shoots-Roots_Sub_P Parameter: Organism Value: A. thaliana
  misc_feature: MA Experiment 20000314 PARAMETER Experiment Name: At_14day_Shoots-Roots_Sub_P Parameter: Plant Line Value: WS
  misc_feature: MA Experiment 20000314 PARAMETER Experiment Name: At_14day_Shoots-Roots_Sub_P Parameter: Tissue Value: Roots vs. Whole Plant
  misc_feature: MA Experiment ID: 20000315 Result: Down-regulated in Transcription
  misc_feature: MA Experiment 20000315 PARAMETER Experiment Name: At_14day_Shoots-Roots_Sub_P Parameter: Age (day) Value: 14
  misc_feature: MA Experiment 20000315 PARAMETER Experiment Name: At_14day_Shoots-Roots_Sub_P Parameter: Organism Value: A. thaliana
  misc_feature: MA Experiment 20000315 PARAMETER Experiment Name: At_14day_Shoots-Roots_Sub_P Parameter: Plant Line Value: WS
  misc_feature: MA Experiment 20000315 PARAMETER Experiment Name: At_14day_Shoots-Roots_Sub_P Parameter: Tissue Value: Shoots vs. Whole Plant
  misc_feature: MA Experiment ID: 20000355 Result: Down-regulated in Transcription
  misc_feature: MA Experiment 20000355 PARAMETER Experiment Name: At_Siliques_Sub_P Parameter: Age (day) Value: 21
  misc_feature: MA Experiment 20000355 PARAMETER Experiment Name: At_Siliques_Sub_P Parameter: Organism Value: A. thaliana
  misc_feature: MA Experiment 20000355 PARAMETER Experiment Name: At_Siliques_Sub_P Parameter: Plant Line Value: WS
  misc_feature: MA Experiment 20000355 PARAMETER Experiment Name: At_Siliques_Sub_P Parameter: Tissue Value: Less Than 5mm Siliques vs. Whole Plant
  misc_feature: MA Experiment ID: 20000440 Result: Down-regulated in Transcription
  misc_feature: MA Experiment 20000440 PARAMETER Experiment Name: At_Closed-Flower__Sub_P Parameter: Tissue Value: Closed Flower vs. Whole Plant
atgatttcatcgtcagagatgatggcgacggagaaggctccggaatttgtaacagccatggcaactgaaactgaacggatagggaattcgagggaagtagatgaggagaaaataagccgcaagaagaatcctgaagaagaagctcttgaagctaaatgtcttcccggaatcatcagtgcttatctcaagttaaatagttactttccttgtgcttggaaattcttacagttatcccaaggctgcggaagaaaatctgaaaaaatgcgaaagatcatatcagaagctgtctcctgcgcacaaggcattggtaacccatttccctatgaagttgcagagattaagaaggcttttgagccccctatagacttgagtaaacacatgcgcgagccaataacaggagcactgtctatggaggtaccattttcatctcatgattggttggattcttcgttacaggcgcatgttcctctggttgatgtaaataaggttcgttgggtaataaggaatatagttcgagactggggagcagagggtcagagagaacgagatgaatgctacaagcctatccttgaagagcttgattccttgtttcctgatcgtcacaaggagagcactcgtccagcctgtttagtccctggtgctggacttgggcggctggcccttgaaatttcttgtctaggcatgcaaagccaaggcaatgaagtttcatactacatgatgttatgctcaagttttattcttaattatacacaattgcctggtgagtggacaatatacccctggatacacactaactgcaattcactctcggatgatgatcaactacgccctatttctattcctgatattcatcctgcaagtgcaggagtaacagaaagtttctcaatgtgtcgtggtgattttgttgaagtattcaatgaatcaagtcaagcaggaatgtgggatgcagttgtgacttgctttttcattgacacggctcataacatcatcgagtacatcgaaaccatatccaagattttaaaggatggaggagttttgataaatctaggacctctgttgtatcactttgcagacgagcagggccttgaaaatgaaatgtcgattgagctaagtttggaggatgtaaagagagttgcttcacattatgggtttgagatggagaaagaaaaaacaatagaaacaacgtactctacaaacccccggtctatgatgaagaaccgatactatcctgtcttctggacaatgaggaagaagtgtgctataacaacaacttaa

SEQ ID NO: 70497 - protein, 424 aa, Arabidopsis thaliana
  peptide (1)..(424): Ceres Seq. ID no. 2710403
  misc_feature (1)..(424): Homolog of NCBI NO: 25349707 NR Description: hypothetical protein At2g32160 [imported] - thaliana >gi|4263703|gb|AAD15389.1| hypothetical protein
  misc_feature (153)..(424): Homolog of NCBI NO: 30685200 NR Description: expressed protein [Arabidopsis thaliana]
  misc_feature (1)..(138): Homolog of NCBI NO: 30685200 NR Description: expressed protein [Arabidopsis thaliana]
  misc_feature (153)..(390): Homolog of NCBI NO: 30685195 NR Description: expressed protein [Arabidopsis thaliana]
  misc_feature (1)..(138): Homolog of NCBI NO: 30685195 NR Description: expressed protein [Arabidopsis thaliana]
  misc_feature (139)..(424): Homolog of NCBI NO: 30685202 NR Description: expressed protein [Arabidopsis thaliana] unknown protein [Arabidopsis thaliana]
  misc_feature (159)..(417): Homolog of NCBI NO: 20886869 NR Description: RIKEN cDNA 2410127L17 [Mus musculus] similar to data source:SPTR, source key:O46078, to EG:39E1.1 PROTEIN (CG11596 PROTEIN) [Mus musculus]
  misc_feature (159)..(417): Homolog of NCBI NO: 12846470 NR Description: unnamed protein product [Mus musculus]
  misc_feature (159)..(417): Homolog of NCBI NO: 21758737 NR Description: unnamed protein product [Homo sapiens]
  misc_feature (159)..(417): Homolog of NCBI NO: 22748889 NR Description: hypothetical protein FLJ25795 [Homo sapiens]
MISSSEMMATEKAPEFVTAMATETERIGNSREVDEEKISRKKNPEEEALEAKCLPGIISAYLKLNSYFPCAWKFLQLSQGCGRKSEKMRKIISEAVSCAQGIGNPFPYEVAEIKKAFEPPIDLSKHMREPITGALSMEVPFSSHDWLDSSLQAHVPLVDVNKVRWVIRNIVRDWGAEGQRERDECYKPILEELDSLFPDRHKESTRPACLVPGAGLGRLALEISCLGMQSQGNEVSYYMMLCSSFILNYTQLPGEWTIYPWIHTNCNSLSDDDQLRPISIPDIHPASAGVTESFSMCRGDFVEVFNESSQAGMWDAVVTCFFIDTAHNIIEYIETISKILKDGGVLINLGPLLYHFADEQGLENEMSIELSLEDVKRVASHYGFEMEKEKTIETTYSTNPRSMMKNRYYPVFWTMRKKCAITTT

SEQ ID NO: 70498 - protein, 418 aa, Arabidopsis thaliana
  peptide (1)..(418): Ceres Seq. ID no. 2710404
  misc_feature (1)..(418): Homolog of NCBI NO: 25349707 NR Description: hypothetical protein At2g32160 [imported] - thaliana >gi|4263703|gb|AAD15389.1| hypothetical protein
  misc_feature (147)..(418): Homolog of NCBI NO: 30685200 NR Description: expressed protein [Arabidopsis thaliana]
  misc_feature (1)..(132): Homolog of NCBI NO: 30685200 NR Description: expressed protein [Arabidopsis thaliana]
  misc_feature (147)..(384): Homolog of NCBI NO: 30685195 NR Description: expressed protein [Arabidopsis thaliana]
  misc_feature (1)..(132): Homolog of NCBI NO: 30685195 NR Description: expressed protein [Arabidopsis thaliana]
  misc_feature (133)..(418): Homolog of NCBI NO: 30685202 NR Description: expressed protein [Arabidopsis thaliana] unknown protein [Arabidopsis thaliana]
  misc_feature (153)..(411): Homolog of NCBI NO: 20886869 NR Description: RIKEN cDNA 2410127L17 [Mus musculus] similar to data source:SPTR, source key:O46078, to EG:39E1.1 PROTEIN (CG11596 PROTEIN) [Mus musculus]
  misc_feature (153)..(411): Homolog of NCBI NO: 12846470 NR Description: unnamed protein product [Mus musculus]
  misc_feature (153)..(411): Homolog of NCBI NO: 21758737 NR Description: unnamed protein product [Homo sapiens]
  misc_feature (153)..(411): Homolog of NCBI NO: 22748889 NR Description: hypothetical protein FLJ25795 [Homo sapiens]
MMATEKAPEFVTAMATETERIGNSREVDEEKISRKKNPEEEALEAKCLPGIISAYLKLNSYFPCAWKFLQLSQGCGRKSEKMRKIISEAVSCAQGIGNPFPYEVAEIKKAFEPPIDLSKHMREPITGALSMEVPFSSHDWLDSSLQAHVPLVDVNKVRWVIRNIVRDWGAEGQRERDECYKPILEELDSLFPDRHKESTRPACLVPGAGLGRLALEISCLGMQSQGNEVSYYMMLCSSFILNYTQLPGEWTIYPWIHTNCNSLSDDDQLRPISIPDIHPASAGVTESFSMCRGDFVEVFNESSQAGMWDAVVTCFFIDTAHNIIEYIETISKILKDGGVLINLGPLLYHFADEQGLENEMSIELSLEDVKRVASHYGFEMEKEKTIETTYSTNPRSMMKNRYYPVFWTMRKKCAITTT

SEQ ID NO: 70499 - protein, 417 aa, Arabidopsis thaliana
  peptide (1)..(417): Ceres Seq. ID no. 2710405
  misc_feature (1)..(417): Homolog of NCBI NO: 25349707 NR Description: hypothetical protein At2g32160 [imported] - thaliana >gi|4263703|gb|AAD15389.1| hypothetical protein
  misc_feature (146)..(417): Homolog of NCBI NO: 30685200 NR Description: expressed protein [Arabidopsis thaliana]
  misc_feature (1)..(131): Homolog of NCBI NO: 30685200 NR Description: expressed protein [Arabidopsis thaliana]
  misc_feature (146)..(383): Homolog of NCBI NO: 30685195 NR Description: expressed protein [Arabidopsis thaliana]
  misc_feature (1)..(131): Homolog of NCBI NO: 30685195 NR Description: expressed protein [Arabidopsis thaliana]
  misc_feature (132)..(417): Homolog of NCBI NO: 30685202 NR Description: expressed protein [Arabidopsis thaliana] unknown protein [Arabidopsis thaliana]
  misc_feature (152)..(410): Homolog of NCBI NO: 20886869 NR Description: RIKEN cDNA 2410127L17 [Mus musculus] similar to data source:SPTR, source key:O46078, to EG:39E1.1 PROTEIN (CG11596 PROTEIN) [Mus musculus]
  misc_feature (152)..(410): Homolog of NCBI NO: 12846470 NR Description: unnamed protein product [Mus musculus]
  misc_feature (152)..(410): Homolog of NCBI NO: 21758737 NR Description: unnamed protein product [Homo sapiens]
  misc_feature (152)..(410): Homolog of NCBI NO: 22748889 NR Description: hypothetical protein FLJ25795 [Homo sapiens]
MATEKAPEFVTAMATETERIGNSREVDEEKISRKKNPEEEALEAKCLPGIISAYLKLNSYFPCAWKFLQLSQGCGRKSEKMRKIISEAVSCAQGIGNPFPYEVAEIKKAFEPPIDLSKHMREPITGALSMEVPFSSHDWLDSSLQAHVPLVDVNKVRWVIRNIVRDWGAEGQRERDECYKPILEELDSLFPDRHKESTRPACLVPGAGLGRLALEISCLGMQSQGNEVSYYMMLCSSFILNYTQLPGEWTIYPWIHTNCNSLSDDDQLRPISIPDIHPASAGVTESFSMCRGDFVEVFNESSQAGMWDAVVTCFFIDTAHNIIEYIETISKILKDGGVLINLGPLLYHFADEQGLENEMSIELSLEDVKRVASHYGFEMEKEKTIETTYSTNPRSMMKNRYYPVFWTMRKKCAITTT

SEQ ID NO: 70500 - DNA, 1383 bp, Arabidopsis thaliana
  misc_feature (1)..(1383): Ceres Seq. ID no. 2710600
  misc_feature: MA Experiment ID: 20000171 Result: Up-regulated in Transcription
  misc_feature: MA Experiment 20000171 PARAMETER Experiment Name: At_42deg_Heat_P Parameter: Age (day) Value: 14
  misc_feature: MA Experiment 20000171 PARAMETER Experiment Name: At_42deg_Heat_P Parameter: Organism Value: A. thaliana
  misc_feature: MA Experiment 20000171 PARAMETER Experiment Name: At_42deg_Heat_P Parameter: Plant Line Value: WS
  misc_feature: MA Experiment 20000171 PARAMETER Experiment Name: At_42deg_Heat_P Parameter: Temperature (deg C) Value: 42 vs. 22
  misc_feature: MA Experiment 20000171 PARAMETER Experiment Name: At_42deg_Heat_P Parameter: Timepoint (hr) Value: 1
  misc_feature: MA Experiment 20000171 PARAMETER Experiment Name: At_42deg_Heat_P Parameter: Tissue Value: Aerial
  misc_feature: MA Experiment ID: 20000179 Result: Down-regulated in Transcription
  misc_feature: MA Experiment 20000179 PARAMETER Experiment Name: At_Germinating_Seeds_P Parameter: Age (hr) Value: 6 vs. 0
  misc_feature: MA Experiment 20000179 PARAMETER Experiment Name: At_Germinating_Seeds_P Parameter: Tissue Value: Germinating Seeds
  misc_feature: MA Experiment ID: 20000182 Result: Up-regulated in Transcription
  misc_feature: MA Experiment 20000182 PARAMETER Experiment Name: At_2mM_SA_P Parameter: Age (day) Value: 14
  misc_feature: MA Experiment 20000182 PARAMETER Experiment Name: At_2mM_SA_P Parameter: Organism Value: A. thaliana
  misc_feature: MA Experiment 20000182 PARAMETER Experiment Name: At_2mM_SA_P Parameter: Plant Line Value: WS
  misc_feature: MA Experiment 20000182 PARAMETER Experiment Name: At_2mM_SA_P Parameter: Timepoint (hr) Value: 6
  misc_feature: MA Experiment 20000182 PARAMETER Experiment Name: At_2mM_SA_P Parameter: Tissue Value: Aerial
  misc_feature: MA Experiment 20000182 PARAMETER Experiment Name: At_2mM_SA_P Parameter: Treatment Value: 2mM SA vs. No Treatment
  misc_feature: MA Experiment ID: 20000185 Result: Up-regulated in Transcription
  misc_feature: MA Experiment 20000185 PARAMETER Experiment Name: At_Roots__P Parameter: Age (day) Value: 7 vs. 21
  misc_feature: MA Experiment 20000185 PARAMETER Experiment Name: At_Roots__P Parameter: Organism Value: A. thaliana
  misc_feature: MA Experiment 20000185 PARAMETER Experiment Name: At_Roots__P Parameter: Tissue Value: Roots vs. Whole Plant
  misc_feature: MA Experiment ID: 20000264 Result: Down-regulated in Transcription
  misc_feature: MA Experiment 20000264 PARAMETER Experiment Name: At_Open_Flower_P Parameter: Age (day) Value: 21
  misc_feature: MA Experiment 20000264 PARAMETER Experiment Name: At_Open_Flower_P Parameter: Plant Line Value: WS
  misc_feature: MA Experiment 20000264 PARAMETER Experiment Name: At_Open_Flower_P Parameter: Tissue Value: Open Flower vs. Whole Plant
  misc_feature: MA Experiment ID: 20000265 Result: Down-regulated in Transcription
  misc_feature: MA Experiment 20000265 PARAMETER Experiment Name: At_Open_Flower_P Parameter: Age (day) Value: 21
  misc_feature: MA Experiment 20000265 PARAMETER Experiment Name: At_Open_Flower_P Parameter: Plant Line Value: WS
  misc_feature: MA Experiment 20000265 PARAMETER Experiment Name: At_Open_Flower_P Parameter: Tissue Value: Closed Flower vs. Whole Plant
  misc_feature: MA Experiment ID: 20000439 Result: Up-regulated in Transcription
  misc_feature: MA Experiment 20000439 PARAMETER Experiment Name: At_Roots__P Parameter: Age (day) Value: 14 vs. 21
  misc_feature: MA Experiment 20000439 PARAMETER Experiment Name: At_Roots__P Parameter: Organism Value: A. thaliana
  misc_feature: MA Experiment 20000439 PARAMETER Experiment Name: At_Roots__P Parameter: Tissue Value: Roots vs. Whole Plant
  misc_feature: MA Experiment ID: 20000456 Result: Up-regulated in Transcription
  misc_feature: MA Experiment 20000456 PARAMETER Experiment Name: At_100uM_BA_P Parameter: Age (day) Value: 14
  misc_feature: MA Experiment 20000456 PARAMETER Experiment Name: At_100uM_BA_P Parameter: Organism Value: A. thaliana
  misc_feature: MA Experiment 20000456 PARAMETER Experiment Name: At_100uM_BA_P Parameter: Plant Line Value: WS
  misc_feature: MA Experiment 20000456 PARAMETER Experiment Name: At_100uM_BA_P Parameter: Timepoint (hr) Value: 6
  misc_feature: MA Experiment 20000456 PARAMETER Experiment Name: At_100uM_BA_P Parameter: Tissue Value: Aerial
  misc_feature: MA Experiment 20000456 PARAMETER Experiment Name: At_100uM_BA_P Parameter: Treatment Value: 100uM BA vs. No Treatment
  misc_feature: MA Experiment ID: 20000574 Result: Up-regulated in Transcription
  misc_feature: MA Experiment 20000574 PARAMETER Experiment Name: At_100uM_ABA_Mutants__P Parameter: Organism Value: A. thaliana
  misc_feature: MA Experiment 20000574 PARAMETER Experiment Name: At_100uM_ABA_Mutants__P Parameter: Plant Line Value: CS23 vs. Ler wt
  misc_feature: MA Experiment 20000574 PARAMETER Experiment Name: At_100uM_ABA_Mutants__P Parameter: Timepoint (hr) Value: N/A
  misc_feature: MA Experiment 20000574 PARAMETER Experiment Name: At_100uM_ABA_Mutants__P Parameter: Tissue Value: Whole Plant
  misc_feature: MA Experiment 20000574 PARAMETER Experiment Name: At_100uM_ABA_Mutants__P Parameter: Treatment Value: None
  misc_feature: MA Experiment ID: 20000709 Result: Up-regulated in Transcription
  misc_feature: MA Experiment 20000709 PARAMETER Experiment Name: At_15mM_NH4NO3_L-to-H_P Parameter: Age (hr) Value: 14
  misc_feature: MA Experiment 20000709 PARAMETER Experiment Name: At_15mM_NH4NO3_L-to-H_P Parameter: Organism Value: A. thaliana
  misc_feature: MA Experiment 20000709 PARAMETER Experiment Name: At_15mM_NH4NO3_L-to-H_P Parameter: Plant Line Value: WS
  misc_feature: MA Experiment 20000709 PARAMETER Experiment Name: At_15mM_NH4NO3_L-to-H_P Parameter: Timepoint (hr) Value: 4
  misc_feature: MA Experiment 20000709 PARAMETER Experiment Name: At_15mM_NH4NO3_L-to-H_P Parameter: Tissue Value: Aerial
  misc_feature: MA Experiment 20000709 PARAMETER Experiment Name: At_15mM_NH4NO3_L-to-H_P Parameter: Treatment Value: 15mM NH4NO3 vs. 30mM Mannitol
  misc_feature: MA Experiment ID: 20001560 Result: Up-regulated in Transcription
  misc_feature: MA Experiment 20001560 PARAMETER Experiment Name: At_Drought_Soil_Dry_P Parameter: Age (day) Value: 28
  misc_feature: MA Experiment 20001560 PARAMETER Experiment Name: At_Drought_Soil_Dry_P Parameter: Organism Value: A. thaliana
  misc_feature: MA Experiment 20001560 PARAMETER Experiment Name: At_Drought_Soil_Dry_P Parameter: Plant Line Value: WS
  misc_feature: MA Experiment 20001560 PARAMETER Experiment Name: At_Drought_Soil_Dry_P Parameter: Post Timepoint (hr) Value: None
  misc_feature: MA Experiment 20001560 PARAMETER Experiment Name: At_Drought_Soil_Dry_P Parameter: Post-Treatment Value: None
  misc_feature: MA Experiment 20001560 PARAMETER Experiment Name: At_Drought_Soil_Dry_P Parameter: Timepoint (day) Value: 14
  misc_feature: MA Experiment 20001560 PARAMETER Experiment Name: At_Drought_Soil_Dry_P Parameter: Treatment Value: Drought vs. No Drought
atggccaagcttttcgctagaagaggagccaaatcaactctcctcacaaccccaataaatgctaagatcttggagaaacccattgaagcattcaaagttcaaaatcctgatctcgaaatcggaatcaagatcctcaatttcccttgtgtagagcttggattgccagaaggatgcgagaaccgtgacttcattaactcataccaaaaatctgactcatttgacttgttcttgaagtttcttttctctaccaagtatatgaaacagcagttggagagtttcattgaaacaaccaaaccgagtgctcttgtagccgatatgttcttcccttgggcaacagaatccgcggagaagatcggtgttccaagacttgtgttccacggcacatcatcctttgccttgtgttgttcgtataacatgaggattcataagccacacaagaaagtcgcttcgagttctactccatttgtaatccctggtctccctggagacatagttattacagaagaccaagccaatgtcaccaacgaagaaactccattcggaaagttttggaaagaagtcagggaatcagagaccagtagctttggtgttttggtgaatagcttctacgagctggaatcatcttatgctgatttttaccgtagttttgtggcgaaaaaagcgtggcatataggtccactttcactatccaacagagggattgcagagaaagccggaagagggaaaaaggcaaacattgatgagcaagaatgcctcaaatggcttgactctaagacacctggctcagtagtttacttgtcctttggtagcggaaccggcttacccaacgaacagctgttagagattgctttcggccttgaaggctctggacaaaatttcatttgggtggttagcaaaaatgaaaaccaagttgggacaggtgaaaatgaagattggttgcctaaagggtttgaagagaggaataaaggaaaagggctgataatacgcggatgggccccgcaagtgctgatacttgaccacaaagcaatcggaggatttgtgacgcattgcggatggaactcgactttggagggcattgccgcagggctgcctatggtgacttggccgatgggggcagaacagttctacaacgagaagttattgacaaaagtgttgagaataggagtgaacgttggagctaccgagttggtgaaaaaaggaaagttgattagtagagcacaagtggagaaggcagtaagggaagtgattggtggtgagaaggcagaggaaaggcggctaagggctaaggagctgggcgagatggctaaagccgctgtggaagaaggagggtcttcttataatgatgtgaacaagtttatggaagagctgaatggtagaaagtag

SEQ ID NO: 70501 - protein, 460 aa, Arabidopsis thaliana
  peptide (1)..(460): Ceres Seq. ID no. 2710601
  misc_feature (2)..(460): Pfam Name: UDP-glucoronosyl and UDP-glucosyl transferase Pfam Description: UDP-glucoronosyl and UDP-glucosyl transferase
  misc_feature (1)..(456): Homolog of NCBI NO: 18418382 NR Description: similar to glucosyltransferase -like protein; id: At4g34138.1, supported by cDNA: gi_18086384, supported by gi_19699135 [Arabidopsis thaliana] >gi|18086385|gb|AAL57652.1|
  misc_feature (1)..(458): Homolog of NCBI NO: 5918023 NR Description: betanidin-5-O-glucosyltransferase [Dorotheanthus
  misc_feature (1)..(460): Homolog of NCBI NO: 30725312 NR Description: At2g15490 [Arabidopsis thaliana]
  misc_feature (86)..(460): Homolog of NCBI NO: 30679430 NR Description: glucosyltransferase -related [Arabidopsis >gi|22135886|gb|AAM91525.1| putative glucosyltransferase
  misc_feature (1)..(455): Homolog of NCBI NO: 18418378 NR Description: similar to glucosyltransferase -like protein; id: At4g34131.1, supported by cDNA: gi_17065353 [Arabidopsis >gi|17065354|gb|AAL32831.1| putative protein [Arabidopsis
  misc_feature (1)..(455): Homolog of NCBI NO: 7433898 NR Description: probable glucosyltransferase F28A23.110 (EC
  misc_feature (1)..(457): Homolog of NCBI NO: 18418380 NR Description: glucosyltransferase -like protein; protein id: supported by cDNA: gi_14334981 [Arabidopsis thaliana] putative glucosyltransferase [Arabidopsis thaliana]
  misc_feature (1)..(460): Homolog of NCBI NO: 25286796 NR Description: probable glucosyltransferase [imported] - thaliana >gi|4335714|gb|AAD17392.1| putative glucosyltransferase
  misc_feature (1)..(460): Homolog of NCBI NO: 15226537 NR Description: putative glucosyltransferase; protein id: [Arabidopsis thaliana] >gi|25286797|pir||F84529 probable
  misc_feature (1)..(457): Homolog of NCBI NO: 7433906 NR Description: glucosyltransferase IS5a (EC 2.4.1.-),
MAKLFARRGAKSTLLTTPINAKILEKPIEAFKVQNPDLEIGIKILNFPCVELGLPEGCENRDFINSYQKSDSFDLFLKFLFSTKYMKQQLESFIETTKPSALVADMFFPWATESAEKIGVPRLVFHGTSSFALCCSYNMRIHKPHKKVASSSTPFVIPGLPGDIVITEDQANVTNEETPFGKFWKEVRESETSSFGVLVNSFYELESSYADFYRSFVAKKAWHIGPLSLSNRGIAEKAGRGKKANIDEQECLKWLDSKTPGSVVYLSFGSGTGLPNEQLLEIAFGLEGSGQNFIWVVSKNENQVGTGENEDWLPKGFEERNKGKGLIIRGWAPQVLILDHKAIGGFVTHCGWNSTLEGIAAGLPMVTWPMGAEQFYNEKLLTKVLRIGVNVGATELVKKGKLISRAQVEKAVREVIGGEKAEERRLRAKELGEMAKAAVEEGGSSYNDVNKFMEELNGRK

SEQ ID NO: 70502 - protein, 375 aa, Arabidopsis thaliana
  peptide (1)..(375): Ceres Seq. ID no. 2710602
  misc_feature (1)..(375): Pfam Name: UDP-glucoronosyl and UDP-glucosyl transferase Pfam Description: UDP-glucoronosyl and UDP-glucosyl transferase
  misc_feature (1)..(375): Homolog of NCBI NO: 15226537 NR Description: putative glucosyltransferase; protein id: [Arabidopsis thaliana] >gi|25286797|pir||F84529 probable
  misc_feature (1)..(375): Homolog of NCBI NO: 30725312 NR Description: At2g15490 [Arabidopsis thaliana]
  misc_feature (1)..(375): Homolog of NCBI NO: 25286796 NR Description: probable glucosyltransferase [imported] - thaliana >gi|4335714|gb|AAD17392.1| putative glucosyltransferase
  misc_feature (1)..(375): Homolog of NCBI NO: 30679430 NR Description: glucosyltransferase -related [Arabidopsis >gi|22135886|gb|AAM91525.1| putative glucosyltransferase
  misc_feature (1)..(372): Homolog of NCBI NO: 18418380 NR Description: glucosyltransferase -like protein; protein id: supported by cDNA: gi_14334981 [Arabidopsis thaliana] putative glucosyltransferase [Arabidopsis thaliana]
  misc_feature (1)..(370): Homolog of NCBI NO: 18418378 NR Description: similar to glucosyltransferase -like protein; id: At4g34131.1, supported by cDNA: gi_17065353 [Arabidopsis >gi|17065354|gb|AAL32831.1| putative protein [Arabidopsis
  misc_feature (1)..(370): Homolog of NCBI NO: 7433898 NR Description: probable glucosyltransferase F28A23.110 (EC
  misc_feature (1)..(371): Homolog of NCBI NO: 18418382 NR Description: similar to glucosyltransferase -like protein; id: At4g34138.1, supported by cDNA: gi_18086384, supported by gi_19699135 [Arabidopsis thaliana] >gi|18086385|gb|AAL57652.1|
  misc_feature (1)..(373): Homolog of NCBI NO: 5918023 NR Description: betanidin-5-O-glucosyltransferase [Dorotheanthus
  misc_feature (1)..(372): Homolog of NCBI NO: 7433906 NR Description: glucosyltransferase IS5a (EC 2.4.1.-),
MKQQLESFIETTKPSALVADMFFPWATESAEKIGVPRLVFHGTSSFALCCSYNMRIHKPHKKVASSSTPFVIPGLPGDIVITEDQANVTNEETPFGKFWKEVRESETSSFGVLVNSFYELESSYADFYRSFVAKKAWHIGPLSLSNRGIAEKAGRGKKANIDEQECLKWLDSKTPGSVVYLSFGSGTGLPNEQLLEIAFGLEGSGQNFIWVVSKNENQVGTGENEDWLPKGFEERNKGKGLIIRGWAPQVLILDHKAIGGFVTHCGWNSTLEGIAAGLPMVTWPMGAEQFYNEKLLTKVLRIGVNVGATELVKKGKLISRAQVEKAVREVIGGEKAEERRLRAKELGEMAKAAVEEGGSSYNDVNKFMEELNGRK

SEQ ID NO: 70503 - protein, 355 aa, Arabidopsis thaliana
  peptide (1)..(355): Ceres Seq. ID no. 2710603
  misc_feature (1)..(355): Pfam Name: UDP-glucoronosyl and UDP-glucosyl transferase Pfam Description: UDP-glucoronosyl and UDP-glucosyl transferase
  misc_feature (1)..(355): Homolog of NCBI NO: 15226537 NR Description: putative glucosyltransferase; protein id: [Arabidopsis thaliana] >gi|25286797|pir||F84529 probable
  misc_feature (1)..(355): Homolog of NCBI NO: 30725312 NR Description: At2g15490 [Arabidopsis thaliana]
  misc_feature (1)..(355): Homolog of NCBI NO: 25286796 NR Description: probable glucosyltransferase [imported] - thaliana >gi|4335714|gb|AAD17392.1| putative glucosyltransferase
  misc_feature (1)..(355): Homolog of NCBI NO: 30679430 NR Description: glucosyltransferase -related [Arabidopsis >gi|22135886|gb|AAM91525.1| putative glucosyltransferase
  misc_feature (1)..(352): Homolog of NCBI NO: 18418380 NR Description: glucosyltransferase -like protein; protein id: supported by cDNA: gi_14334981 [Arabidopsis thaliana] putative glucosyltransferase [Arabidopsis thaliana]
  misc_feature (1)..(350): Homolog of NCBI NO: 18418378 NR Description: similar to glucosyltransferase -like protein; id: At4g34131.1, supported by cDNA: gi_17065353 [Arabidopsis >gi|17065354|gb|AAL32831.1| putative protein [Arabidopsis
  misc_feature (1)..(350): Homolog of NCBI NO: 7433898 NR Description: probable glucosyltransferase F28A23.110 (EC
  misc_feature (1)..(351): Homolog of NCBI NO: 18418382 NR Description: similar to glucosyltransferase -like protein; id: At4g34138.1, supported by cDNA: gi_18086384, supported by gi_19699135 [Arabidopsis thaliana] >gi|18086385|gb|AAL57652.1|
  misc_feature (1)..(353): Homolog of NCBI NO: 5918023 NR Description: betanidin-5-O-glucosyltransferase [Dorotheanthus
  misc_feature (1)..(352): Homolog of NCBI NO: 7433906 NR Description: glucosyltransferase IS5a (EC 2.4.1.-),
MFFPWATESAEKIGVPRLVFHGTSSFALCCSYNMRIHKPHKKVASSSTPFVIPGLPGDIVITEDQANVTNEETPFGKFWKEVRESETSSFGVLVNSFYELESSYADFYRSFVAKKAWHIGPLSLSNRGIAEKAGRGKKANIDEQECLKWLDSKTPGSVVYLSFGSGTGLPNEQLLEIAFGLEGSGQNFIWVVSKNENQVGTGENEDWLPKGFEERNKGKGLIIRGWAPQVLILDHKAIGGFVTHCGWNSTLEGIAAGLPMVTWPMGAEQFYNEKLLTKVLRIGVNVGATELVKKGKLISRAQVEKAVREVIGGEKAEERRLRAKELGEMAKAAVEEGGSSYNDVNKFMEELNGRK

SEQ ID NO: 70504 - DNA, 1557 bp, Arabidopsis thaliana
  misc_feature (1)..(1557): Ceres Seq. ID no. 2710864
  misc_feature: MA Experiment ID: 20000180 Result: Down-regulated in Transcription
  misc_feature: MA Experiment 20000180 PARAMETER Experiment Name: At_Germinating_Seeds_P Parameter: Age (hr) Value: 24 vs. 0
  misc_feature: MA Experiment 20000180 PARAMETER Experiment Name: At_Germinating_Seeds_P Parameter: Tissue Value: Germinating Seeds
  misc_feature: MA Experiment ID: 20000184 Result: Down-regulated in Transcription
  misc_feature: MA Experiment 20000184 PARAMETER Experiment Name: At_Shoots__P Parameter: Age (day) Value: 7
  misc_feature: MA Experiment 20000184 PARAMETER Experiment Name: At_Shoots__P Parameter: Tissue Value: Shoots vs. Whole Plant
atggctttacttgagaaactgcaggttatatctgttgtgaagctttcctccattcgaaaatttcaggttgaaaaagatagtatagtctggaaggaaagggagataaatataaaaaatgaactaggtgatgtttctcgaaagacgtctgctgttactgattctagaatggcttctttggattcggagatacagaaacaactggatgaaaaaatgcgaatcaagactaggctgggaaatatatcaagagagcgaggtagaaaagaaatctttgcagatatgaaggcattaatttcttcgttccccgaggaaatgagttccatgcgtagtcaattaaacaattataaagagactgctggaggtattcattctctgcgggctgatgtccagtccctctctggggttctatgtaggaagacaaaagagtatgaagcattgcaattgagatcagctgattatgcttctcagttaggtgacctgaatgctacggtttgtgatttgaagaacagtcatgaggagttaaagttgtttctggacatgtataaacgtgagtccactgatgcgagggacatagctgaagccaaggaacaggagtacagggcttgggctcatgttcagagtttgaaatcatcccttgatgagcaaaatctggagttgcgcgttaaggcagcaaatgaagctgaagccgtttcccaacaaatgttggctgctgcggaagcagagattgctgatttaaggcagaaaatggatgattgtaaaagggatgtcgccaagcattctgatatcttgaaatctaaacatgaagaacatggaacatatctttctgaaatacagacaattggaagtgcctatgaggacattgtaccgcaaaaccaacagcttttgcttcaagttacagagagggatgactataacatcaagcttttcttggaaggcataacttctaggcagatgcaagatactctgcttatcgataaatacatcatggataaggatatacagcaaggcagtgcatatgccagtttcctatccaagaaatcatcaagaattgaagatcagttgaggttctgcacagatcagtttcagaaactagcggaagataaatatcaaaagtctgtttctcttgaaaatctgcaaaagaaacgtgcagacatcgggaatggcttggaacaagctaggtcaaggctggaggagtcccattctaaagttgagcaaagtcggctggattatggggcattagaactggaactggagattgaaaggttcaataggagaaggatagaggaggaaatggaaatagccaaaaagaaagtttctcgtcttcggtctctcatagaaggatcatcggccattcaaaagctccgacaagaactcagtgaatttaaagaaattctgaagtgtaaggcctgcaacgatcgcccaaaagaggtggtgattacgaagtgctaccatttgttctgcaacccatgtgtgcaaaagctcacaggaactcgacaaaagaagtgtccaacatgctcagcaagttttggaccaaatgatattaaacctatctacatatga

SEQ ID NO: 70505 - protein, 518 aa, Arabidopsis thaliana
  peptide (1)..(518): Ceres Seq. ID no. 2710865
  misc_feature (466)..(504): Pfam Name: Zinc finger, C3HC4 type (RING finger) Pfam Description: Zinc finger, C3HC4 type (RING finger)
  misc_feature (1)..(518): Homolog of NCBI NO: 7486945 NR Description: hypothetical protein At2g44950 [imported] - thaliana >gi|20196921|gb|AAM14834.1| unknown protein [Arabidopsis
  misc_feature (4)..(518): Homolog of NCBI NO: 30689877 NR Description: zinc finger (C3HC4-type RING finger) protein [Arabidopsis thaliana] >gi|19698951|gb|AAL91211.1| unknown
  misc_feature (22)..(514): Homolog of NCBI NO: 25405809 NR Description: unknown protein, 71207-66119 [imported] -
  misc_feature (4)..(518): Homolog of NCBI NO: 37536934 NR Description: unknown protein [Oryza sativa (japonica
  misc_feature (138)..(514): Homolog of NCBI NO: 18405292 NR Description: Expressed protein; protein id: At1g55255.1,
  misc_feature (154)..(514): Homolog of NCBI NO: 21553880 NR Description: unknown [Arabidopsis thaliana]
  misc_feature (3)..(518): Homolog of NCBI NO: 38605849 NR Description: OSJNBb0034G17.7 [Oryza sativa (japonica
  misc_feature (102)..(518): Homolog of NCBI NO: 16198151 NR Description: LD35285p [Drosophila melanogaster]
  misc_feature (128)..(518): Homolog of NCBI NO: 31199093 NR Description: ENSANGP00000009515 [Anopheles gambiae]
  misc_feature (102)..(518): Homolog of NCBI NO: 24658707 NR Description: CG10542-PA [Drosophila melanogaster]
MALLEKLQVISVVKLSSIRKFQVEKDSIVWKEREINIKNELGDVSRKTSAVTDSRMASLDSEIQKQLDEKMRIKTRLGNISRERGRKEIFADMKALISSFPEEMSSMRSQLNNYKETAGGIHSLRADVQSLSGVLCRKTKEYEALQLRSADYASQLGDLNATVCDLKNSHEELKLFLDMYKRESTDARDIAEAKEQEYRAWAHVQSLKSSLDEQNLELRVKAANEAEAVSQQMLAAAEAEIADLRQKMDDCKRDVAKHSDILKSKHEEHGTYLSEIQTIGSAYEDIVPQNQQLLLQVTERDDYNIKLFLEGITSRQMQDTLLIDKYIMDKDIQQGSAYASFLSKKSSRIEDQLRFCTDQFQKLAEDKYQKSVSLENLQKKRADIGNGLEQARSRLEESHSKVEQSRLDYGALELELEIERFNRRRIEEEMEIAKKKVSRLRSLIEGSSAIQKLRQELSEFKEILKCKACNDRPKEVVITKCYHLFCNPCVQKLTGTRQKKCPTCSASFGPNDIKPIYI

SEQ ID NO: 70506 - protein, 463 aa, Arabidopsis thaliana
  peptide (1)..(463): Ceres Seq. ID no. 2710866
  misc_feature (411)..(449): Pfam Name: Zinc finger, C3HC4 type (RING finger) Pfam Description: Zinc finger, C3HC4 type (RING finger)
  misc_feature (1)..(463): Homolog of NCBI NO: 7486945 NR Description: hypothetical protein At2g44950 [imported] - thaliana >gi|20196921|gb|AAM14834.1| unknown protein [Arabidopsis
  misc_feature (1)..(463): Homolog of NCBI NO: 30689877 NR Description: zinc finger (C3HC4-type RING finger) protein [Arabidopsis thaliana] >gi|19698951|gb|AAL91211.1| unknown
  misc_feature (1)..(459): Homolog of NCBI NO: 25405809 NR Description: unknown protein, 71207-66119 [imported] -
  misc_feature (1)..(463): Homolog of NCBI NO: 37536934 NR Description: unknown protein [Oryza sativa (japonica
  misc_feature (83)..(459): Homolog of NCBI NO: 18405292 NR Description: Expressed protein; protein id: At1g55255.1,
  misc_feature (99)..(459): Homolog of NCBI NO: 21553880 NR Description: unknown [Arabidopsis thaliana]
  misc_feature (1)..(463): Homolog of NCBI NO: 38605849 NR Description: OSJNBb0034G17.7 [Oryza sativa (japonica
  misc_feature (47)..(463): Homolog of NCBI NO: 16198151 NR Description: LD35285p [Drosophila melanogaster]
  misc_feature (73)..(463): Homolog of NCBI NO: 31199093 NR Description: ENSANGP00000009515 [Anopheles gambiae]
  misc_feature (47)..(463): Homolog of NCBI NO: 24658707 NR Description: CG10542-PA [Drosophila melanogaster]
MASLDSEIQKQLDEKMRIKTRLGNISRERGRKEIFADMKALISSFPEEMSSMRSQLNNYKETAGGIHSLRADVQSLSGVLCRKTKEYEALQLRSADYASQLGDLNATVCDLKNSHEELKLFLDMYKRESTDARDIAEAKEQEYRAWAHVQSLKSSLDEQNLELRVKAANEAEAVSQQMLAAAEAEIADLRQKMDDCKRDVAKHSDILKSKHEEHGTYLSEIQTIGSAYEDIVPQNQQLLLQVTERDDYNIKLFLEGITSRQMQDTLLIDKYIMDKDIQQGSAYASFLSKKSSRIEDQLRFCTDQFQKLAEDKYQKSVSLENLQKKRADIGNGLEQARSRLEESHSKVEQSRLDYGALELELEIERFNRRRIEEEMEIAKKKVSRLRSLIEGSSAIQKLRQELSEFKEILKCKACNDRPKEVVITKCYHLFCNPCVQKLTGTRQKKCPTCSASFGPNDIKPIYI

SEQ ID NO: 70507 - protein, 448 aa, Arabidopsis thaliana
  peptide (1)..(448): Ceres Seq. ID no. 2710867
  misc_feature (396)..(434): Pfam Name: Zinc finger, C3HC4 type (RING finger) Pfam Description: Zinc finger, C3HC4 type (RING finger)
  misc_feature (1)..(448): Homolog of NCBI NO: 7486945 NR Description: hypothetical protein At2g44950 [imported] - thaliana >gi|20196921|gb|AAM14834.1| unknown protein [Arabidopsis
  misc_feature (1)..(448): Homolog of NCBI NO: 30689877 NR Description: zinc finger (C3HC4-type RING finger) protein [Arabidopsis thaliana] >gi|19698951|gb|AAL91211.1| unknown
  misc_feature (1)..(444): Homolog of NCBI NO: 25405809 NR Description: unknown protein, 71207-66119 [imported] -
  misc_feature (1)..(448): Homolog of NCBI NO: 37536934 NR Description: unknown protein [Oryza sativa (japonica
  misc_feature (68)..(444): Homolog of NCBI NO: 18405292 NR Description: Expressed protein; protein id: At1g55255.1,
  misc_feature (84)..(444): Homolog of NCBI NO: 21553880 NR Description: unknown [Arabidopsis thaliana]
  misc_feature (1)..(448): Homolog of NCBI NO: 38605849 NR Description: OSJNBb0034G17.7 [Oryza sativa (japonica
  misc_feature (32)..(448): Homolog of NCBI NO: 16198151 NR Description: LD35285p [Drosophila melanogaster]
  misc_feature (58)..(448): Homolog of NCBI NO: 31199093 NR Description: ENSANGP00000009515 [Anopheles gambiae]
  misc_feature (32)..(448): Homolog of NCBI NO: 24658707 NR Description: CG10542-PA [Drosophila melanogaster]
MRIKTRLGNISRERGRKEIFADMKALISSFPEEMSSMRSQLNNYKETAGGIHSLRADVQSLSGVLCRKTKEYEALQLRSADYASQLGDLNATVCDLKNSHEELKLFLDMYKRESTDARDIAEAKEQEYRAWAHVQSLKSSLDEQNLELRVKAANEAEAVSQQMLAAAEAEIADLRQKMDDCKRDVAKHSDILKSKHEEHGTYLSEIQTIGSAYEDIVPQNQQLLLQVTERDDYNIKLFLEGITSRQMQDTLLIDKYIMDKDIQQGSAYASFLSKKSSRIEDQLRFCTDQFQKLAEDKYQKSVSLENLQKKRADIGNGLEQARSRLEESHSKVEQSRLDYGALELELEIERFNRRRIEEEMEIAKKKVSRLRSLIEGSSAIQKLRQELSEFKEILKCKACNDRPKEVVITKCYHLFCNPCVQKLTGTRQKKCPTCSASFGPNDIKPIYI

SEQ ID NO: 70508 - DNA, 1191 bp, Arabidopsis thaliana
  misc_feature (1)..(1191): Ceres Seq. ID no. 2710940
atgatgattgctcgttttgtgctcagcattctaatcgtagcggcgatagtttctggtagtgagttttctgatactcgtgatgcaaaagtagaaaaaatcttaaagaaactcaacaaacctgctcttaaatctatcaagagtccagatggagatataatagactgcgttcatatgaataatcatccaatttatgatcatcctttattcaaaaactacacgattcagatgaaaccaagttcttaccctaaaggtaaaaataatgaatcttcagacaaagagaaacaaagtgttgtgactcaactatggacagttaacgggaaatgccccaaaaacagtattccgatcagaagaacgagaagaaaagaaattttgcgaaccgaatatatgcaaagatatgacaaaaagaatccaaacataataaatcatcctaaagcatcaactagtaactccatacatgagtacgcgcaaatccaagcgaaaggaaagtttcatggagcccatgcggatataaatgtttggaaaccttttgtacaaacaccaaaagagtttagcctagcacaaatgtgggttatggctggtccgttttctgaagttaatagcgttgaagctggttggcaggtgtatcaagatcgttatggcgatgacaacccaagatactttattttttggactgcggatgggtaccactcaggctgttacaatcttgattgccaaggatttgttcctgtcagccaaaaatttgcccttggtgcagccgttagcaatgtttccaccttcgatggtcaacaataccatatttccacaactatatggaaggatccaaattcagggaattggtggttaaaatttggtgatgaatttgtcggatattggccttccatattgttcaaccatctaaaagatggtgcgacagaaattcagtggggaggtgaaataataaattttaaagatggtgcactacacaccacgacgagaatggggagtggacattttgcagagtctggatatcaaaaagcaagttatttcaaggatgttgagataattgatgaacgtgatattcatagtagtcctaaagaaggttattcttatatgacgcaagagagttgttataacatcaggtctggctatgctaaagtatggggagtttatttttattatggtggcccaggtcgaaatctgaattgtaaataa

SEQ ID NO: 70509 - protein, 396 aa, Arabidopsis thaliana
  peptide (1)..(396): Ceres Seq. ID no. 2710941
  misc_feature (163)..(349): Pfam Name: Arabidopsis proteins of unknown function Pfam Description: Arabidopsis proteins of unknown function
  misc_feature (1)..(396): Homolog of NCBI NO: 15227888 NR Description: unknown protein; protein id: At2g17750.1
  misc_feature (267)..(373): Homolog of NCBI NO: 7485275 NR Description: hypothetical protein A_TM017A05.3 - Arabidopsis
  misc_feature (58)..(153): Homolog of NCBI NO: 7485275 NR Description: hypothetical protein A_TM017A05.3 - Arabidopsis
  misc_feature (1)..(395): Homolog of NCBI NO: 7486433 NR Description: hypothetical protein At2g44220 [imported] - thaliana >gi|3128169|gb|AAC16073.1| hypothetical protein
  misc_feature (2)..(395): Homolog of NCBI NO: 34393299 NR Description: putative DD1A protein [Oryza sativa (japonica
  misc_feature (10)..(395): Homolog of NCBI NO: 30689660 NR Description: expressed protein [Arabidopsis thaliana]
  misc_feature (7)..(395): Homolog of NCBI NO: 18406483 NR Description: expressed protein; protein id: At2g44210.1, by cDNA: 39057., supported by cDNA: gi_15081718 [Arabidopsis
  misc_feature (10)..(395): Homolog of NCBI NO: 30103019 NR Description: unknown protein [Oryza sativa (japonica
  misc_feature (3)..(395): Homolog of NCBI NO: 7486438 NR Description: hypothetical protein At2g44240 [imported] -
  misc_feature (3)..(395): Homolog of NCBI NO: 18406490 NR Description: expressed protein; protein id: At2g44240.1, by cDNA: gi_16226494 [Arabidopsis thaliana] At2g44240/F4I1.5 [Arabidopsis thaliana]
MMIARFVLSILIVAAIVSGSEFSDTRDAKVEKILKKLNKPALKSIKSPDGDIIDCVHMNNHPIYDHPLFKNYTIQMKPSSYPKGKNNESSDKEKQSVVTQLWTVNGKCPKNSIPIRRTRRKEILRTEYMQRYDKKNPNIINHPKASTSNSIHEYAQIQAKGKFHGAHADINVWKPFVQTPKEFSLAQMWVMAGPFSEVNSVEAGWQVYQDRYGDDNPRYFIFWTADGYHSGCYNLDCQGFVPVSQKFALGAAVSNVSTFDGQQYHISTTIWKDPNSGNWWLKFGDEFVGYWPSILFNHLKDGATEIQWGGEIINFKDGALHTTTRMGSGHFAESGYQKASYFKDVEIIDERDIHSSPKEGYSYMTQESCYNIRSGYAKVWGVYFYYGGPGRNLNCK

SEQ ID NO: 70510 - protein, 395 aa, Arabidopsis thaliana
  peptide (1)..(395): Ceres Seq. ID no. 2710942
  misc_feature (162)..(348): Pfam Name: Arabidopsis proteins of unknown function Pfam Description: Arabidopsis proteins of unknown function
  misc_feature (1)..(395): Homolog of NCBI NO: 15227888 NR Description: unknown protein; protein id: At2g17750.1
  misc_feature (266)..(372): Homolog of NCBI NO: 7485275 NR Description: hypothetical protein A_TM017A05.3 - Arabidopsis
  misc_feature (57)..(152): Homolog of NCBI NO: 7485275 NR Description: hypothetical protein A_TM017A05.3 - Arabidopsis
  misc_feature (1)..(394): Homolog of NCBI NO: 7486433 NR Description: hypothetical protein At2g44220 [imported] - thaliana >gi|3128169|gb|AAC16073.1| hypothetical protein
  misc_feature (1)..(394): Homolog of NCBI NO: 34393299 NR Description: putative DD1A protein [Oryza sativa (japonica
  misc_feature (9)..(394): Homolog of NCBI NO: 30689660 NR Description: expressed protein [Arabidopsis thaliana]
  misc_feature (6)..(394): Homolog of NCBI NO: 18406483 NR Description: expressed protein; protein id: At2g44210.1, by cDNA: 39057., supported by cDNA: gi_15081718 [Arabidopsis
  misc_feature (9)..(394): Homolog of NCBI NO: 30103019 NR Description: unknown protein [Oryza sativa (japonica
  misc_feature (2)..(394): Homolog of NCBI NO: 7486438 NR Description: hypothetical protein At2g44240 [imported] -
  misc_feature (2)..(394): Homolog of NCBI NO: 18406490 NR Description: expressed protein; protein id: At2g44240.1, by cDNA: gi_16226494 [Arabidopsis thaliana] At2g44240/F4I1.5 [Arabidopsis thaliana]
MIARFVLSILIVAAIVSGSEFSDTRDAKVEKILKKLNKPALKSIKSPDGDIIDCVHMNNHPIYDHPLFKNYTIQMKPSSYPKGKNNESSDKEKQSVVTQLWTVNGKCPKNSIPIRRTRRKEILRTEYMQRYDKKNPNIINHPKASTSNSIHEYAQIQAKGKFHGAHADINVWKPFVQTPKEFSLAQMWVMAGPFSEVNSVEAGWQVYQDRYGDDNPRYFIFWTADGYHSGCYNLDCQGFVPVSQKFALGAAVSNVSTFDGQQYHISTTIWKDPNSGNWWLKFGDEFVGYWPSILFNHLKDGATEIQWGGEIINFKDGALHTTTRMGSGHFAESGYQKASYFKDVEIIDERDIHSSPKEGYSYMTQESCYNIRSGYAKVWGVYFYYGGPGRNLNCK

SEQ ID NO: 70511 - protein, 339 aa, Arabidopsis thaliana
  peptide (1)..(339): Ceres Seq. ID no. 2710943
  misc_feature (106)..(292): Pfam Name: Arabidopsis proteins of unknown function Pfam Description: Arabidopsis proteins of unknown function
  misc_feature (1)..(339): Homolog of NCBI NO: 15227888 NR Description: unknown protein; protein id: At2g17750.1
  misc_feature (210)..(316): Homolog of NCBI NO: 7485275 NR Description: hypothetical protein A_TM017A05.3 - Arabidopsis
  misc_feature (1)..(96): Homolog of NCBI NO: 7485275 NR Description: hypothetical protein A_TM017A05.3 - Arabidopsis
  misc_feature (1)..(338): Homolog of NCBI NO: 7486433 NR Description: hypothetical protein At2g44220 [imported] - thaliana >gi|3128169|gb|AAC16073.1| hypothetical protein
  misc_feature (1)..(338): Homolog of NCBI NO: 34393299 NR Description: putative DD1A protein [Oryza sativa (japonica
  misc_feature (1)..(338): Homolog of NCBI NO: 30689660 NR Description: expressed protein [Arabidopsis thaliana]
  misc_feature (1)..(338): Homolog of NCBI NO: 18406483 NR Description: expressed protein; protein id: At2g44210.1, by cDNA: 39057., supported by cDNA: gi_15081718 [Arabidopsis
  misc_feature (1)..(338): Homolog of NCBI NO: 30103019 NR Description: unknown protein [Oryza sativa (japonica
  misc_feature (1)..(338): Homolog of NCBI NO: 7486438 NR Description: hypothetical protein At2g44240 [imported] -
  misc_feature (1)..(338): Homolog of NCBI NO: 18406490 NR Description: expressed protein; protein id: At2g44240.1, by cDNA: gi_16226494 [Arabidopsis thaliana] At2g44240/F4I1.5 [Arabidopsis thaliana]
MNNHPIYDHPLFKNYTIQMKPSSYPKGKNNESSDKEKQSVVTQLWTVNGKCPKNSIPIRRTRRKEILRTEYMQRYDKKNPNIINHPKASTSNSIHEYAQIQAKGKFHGAHADINVWKPFVQTPKEFSLAQMWVMAGPFSEVNSVEAGWQVYQDRYGDDNPRYFIFWTADGYHSGCYNLDCQGFVPVSQKFALGAAVSNVSTFDGQQYHISTTIWKDPNSGNWWLKFGDEFVGYWPSILFNHLKDGATEIQWGGEIINFKDGALHTTTRMGSGHFAESGYQKASYFKDVEIIDERDIHSSPKEGYSYMTQESCYNIRSGYAKVWGVYFYYGGPGRNLNCK

SEQ ID NO: 70512 - DNA, 1551 bp, Arabidopsis thaliana
  misc_feature (1)..(1551): Ceres Seq. ID no. 2711040
  misc_feature: MA Experiment ID: 108461 Result: Up-regulated in Transcription
  misc_feature: MA Experiment 108461 PARAMETER Experiment Name: At_Germinating_Seeds_cDNA_P Parameter: Age (day) Value: 1 vs. 0
  misc_feature: MA Experiment 108461 PARAMETER Experiment Name: At_Germinating_Seeds_cDNA_P Parameter: Tissue Value: Germinating Seeds
  misc_feature: MA Experiment ID: 108594 Result: Up-regulated in Transcription
  misc_feature: MA Experiment 108594 PARAMETER Experiment Name: At_Ler-rhl_Root_cDNA_P Parameter: Plant Line Value: null
  misc_feature: MA Experiment ID: 20000179 Result: Up-regulated in Transcription
  misc_feature: MA Experiment 20000179 PARAMETER Experiment Name: At_Germinating_Seeds_P Parameter: Age (hr) Value: 6 vs. 0
  misc_feature: MA Experiment 20000179 PARAMETER Experiment Name: At_Germinating_Seeds_P Parameter: Tissue Value: Germinating Seeds
  misc_feature: MA Experiment ID: 20000180 Result: Up-regulated in Transcription
  misc_feature: MA Experiment 20000180 PARAMETER Experiment Name: At_Germinating_Seeds_P Parameter: Age (hr) Value: 24 vs. 0
  misc_feature: MA Experiment 20000180 PARAMETER Experiment Name: At_Germinating_Seeds_P Parameter: Tissue Value: Germinating Seeds
  misc_feature: MA Experiment ID: 20000184 Result: Down-regulated in Transcription
  misc_feature: MA Experiment 20000184 PARAMETER Experiment Name: At_Shoots__P Parameter: Age (day) Value: 7
  misc_feature: MA Experiment 20000184 PARAMETER Experiment Name: At_Shoots__P Parameter: Tissue Value: Shoots vs. Whole Plant
  misc_feature: MA Experiment ID: 20001451 Result: Up-regulated in Transcription
  misc_feature: MA Experiment 20001451 PARAMETER Experiment Name: At_Far-red-induction_P Parameter: Age (day) Value: 7
  misc_feature: MA Experiment 20001451 PARAMETER Experiment Name: At_Far-red-induction_P Parameter: Light Value: Far-red vs. White
  misc_feature: MA Experiment 20001451 PARAMETER Experiment Name: At_Far-red-induction_P Parameter: Organism Value: A. thaliana
  misc_feature: MA Experiment 20001451 PARAMETER Experiment Name: At_Far-red-induction_P Parameter: Plant Line Value: Columbia
  misc_feature: MA Experiment 20001451 PARAMETER Experiment Name: At_Far-red-induction_P Parameter: Timepoint (hr) Value: 24
  misc_feature: MA Experiment 20001451 PARAMETER Experiment Name: At_Far-red-induction_P Parameter: Tissue Value: Whole Plant
atgttctctcaggctcagagcaagaagcagtttaagaggtctatgactaagaaatcacattcatggtggtgggatagtcacaattgtcccaagaactcaaaatggcttgcagagaatctagaaaagatggatgatcgagtgaaccacatgttaaaactgattgaagaagacgcagactcttttgcaaagaaagctcagatgtattttcagaaacgtcccgagttaatccagcttgtcgaggaattctaccgcatgtatcgcgcattggctgagcgttatgatcaagctagtggtgaacttcagaagaaccatacatctgagatccagtcacagagctctcttgagatatcatctcctaccaaagagaagttgagtcgccgtcaatctagccataaagaagaggaagattcatcgtctttgacagattctggttctgattctgatcattcctctgccaatgatgaagacggtgacgaggcattgatccgtagaatggctgaacttgagcttgagcttcaagagacgaaacagaagctccttctccagcaggaaagtgttgatggtgacaacaatgttgatctccttcacaaaattactacatatgagggagagcttaaagaagctaatgagaagatgcgaatgcacgaagacgagattgctaatctgaagaatcagcttcagagcttcatgtcttttgacacagaggatcatcttggtgctgaacaaaagagtgttgatttggataaagaggacactaaagaagatgcagtagctacaaaagtgctagccttggaggaagagctgagtatcgcgaaagagaagcttcagcactttgagaaagagacttattctctgaaaaatgagctcgagatcggcaaagccgctgaggagaagctgaagagcttacaacatgagctcgagttggctcagagagacgctgatacctacataaacaagctcaacgcagagaagaaagaagtcttgaagttgcaggagagattggcaatggtgaaaactagtttacaggatagagataacgagataagggcattgaaaactgcggtttcagacgctgaacagaagatattccccgaaaaagcacagatcaagggagaaatgtcgaagatgcttgaagaacgaagccaacttggagagcaactgagagagctggaatcacatataaggctgatcaaggaagagaaagctgaaacagaggagaagcttagaggaggaactgagaaaatcagcggaatgagagacgagagcaatgtgctaagagaagagattgggaagagagaagagaagataaaggaaacggaaaagcatatggaggagcttcacatggagcaagtgaggctgagaagacggtcaagtgagcttacggaagaagtggaaaggacgagagtgtctgcatcggaaatggctgagcagaaaagagaagctataagacagctttgtatgtctcttgaccattacagagatgggtacgacagactttggagagttgttgcaggacataagagtaagagagtagtggtcttatcaacttga

SEQ ID NO: 70513 - protein, 516 aa, Arabidopsis thaliana
  peptide (1)..(516): Ceres Seq. ID no. 2711041
  misc_feature (38)..(499): Pfam Name: Myosin tail Pfam Description: Myosin tail
  misc_feature (1)..(516): Homolog of NCBI NO: 15224515 NR Description: unknown protein; protein id: At2g30500.1
  misc_feature (3)..(516): Homolog of NCBI NO: 28416683 NR Description: At2g30500 [Arabidopsis thaliana]
  misc_feature (131)..(510): Homolog of NCBI NO: 8777333 NR Description: contains similarity to unknown
  misc_feature (131)..(510): Homolog of NCBI NO: 30697046 NR Description: contains similarity to unknown protein
  misc_feature (9)..(478): Homolog of NCBI NO: 34896156 NR Description: P0701D05.33 [Oryza sativa (japonica >gi|13486675|dbj|BAB39912.1| contains EST to Arabidopsis thaliana chromosome 2, At2g30500~unknown protein
  misc_feature (2)..(480): Homolog of NCBI NO: 8777333 NR Description: contains similarity to unknown
  misc_feature (6)..(501): Homolog of NCBI NO: 30697043 NR Description: contains similarity to unknown protein
  misc_feature (6)..(480): Homolog of NCBI NO: 30697046 NR Description: contains similarity to unknown protein
  misc_feature (8)..(428): Homolog of NCBI NO: 34896152 NR Description: P0701D05.31 [Oryza sativa (japonica >gi|13486673|dbj|BAB39910.1| hypothetical protein~similar to thaliana chromosome 5, MCK7.19 [Oryza sativa (japonica sativa
  misc_feature (88)..(477): Homolog of NCBI NO: 15218702 NR Description: unknown protein; protein id: At1g03080.1
MFSQAQSKKQFKRSMTKKSHSWWWDSHNCPKNSKWLAENLEKMDDRVNHMLKLIEEDADSFAKKAQMYFQKRPELIQLVEEFYRMYRALAERYDQASGELQKNHTSEIQSQSSLEISSPTKEKLSRRQSSHKEEEDSSSLTDSGSDSDHSSANDEDGDEALIRRMAELELELQETKQKLLLQQESVDGDNNVDLLHKITTYEGELKEANEKMRMHEDEIANLKNQLQSFMSFDTEDHLGAEQKSVDLDKEDTKEDAVATKVLALEEELSIAKEKLQHFEKETYSLKNELEIGKAAEEKLKSLQHELELAQRDADTYINKLNAEKKEVLKLQERLAMVKTSLQDRDNEIRALKTAVSDAEQKIFPEKAQIKGEMSKMLEERSQLGEQLRELESHIRLIKEEKAETEEKLRGGTEKISGMRDESNVLREEIGKREEKIKETEKHMEELHMEQVRLRRRSSELTEEVERTRVSASEMAEQKREAIRQLCMSLDHYRDGYDRLWRVVAGHKSKRVVVLST

SEQ ID NO: 70514 - protein, 502 aa, Arabidopsis thaliana
  peptide (1)..(502): Ceres Seq. ID no. 2711042
  misc_feature (24)..(485): Pfam Name: Myosin tail Pfam Description: Myosin tail
  misc_feature (74)..(463): Homolog of NCBI NO: 15218702 NR Description: unknown protein; protein id: At1g03080.1
  misc_feature (1)..(502): Homolog of NCBI NO: 15224515 NR Description: unknown protein; protein id: At2g30500.1
  misc_feature (1)..(502): Homolog of NCBI NO: 28416683 NR Description: At2g30500 [Arabidopsis thaliana]
  misc_feature (117)..(496): Homolog of NCBI NO: 8777333 NR Description: contains similarity to unknown
  misc_feature (117)..(496): Homolog of NCBI NO: 30697046 NR Description: contains similarity to unknown protein
  misc_feature (1)..(464): Homolog of NCBI NO: 34896156 NR Description: P0701D05.33 [Oryza sativa (japonica >gi|13486675|dbj|BAB39912.1| contains EST to Arabidopsis thaliana chromosome 2, At2g30500~unknown protein
  misc_feature (1)..(466): Homolog of NCBI NO: 8777333 NR Description: contains similarity to unknown
  misc_feature (1)..(487): Homolog of NCBI NO: 30697043 NR Description: contains similarity to unknown protein
  misc_feature (1)..(466): Homolog of NCBI NO: 30697046 NR Description: contains similarity to unknown protein
  misc_feature (1)..(414): Homolog of NCBI NO: 34896152 NR Description: P0701D05.31 [Oryza sativa (japonica >gi|13486673|dbj|BAB39910.1| hypothetical protein~similar to thaliana chromosome 5, MCK7.19 [Oryza sativa (japonica sativa
MTKKSHSWWWDSHNCPKNSKWLAENLEKMDDRVNHMLKLIEEDADSFAKKAQMYFQKRPELIQLVEEFYRMYRALAERYDQASGELQKNHTSEIQSQSSLEISSPTKEKLSRRQSSHKEEEDSSSLTDSGSDSDHSSANDEDGDEALIRRMAELELELQETKQKLLLQQESVDGDNNVDLLHKITTYEGELKEANEKMRMHEDEIANLKNQLQSFMSFDTEDHLGAEQKSVDLDKEDTKEDAVATKVLALEEELSIAKEKLQHFEKETYSLKNELEIGKAAEEKLKSLQHELELAQRDADTYINKLNAEKKEVLKLQERLAMVKTSLQDRDNEIRALKTAVSDAEQKIFPEKAQIKGEMSKMLEERSQLGEQLRELESHIRLIKEEKAETEEKLRGGTEKISGMRDESNVLREEIGKREEKIKETEKHMEELHMEQVRLRRRSSELTEEVERTRVSASEMAEQKREAIRQLCMSLDHYRDGYDRLWRVVAGHKSKRVVVLST

SEQ ID NO: 70515 - protein, 474 aa, Arabidopsis thaliana
  peptide (1)..(474): Ceres Seq. ID no. 2711043
  misc_feature (1)..(457): Pfam Name: Myosin tail Pfam Description: Myosin tail
  misc_feature (1)..(474): Homolog of NCBI NO: 15224515 NR Description: unknown protein; protein id: At2g30500.1
  misc_feature (1)..(474): Homolog of NCBI NO: 28416683 NR Description: At2g30500 [Arabidopsis thaliana]
  misc_feature (89)..(468): Homolog of NCBI NO: 8777333 NR Description: contains similarity to unknown
  misc_feature (89)..(468): Homolog of NCBI NO: 30697046 NR Description: contains similarity to unknown protein
  misc_feature (1)..(436): Homolog of NCBI NO: 34896156 NR Description: P0701D05.33 [Oryza sativa (japonica >gi|13486675|dbj|BAB39912.1| contains EST to Arabidopsis thaliana chromosome 2, At2g30500~unknown protein
  misc_feature (1)..(438): Homolog of NCBI NO: 8777333 NR Description: contains similarity to unknown
  misc_feature (1)..(459): Homolog of NCBI NO: 30697043 NR Description: contains similarity to unknown protein
  misc_feature (1)..(438): Homolog of NCBI NO: 30697046 NR Description: contains similarity to unknown protein
  misc_feature (1)..(386): Homolog of NCBI NO: 34896152 NR Description: P0701D05.31 [Oryza sativa (japonica >gi|13486673|dbj|BAB39910.1| hypothetical protein~similar to thaliana chromosome 5, MCK7.19 [Oryza sativa (japonica sativa
  misc_feature (46)..(435): Homolog of NCBI NO: 15218702 NR Description: unknown protein; protein id: At1g03080.1
MDDRVNHMLKLIEEDADSFAKKAQMYFQKRPELIQLVEEFYRMYRALAERYDQASGELQKNHTSEIQSQSSLEISSPTKEKLSRRQSSHKEEEDSSSLTDSGSDSDHSSANDEDGDEALIRRMAELELELQETKQKLLLQQESVDGDNNVDLLHKITTYEGELKEANEKMRMHEDEIANLKNQLQSFMSFDTEDHLGAEQKSVDLDKEDTKEDAVATKVLALEEELSIAKEKLQHFEKETYSLKNELEIGKAAEEKLKSLQHELELAQRDADTYINKLNAEKKEVLKLQERLAMVKTSLQDRDNEIRALKTAVSDAEQKIFPEKAQIKGEMSKMLEERSQLGEQLRELESHIRLIKEEKAETEEKLRGGTEKISGMRDESNVLREEIGKREEKIKETEKHMEELHMEQVRLRRRSSELTEEVERTRVSASEMAEQKREAIRQLCMSLDHYRDGYDRLWRVVAGHKSKRVVVLST

SEQ ID NO: 70516 - DNA, 1512 bp, Arabidopsis thaliana
  misc_feature (1)..(1512): Ceres Seq. ID no. 2711130
  misc_feature: MA Experiment ID: 20000227 Result: Up-regulated in Transcription
  misc_feature: MA Experiment 20000227 PARAMETER Experiment Name: At_Root-Tips-vs-Tops_P Parameter: Tissue Value: Root Tips vs. Root Tops
  misc_feature: MA Experiment ID: 20001451 Result: Down-regulated in Transcription
  misc_feature: MA Experiment 20001451 PARAMETER Experiment Name: At_Far-red-induction_P Parameter: Age (day) Value: 7
  misc_feature: MA Experiment 20001451 PARAMETER Experiment Name: At_Far-red-induction_P Parameter: Light Value: Far-red vs. White
  misc_feature: MA Experiment 20001451 PARAMETER Experiment Name: At_Far-red-induction_P Parameter: Organism Value: A. thaliana
  misc_feature: MA Experiment 20001451 PARAMETER Experiment Name: At_Far-red-induction_P Parameter: Plant Line Value: Columbia
  misc_feature: MA Experiment 20001451 PARAMETER Experiment Name: At_Far-red-induction_P Parameter: Timepoint (hr) Value: 24
  misc_feature: MA Experiment 20001451 PARAMETER Experiment Name: At_Far-red-induction_P Parameter: Tissue Value: Whole Plant
atgaaatgtcatcgaatggacccgtttccttcttcttatgtttctctgaaactcatgaaatttgaggaactactcatggaagattcatcacagctacatagtaacaagagacatgacttagaggaaggattttctgagctcatacaagaactagccatcgtggaggcagagattctctgtctagaccgaaaaatcgaggagctaaagcttaaactgtattccgaacagagacaaacgcaagagatacaattgcagatgaccgagcagaagaggacattggcaagacagagccatgtgagacagagtactctgccactaagacatgatcttcatcaacgatctttgtctcattgttaccaacgttctacactagacactgcctcaactactcattcaagactctcattctcttacgctcctgatttcttggatgccacttcttcaggtggcttcacagacgaatttgatggagtcacgaggatgcagatgggtagagtaagaaaagggcttcgacttgttgaagcaaagaccaaagacgacccaaacgaagtatcagaacaactcatcaactgtcttataggcatttacttggaactcaatcatgtttcatcaaagaccaaaggggatgtctcgctctcaagaaggccatcttcttgtagccggaaatcaaacacatatagttattatcaaaatgcaatgaatcttgatccttatcacgtattgccagactcgagcggaggagtcaccagagacattggcccttacaagaacttcatccacatttcaagaagttccatcgatgtgacacatttcacccattattgttcaccggctgttccacgcttgagcgttttgatggagaaattatcggaggtagatttgagttttttgacctacaagcaaaaactagccttctggatcaatatctacaacgcatgtatcatgcatgcatttcttgagtatgggttaccatcgtcacacaatagactacttaccttgatgaacaaggcttcactcaacgtaggtggcatagtcctcaacgctttggcgattgaacatttcgtcttgcggcatccttgtgaaccagaagataaggactcgcttgacgagaaagaaacgctccttcgtcacacttacggtttaggatattcagagcccaatgtgacatttgcactttgccgtggaagttggtcttcaccagcactaagagtctatacagcagatgaagtggtgaatgatttaggaagagcaagagtggaatatctagaagcttctgtgggtgtttcaagcaagaaaaagattgtggttccacagcttctgcaatggcacatgaaagattttgcagatgatattgaatctcttttggaatggatctatagccagttgcctcgatcagggaacctaaagggcatgattatggaatgtctaaagagaaaagcaaaagttcctttagctaaaattgtagagattcaaacatatggacacgaatttcgttacttgttgtcattgtaa

SEQ ID NO: 70517 - protein, 503 aa, Arabidopsis thaliana
  peptide (1)..(503): Ceres Seq. ID no. 2711131
  misc_feature (283)..(422): Pfam Name: Protein of unknown function, DUF547 Pfam Description: Protein of unknown function, DUF547
  misc_feature (1)..(503): Homolog of NCBI NO: 15225527 NR Description: hypothetical protein; protein id: At2g39690.1
  misc_feature (46)..(503): Homolog of NCBI NO: 9294368 NR Description: gb|AAB97123.1~gene_id:T16H11.2~similar to unknown
  misc_feature (47)..(503): Homolog of NCBI NO: 34895788 NR Description: P0434B04.9 [Oryza sativa (japonica
  misc_feature (46)..(503): Homolog of NCBI NO: 15230524 NR Description: hypothetical protein; protein id: At3g12540.1
  misc_feature (236)..(503): Homolog of NCBI NO: 31193902 NR Description: unknown protein [Oryza sativa (japonica
  misc_feature (235)..(501): Homolog of NCBI NO: 25407787 NR Description: hypothetical protein AT4g37080 [imported] - thaliana >gi|4006868|emb|CAB16786.1| putative protein thaliana] >gi|7270657|emb|CAB80374.1| putative protein
  misc_feature (235)..(501): Homolog of NCBI NO: 30690854 NR Description: expressed protein [Arabidopsis thaliana] AT4g37080/C7A10_280 [Arabidopsis thaliana]
  misc_feature (181)..(503): Homolog of NCBI NO: 15983811 NR Description: AT5g60720/mup24_130 [Arabidopsis thaliana]
  misc_feature (181)..(503): Homolog of NCBI NO: 30697420 NR Description: expressed protein [Arabidopsis thaliana]
  misc_feature (236)..(503): Homolog of NCBI NO: 15239037 NR Description: putative protein; protein id: At5g42690.1 thaliana] >gi|10177272|dbj|BAB10625.1|
MKCHRMDPFPSSYVSLKLMKFEELLMEDSSQLHSNKRHDLEEGFSELIQELAIVEAEILCLDRKIEELKLKLYSEQRQTQEIQLQMTEQKRTLARQSHVRQSTLPLRHDLHQRSLSHCYQRSTLDTASTTHSRLSFSYAPDFLDATSSGGFTDEFDGVTRMQMGRVRKGLRLVEAKTKDDPNEVSEQLINCLIGIYLELNHVSSKTKGDVSLSRRPSSCSRKSNTYSYYQNAMNLDPYHVLPDSSGGVTRDIGPYKNFIHISRSSIDVTHFTHYCSPAVPRLSVLMEKLSEVDLSFLTYKQKLAFWINIYNACIMHAFLEYGLPSSHNRLLTLMNKASLNVGGIVLNALAIEHFVLRHPCEPEDKDSLDEKETLLRHTYGLGYSEPNVTFALCRGSWSSPALRVYTADEVVNDLGRARVEYLEASVGVSSKKKIVVPQLLQWHMKDFADDIESLLEWIYSQLPRSGNLKGMIMECLKRKAKVPLAKIVEIQTYGHEFRYLLSL

SEQ ID NO: 70518 - protein, 498 aa, Arabidopsis thaliana
  peptide (1)..(498): Ceres Seq. ID no. 2711132
  misc_feature (278)..(417): Pfam Name: Protein of unknown function, DUF547 Pfam Description: Protein of unknown function, DUF547
  misc_feature (1)..(498): Homolog of NCBI NO: 15225527 NR Description: hypothetical protein; protein id: At2g39690.1
  misc_feature (41)..(498): Homolog of NCBI NO: 9294368 NR Description: gb|AAB97123.1~gene_id:T16H11.2~similar to unknown
  misc_feature (42)..(498): Homolog of NCBI NO: 34895788 NR Description: P0434B04.9 [Oryza sativa (japonica
  misc_feature (41)..(498): Homolog of NCBI NO: 15230524 NR Description: hypothetical protein; protein id: At3g12540.1
  misc_feature (231)..(498): Homolog of NCBI NO: 31193902 NR Description: unknown protein [Oryza sativa (japonica
  misc_feature (230)..(496): Homolog of NCBI NO: 25407787 NR Description: hypothetical protein AT4g37080 [imported] - thaliana >gi|4006868|emb|CAB16786.1| putative protein thaliana] >gi|7270657|emb|CAB80374.1| putative protein
  misc_feature (230)..(496): Homolog of NCBI NO: 30690854 NR Description: expressed protein [Arabidopsis thaliana] AT4g37080/C7A10_280 [Arabidopsis thaliana]
  misc_feature (176)..(498): Homolog of NCBI NO: 15983811 NR Description: AT5g60720/mup24_130 [Arabidopsis thaliana]
  misc_feature (176)..(498): Homolog of NCBI NO: 30697420 NR Description: expressed protein [Arabidopsis thaliana]
  misc_feature (231)..(498): Homolog of NCBI NO: 15239037 NR Description: putative protein; protein id: At5g42690.1 thaliana] >gi|10177272|dbj|BAB10625.1|
MDPFPSSYVSLKLMKFEELLMEDSSQLHSNKRHDLEEGFSELIQELAIVEAEILCLDRKIEELKLKLYSEQRQTQEIQLQMTEQKRTLARQSHVRQSTLPLRHDLHQRSLSHCYQRSTLDTASTTHSRLSFSYAPDFLDATSSGGFTDEFDGVTRMQMGRVRKGLRLVEAKTKDDPNEVSEQLINCLIGIYLELNHVSSKTKGDVSLSRRPSSCSRKSNTYSYYQNAMNLDPYHVLPDSSGGVTRDIGPYKNFIHISRSSIDVTHFTHYCSPAVPRLSVLMEKLSEVDLSFLTYKQKLAFWINIYNACIMHAFLEYGLPSSHNRLLTLMNKASLNVGGIVLNALAIEHFVLRHPCEPEDKDSLDEKETLLRHTYGLGYSEPNVTFALCRGSWSSPALRVYTADEVVNDLGRARVEYLEASVGVSSKKKIVVPQLLQWHMKDFADDIESLLEWIYSQLPRSGNLKGMIMECLKRKAKVPLAKIVEIQTYGHEFRYLLSL

SEQ ID NO: 70519 - protein, 485 aa, Arabidopsis thaliana
  peptide (1)..(485): Ceres Seq. ID no. 2711133
  misc_feature (265)..(404): Pfam Name: Protein of unknown function, DUF547 Pfam Description: Protein of unknown function, DUF547
  misc_feature (1)..(485): Homolog of NCBI NO: 15225527 NR Description: hypothetical protein; protein id: At2g39690.1
  misc_feature (28)..(485): Homolog of NCBI NO: 9294368 NR Description: gb|AAB97123.1~gene_id:T16H11.2~similar to unknown
  misc_feature (29)..(485): Homolog of NCBI NO: 34895788 NR Description: P0434B04.9 [Oryza sativa (japonica
  misc_feature (28)..(485): Homolog of NCBI NO: 15230524 NR Description: hypothetical protein; protein id: At3g12540.1
  misc_feature (218)..(485): Homolog of NCBI NO: 31193902 NR Description: unknown protein [Oryza sativa (japonica
  misc_feature (217)..(483): Homolog of NCBI NO: 25407787 NR Description: hypothetical protein AT4g37080 [imported] - thaliana >gi|4006868|emb|CAB16786.1| putative protein thaliana] >gi|7270657|emb|CAB80374.1| putative protein
  misc_feature (217)..(483): Homolog of NCBI NO: 30690854 NR Description: expressed protein [Arabidopsis thaliana] AT4g37080/C7A10_280 [Arabidopsis thaliana]
  misc_feature (163)..(485): Homolog of NCBI NO: 15983811 NR Description: AT5g60720/mup24_130 [Arabidopsis thaliana]
  misc_feature (163)..(485): Homolog of NCBI NO: 30697420 NR Description: expressed protein [Arabidopsis thaliana]
  misc_feature (218)..(485): Homolog of NCBI NO: 15239037 NR Description: putative protein; protein id: At5g42690.1 thaliana] >gi|10177272|dbj|BAB10625.1|
MKFEELLMEDSSQLHSNKRHDLEEGFSELIQELAIVEAEILCLDRKIEELKLKLYSEQRQTQEIQLQMTEQKRTLARQSHVRQSTLPLRHDLHQRSLSHCYQRSTLDTASTTHSRLSFSYAPDFLDATSSGGFTDEFDGVTRMQMGRVRKGLRLVEAKTKDDPNEVSEQLINCLIGIYLELNHVSSKTKGDVSLSRRPSSCSRKSNTYSYYQNAMNLDPYHVLPDSSGGVTRDIGPYKNFIHISRSSIDVTHFTHYCSPAVPRLSVLMEKLSEVDLSFLTYKQKLAFWINIYNACIMHAFLEYGLPSSHNRLLTLMNKASLNVGGIVLNALAIEHFVLRHPCEPEDKDSLDEKETLLRHTYGLGYSEPNVTFALCRGSWSSPALRVYTADEVVNDLGRARVEYLEASVGVSSKKKIVVPQLLQWHMKDFADDIESLLEWIYSQLPRSGNLKGMIMECLKRKAKVPLAKIVEIQTYGHEFRYLLSL

SEQ ID NO: 70520 - DNA, 6906 bp, Arabidopsis thaliana
  misc_feature (1)..(6906): Ceres Seq. ID no. 2711345
  misc_feature: MA Experiment ID: 20000180 Result: Down-regulated in Transcription
  misc_feature: MA Experiment 20000180 PARAMETER Experiment Name: At_Germinating_Seeds_P Parameter: Age (hr) Value: 24 vs. 0
  misc_feature: MA Experiment 20000180 PARAMETER Experiment Name: At_Germinating_Seeds_P Parameter: Tissue Value: Germinating Seeds
  misc_feature: MA Experiment ID: 20000264 Result: Up-regulated in Transcription
  misc_feature: MA Experiment 20000264 PARAMETER Experiment Name: At_Open_Flower_P Parameter: Age (day) Value: 21
  misc_feature: MA Experiment 20000264 PARAMETER Experiment Name: At_Open_Flower_P Parameter: Plant Line Value: WS
  misc_feature: MA Experiment 20000264 PARAMETER Experiment Name: At_Open_Flower_P Parameter: Tissue Value: Open Flower vs. Whole Plant
  misc_feature: MA Experiment ID: 20001557 Result: Up-regulated in Transcription
  misc_feature: MA Experiment 20001557 PARAMETER Experiment Name: At_Drought_Soil_Dry_P Parameter: Age (day) Value: 27
  misc_feature: MA Experiment 20001557 PARAMETER Experiment Name: At_Drought_Soil_Dry_P Parameter: Organism Value: A. thaliana
  misc_feature: MA Experiment 20001557 PARAMETER Experiment Name: At_Drought_Soil_Dry_P Parameter: Plant Line Value: WS
  misc_feature: MA Experiment 20001557 PARAMETER Experiment Name: At_Drought_Soil_Dry_P Parameter: Post Timepoint (hr) Value: 3
  misc_feature: MA Experiment 20001557 PARAMETER Experiment Name: At_Drought_Soil_Dry_P Parameter: Post-Treatment Value: Re-Water vs. No Drought
  misc_feature: MA Experiment 20001557 PARAMETER Experiment Name: At_Drought_Soil_Dry_P Parameter: Timepoint (day) Value: 13
  misc_feature: MA Experiment 20001557 PARAMETER Experiment Name: At_Drought_Soil_Dry_P Parameter: Treatment Value: Drought vs. No Drought
  misc_feature: MA Experiment ID: 20001558 Result: Up-regulated in Transcription
  misc_feature: MA Experiment 20001558 PARAMETER Experiment Name: At_Drought_Soil_Dry_P Parameter: Age (day) Value: 27
  misc_feature: MA Experiment 20001558 PARAMETER Experiment Name: At_Drought_Soil_Dry_P Parameter: Organism Value: A. thaliana
  misc_feature: MA Experiment 20001558 PARAMETER Experiment Name: At_Drought_Soil_Dry_P Parameter: Plant Line Value: WS
  misc_feature: MA Experiment 20001558 PARAMETER Experiment Name: At_Drought_Soil_Dry_P Parameter: Post Timepoint (hr) Value: 6
  misc_feature: MA Experiment 20001558 PARAMETER Experiment Name: At_Drought_Soil_Dry_P Parameter: Post-Treatment Value: Re-Water vs. No Drought
  misc_feature: MA Experiment 20001558 PARAMETER Experiment Name: At_Drought_Soil_Dry_P Parameter: Timepoint (day) Value: 13
  misc_feature: MA Experiment 20001558 PARAMETER Experiment Name: At_Drought_Soil_Dry_P Parameter: Treatment Value: Drought vs. No Drought
atggagttcgcaaacacgaaatgggtggctgcagcggcgagcatatggatacaaagcttcagcggagcaagctacacttttggaatttattcttctgttcttaaatcatctcaatcttatgaccaatctactcttgacaccgtctctgtctacaaagacatcggagcaaacgtaggcatcctctccggcctcttctataccgcggttgcaagccgaaaaagcggtaatggtggcttctttagtgggccatggttggttatatttgtggggctactccaatggttcgtcggatatggattcatatggatggcgacgtcaggagtgatcccacggcctcccgtggctatgatgtgtttgttcatgttcttcgctggtcattgtcagcctttctttaataccgcgattgtggtcaccgccgttcgtaacttctccgactatggtgggaccgccgttggcattatgaagggttatcttggactaagtggagcaattctggttcaaatgtaccacatcttctgtggaggtgacccaaggaattacattcttctcttggccgtggtaccatcacttctcatcttgacgttgatgcccttcgttagaacgtacgacacagtcatcgcaggcgacaagaaacacttgaacggtctctctgccatttctttgatcatcgtcacctatcttatggtcgtcatattggtcgaaaacattatcggaatgtcaatgcctatgaagatatgttcctttacctttctacttctcttgctcgcctctcctctcttagtggcggttagagcacaacgtgaagaggaacatagattcttgtctttggattttcctgttaccgagagaaccacattgcttgactctcctaagctcaattcttcttccgatgttaaagatgtcatgaccaatgacatgaacgttctcgaagcaatatgcacaacgaatttctggcttctatttgtagcaatgatatgtggaatgggttcaggacttgcgacaataaacaacatcagacagatgggcgagtcacttcgctactctacggttcaactcaattctctagtgtctctgtggagcatatggaactttctaggccggtttgggtcgggttacatctcagacacctatttacacagtcatggctggccaagaccggtattcatggccataacccttggccttatggctataggtcacattgtcatggcctccggtttactaggaagcctatatatcggatccttgttggtcggtttagcgtacggctcccaatggtcactcatgccaacaataacctctgaaatattcggggttcttcatatgggaactatattctatacaatttcgatagctagtccggttggttcgtactttttctcagtgaaggtaataggctacttgtatgacaaggtagcttctgaagatgatcattcttgttatggaaatcactgttttaggacttcgtttttgataatggcggccatggctctgcttggttctcttgtcgctcttgtgttgctcctccgcacaaagaagttttatgcgacgcttgtggctaagaggatcttgaaaaatttgataatttgtgtgcgaaaattgactagtggtctcgccgcttgccagttgccacaagtcaaaagtttcgaaattttggttgttaaaattgttttcaagattttgaatggaaatggcgatttagcggcagataaagagcgatgcggttctgataataacgaatatactattgaaaaccaaaccgtatcgctgtttcgtctcgttcaaagatttagtaataattcatatttatatgattatattaaactaaaattgaaagcattggagacaatggagagaataaacacgaaatgggtagcagcagcagcgagtatatggattcaaagctttagcggagctacatacacattcgctatctactcttcaatcctcaaatcatctcaatcttatgaccagtctactcttgatttcgtctctgtcttcaaagacatcggtggtacctttggtatcatctccggtttcctttacacggctatgacttctaagtcacgcggttttggtgggccttgggttgttgttttcgttgggttggttcagtggtttgttggattcttttttatttgggcttcggtggttgggttgattgctccgccgcctgtgccgttgatgtgcttgttcgtgttcttggctggtcactccttgccgtttttcaatacggctaatgttgtgacggctgctcggaacttttctcaatatggtgggactgctgttggtattatgcagggatttttaggactaagtggagcaattctgattcagttgtaccatgcggtctgcggtggtgaaggtaaccccgctactttcattcttctcctggccatagtaccaacgcttgtcatgttcttggctatgccttttgtaagagtttatgaaacggtgaccattagtgacaagaaacacttggatggtctctctgcgatctctatgatcattgccgcctatcttatggtcgttataacggttgaaaacgttctcggtttatcacgctcaatgcagattttctccttcatccttgtccttttgttgcttgcctctcccctcttggttgctgtaagagccctacgagaaaaaaggcagacactttcttctctggatggtcctgttctcgacacatctgccttgctcgaccctcctagttcaaacatttttcccgatggagatcatttggttgctgaagattcaaacatactggaagcaatgagcacagtgaacttttggctactcttcttggcaatgctatgcgggatgggttctggattcgcgactgtaaacaacatgagacagataggcgagtctcttcgctactcttctgttcaactcaattctctagtctctctctggagcatatggaactttctgggccggttcggggctggttatgtctcagacacattcttacacaaacacagctggccaagaccgatcttcatggccataactctaggtgttatggctataggccatatcatagttgcctctggtgtacaaggcagtctctatgccggttcagttttgatcggtatggcttacggttcgcaatggtcgctgatgccaacaatcacatcagagatatttgggatccggcatatgggaacgatttacttcacgatttcgattgcaggtcccatcgggtcgtacatcctctctgtgaaagtgataggttacttctacgacaaagtggcttctgaagatgacaattcttgctttggaagtcaatgtttcaggacatcttttatgatcatggcttctgtggctctctttggctctttggttgcttctgtattgttcttccgcacacacaagttttacaaaaaccttgtagcaaagaggaacttgaagtcgctagacagcctcttttcagcacatgctgaaccacctgtagatgtcgtccagccacatattgtcatcctttcccttgtgttccctaaagtctcagcaggagtactgaagagggatgggttggctttgcgtctcgtcctcaatgttctgcgtctgaaatcagccacgcctgagtgcttgatttcgggattgaagtgtttggttcaccttctcacaacggttgagtccattatggtgaacgaaggctctgattcctacaacatcttactgaattttgtaactcattcagacggaaaggtaagaaagctagcaagctcctgtctccgtgatgtcctgcagaaatcccatggaacaaaggcctggcaatcagtcagtggagctattacagaaatgttccagaactatttagacctcgcccataaatcggaagtgggttctaccgaaggagccagaggggcaaagcaagtgctttacattcttagcactctaaaagaatgcttggccttgatgtcaaaaaagcacattgctactctgattgagggatttaaggtgctgatgattcttcgcgatccatacattacaaggccagtgatagactctttaaatgcagtttgtctcaatccaacctccgaggttccggttgaggcgctgctcgaagtgttatctcttgcggctggactgttctcgggacatgaaacatctgctgatgccatgacctttacagcacgtttactgaaagttgggatgactaggagttttaccctaaacagagatctttgtgtggttaaacttcctagtgtgttcaatggtctgaatgatattattgcatctgaacacgaggaggctatctttgcagcaactgatgcgttgaagagtttgatattttcatgtattgacgaaagcttgatcagagaaggtgtcaatgaaatccggaattcaaacttgaatgtaaggaagcctagtccaacagtcatcgaaaagctgtgtgcaacagttgagagcttgcttgattacaagtaccatgcagtctgggatatggcttttcaagtagtttcagcaatgtttgataaattaggtgaacattctgcatattttatgaggaacaccctccagggtttatctgatatgcaagatttacctgatgaaggatttccttaccggaagcagttgcatgagtgtgtaggatcagcccttggtgctatgggacctgaaacatttttaagcattgtgcgtttaaaccttgaagctaatgatctgtctgaggtaaaagtttggctcttcccaatcttgaagcagtacacagttggaggacgcctaagtttcttcacagaggctatttttagcatggtcgaaacaatgagccacaaagctcaaaagctcaagctacaaggtcttcctgtagcatccaggagtgtggattctctcgtatattcattatgggctttgttaccttcattctgtaattatcccgtggatactgtggagagttttgccgatctggggcgaatattatgtggagttcttcaaacacaggctgagacccatggaattatatgtgccagtttgaatattctgattcaacaaaataaggaagttgttgaggggaaagaagtacctactaatgatgctagtcctgctatgcaacgagctactgctcgttatgattcacagcatgcggcagctaatttaaaagttctgcggttatgtgctcctaaattattggatgttttgtcaaggatatttcatgaatgtagcaaagatgatggcggttctcttcagtctgcgataggtaacttagcttccatagcggagaaaaagactgtttcaaagctacttttcaagactctgcaagagcttttagaggctaccaaaactgccattgcacaagatgaaagtcctgttagtgggatggatgtggataacaccgcagacaaaaattcttcttccaacttaagggcaaggttgtttgatctgttagtttcactcttaccgggtttggatggtcaagaagtagataccatattcagttctctgaagcctgcaatgcaggattccaagggcctaattcaaaagaaagcgtacaaagttctttcggtcattttgaagagttctgatggatttgtttcaaagaacctcgaggagttgcttgtgctgatgcacaatatatgccatgtctctgccaaacgccataaacttgattgtttatacttcctgttagctcatgcatcaaggactgatgatttaaaggagagaaaagacattgtttcttcttttctacccgaagttatacttgctttaaaggaggtaaataaaaaaacaagaaacagagcctatgacgtgcttgttcagattggtcatgcatacgcagatgaggagaatggtggagacaacgagaagttgcatgggtacttcgatatggtggttggttgcttggctggcgaaaaacctcaaatgattagtgctgctgtcaagggtgtagctcgtttgacatatgagttctccgatctcatatctagtgcttacaatttacttccttcaacatttcttctcctccagaggaaaaataaagaaattacaaaagtgaggcttctgttggagatgctcatcaagaaatgtggcacggaggctgtcaagtctgtgatgcctgaggaacatatgaaactcctgacaaacatccgaaagatcaaggaacgtaaagagaaaaaatatgcagctggctctgacatcagtaaatcgcagcattcaaaagatacttcatcaaaggttagcaggtggaatgataccaagatattttctgatgtatacgcggacagtgaggacagtgacggagacgacatggatgcggagtctcatggccgcagcaaggcttcctctttgttaaaatccaaggcatccgctttgagatccaagaaaagtcggaaccagagtcatcttgaagtggatgagtcagatgatgaaccgcttgacttaatggatcagcacaaaacaagattagctcttcggtcaagtgaacttcgcaaacggaaagctgactcggatgaagaagcagagtttgatgtggaagggcggctagttattcgtgaaggagagaggtctaaaaggaaggaactatctgatgcagattcagatgccaaaagtagcaaaggcagccgtttctctggaaactcatccaagaagaaccaaaagcggatgaagacatcagagtctggatacgcttacacaggcaaagagtatgcaagcaaaaaggcaagtggcgatcttaagaagaaagataaacttgaaccatatgcctattggccactcgatcgcaagatgatgagccgtagaccagagcaacgggcagttgcagtgagagggatgtcaagtgtggtcaagatggcaaagaaaatggaaggcaagagcgctgcagaagcacttgccaccaccaagttcaaaaaattcaagaggagtggtcagaagaaatcagctgggaagaagaaaaacaagtaa

SEQ ID NO: 70521 - protein, 2301 aa, Arabidopsis thaliana
  peptide (1)..(2301): Ceres Seq. ID no. 2711346
  misc_feature (304)..(467): Pfam Name: Sugar (and other) transporter Pfam Description: Sugar (and other) transporter
  misc_feature (1)..(525): Homolog of NCBI NO: 30686019 NR Description: nodulin-related protein [Arabidopsis thaliana]
  misc_feature (617)..(1139): Homolog of NCBI NO: 30686019 NR Description: nodulin-related protein [Arabidopsis thaliana]
  misc_feature (617)..(1136): Homolog of NCBI NO: 29824365 NR Description: unknown protein [Arabidopsis thaliana]
  misc_feature (617)..(1136): Homolog of NCBI NO: 15221382 NR Description: hypothetical protein; protein id: At1g74780.1
  misc_feature (1)..(523): Homolog of NCBI NO: 29824365 NR Description: unknown protein [Arabidopsis thaliana]
  misc_feature (1)..(523): Homolog of NCBI NO: 15221382 NR Description: hypothetical protein; protein id: At1g74780.1
  misc_feature (618)..(1135): Homolog of NCBI NO: 15221898 NR Description: hypothetical protein; protein id: At1g18940.1 thaliana] >gi|8778273|gb|AAF79282.1|AC068602_5 F14D16.8
  misc_feature (2)..(521): Homolog of NCBI NO: 15221898 NR Description: hypothetical protein; protein id: At1g18940.1 thaliana] >gi|8778273|gb|AAF79282.1|AC068602_5 F14D16.8
  misc_feature (790)..(1135): Homolog of NCBI NO: 34897160 NR Description: putative nodule-specific protein [Oryza sativa
  misc_feature (7)..(266): Homolog of NCBI NO: 34897160 NR Description: putative nodule-specific protein [Oryza sativa
MEFANTKWVAAAASIWIQSFSGASYTFGIYSSVLKSSQSYDQSTLDTVSVYKDIGANVGILSGLFYTAVASRKSGNGGFFSGPWLVIFVGLLQWFVGYGFIWMATSGVIPRPPVAMMCLFMFFAGHCQPFFNTAIVVTAVRNFSDYGGTAVGIMKGYLGLSGAILVQMYHIFCGGDPRNYILLLAVVPSLLILTLMPFVRTYDTVIAGDKKHLNGLSAISLIIVTYLMVVILVENIIGMSMPMKICSFTFLLLLLASPLLVAVRAQREEEHRFLSLDFPVTERTTLLDSPKLNSSSDVKDVMTNDMNVLEAICTTNFWLLFVAMICGMGSGLATINNIRQMGESLRYSTVQLNSLVSLWSIWNFLGRFGSGYISDTYLHSHGWPRPVFMAITLGLMAIGHIVMASGLLGSLYIGSLLVGLAYGSQWSLMPTITSEIFGVLHMGTIFYTISIASPVGSYFFSVKVIGYLYDKVASEDDHSCYGNHCFRTSFLIMAAMALLGSLVALVLLLRTKKFYATLVAKRILKNLIICVRKLTSGLAACQLPQVKSFEILVVKIVFKILNGNGDLAADKERCGSDNNEYTIENQTVSLFRLVQRFSNNSYLYDYIKLKLKALETMERINTKWVAAAASIWIQSFSGATYTFAIYSSILKSSQSYDQSTLDFVSVFKDIGGTFGIISGFLYTAMTSKSRGFGGPWVVVFVGLVQWFVGFFFIWASVVGLIAPPPVPLMCLFVFLAGHSLPFFNTANVVTAARNFSQYGGTAVGIMQGFLGLSGAILIQLYHAVCGGEGNPATFILLLAIVPTLVMFLAMPFVRVYETVTISDKKHLDGLSAISMIIAAYLMVVITVENVLGLSRSMQIFSFILVLLLLASPLLVAVRALREKRQTLSSLDGPVLDTSALLDPPSSNIFPDGDHLVAEDSNILEAMSTVNFWLLFLAMLCGMGSGFATVNNMRQIGESLRYSSVQLNSLVSLWSIWNFLGRFGAGYVSDTFLHKHSWPRPIFMAITLGVMAIGHIIVASGVQGSLYAGSVLIGMAYGSQWSLMPTITSEIFGIRHMGTIYFTISIAGPIGSYILSVKVIGYFYDKVASEDDNSCFGSQCFRTSFMIMASVALFGSLVASVLFFRTHKFYKNLVAKRNLKSLDSLFSAHAEPPVDVVQPHIVILSLVFPKVSAGVLKRDGLALRLVLNVLRLKSATPECLISGLKCLVHLLTTVESIMVNEGSDSYNILLNFVTHSDGKVRKLASSCLRDVLQKSHGTKAWQSVSGAITEMFQNYLDLAHKSEVGSTEGARGAKQVLYILSTLKECLALMSKKHIATLIEGFKVLMILRDPYITRPVIDSLNAVCLNPTSEVPVEALLEVLSLAAGLFSGHETSADAMTFTARLLKVGMTRSFTLNRDLCVVKLPSVFNGLNDIIASEHEEAIFAATDALKSLIFSCIDESLIREGVNEIRNSNLNVRKPSPTVIEKLCATVESLLDYKYHAVWDMAFQVVSAMFDKLGEHSAYFMRNTLQGLSDMQDLPDEGFPYRKQLHECVGSALGAMGPETFLSIVRLNLEANDLSEVKVWLFPILKQYTVGGRLSFFTEAIFSMVETMSHKAQKLKLQGLPVASRSVDSLVYSLWALLPSFCNYPVDTVESFADLGRILCGVLQTQAETHGIICASLNILIQQNKEVVEGKEVPTNDASPAMQRATARYDSQHAAANLKVLRLCAPKLLDVLSRIFHECSKDDGGSLQSAIGNLASIAEKKTVSKLLFKTLQELLEATKTAIAQDESPVSGMDVDNTADKNSSSNLRARLFDLLVSLLPGLDGQEVDTIFSSLKPAMQDSKGLIQKKAYKVLSVILKSSDGFVSKNLEELLVLMHNICHVSAKRHKLDCLYFLLAHASRTDDLKERKDIVSSFLPEVILALKEVNKKTRNRAYDVLVQIGHAYADEENGGDNEKLHGYFDMVVGCLAGEKPQMISAAVKGVARLTYEFSDLISSAYNLLPSTFLLLQRKNKEITKVRLLLEMLIKKCGTEAVKSVMPEEHMKLLTNIRKIKERKEKKYAAGSDISKSQHSKDTSSKVSRWNDTKIFSDVYADSEDSDGDDMDAESHGRSKASSLLKSKASALRSKKSRNQSHLEVDESDDEPLDLMDQHKTRLALRSSELRKRKADSDEEAEFDVEGRLVIREGERSKRKELSDADSDAKSSKGSRFSGNSSKKNQKRMKTSESGYAYTGKEYASKKASGDLKKKDKLEPYAYWPLDRKMMSRRPEQRAVAVRGMSSVVKMAKKMEGKSAAEALATTKFKKFKRSGQKKSAGKKKNK

SEQ ID NO: 70522 - protein, 2199 aa, Arabidopsis thaliana
  peptide (1)..(2199): Ceres Seq. ID no. 2711347
  misc_feature (202)..(365): Pfam Name: Sugar (and other) transporter Pfam Description: Sugar (and other) transporter
  misc_feature (1)..(423): Homolog of NCBI NO: 30686019 NR Description: nodulin-related protein [Arabidopsis thaliana]
  misc_feature (515)..(1037): Homolog of NCBI NO: 30686019 NR Description: nodulin-related protein [Arabidopsis thaliana]
  misc_feature (515)..(1034): Homolog of NCBI NO: 29824365 NR Description: unknown protein [Arabidopsis thaliana]
  misc_feature (515)..(1034): Homolog of NCBI NO: 15221382 NR Description: hypothetical protein; protein id: At1g74780.1
  misc_feature (1)..(421): Homolog of NCBI NO: 29824365 NR Description: unknown protein [Arabidopsis thaliana]
  misc_feature (1)..(421): Homolog of NCBI NO: 15221382 NR Description: hypothetical protein; protein id: At1g74780.1
  misc_feature (516)..(1033): Homolog of NCBI NO: 15221898 NR Description: hypothetical protein; protein id: At1g18940.1 thaliana] >gi|8778273|gb|AAF79282.1|AC068602_5 F14D16.8
  misc_feature (1)..(419): Homolog of NCBI NO: 15221898 NR Description: hypothetical protein; protein id: At1g18940.1 thaliana] >gi|8778273|gb|AAF79282.1|AC068602_5 F14D16.8
  misc_feature (688)..(1033): Homolog of NCBI NO: 34897160 NR Description: putative nodule-specific protein [Oryza sativa
  misc_feature (1)..(164): Homolog of NCBI NO: 34897160 NR Description: putative nodule-specific protein [Oryza sativa
MATSGVIPRPPVAMMCLFMFFAGHCQPFFNTAIVVTAVRNFSDYGGTAVGIMKGYLGLSGAILVQMYHIFCGGDPRNYILLLAVVPSLLILTLMPFVRTYDTVIAGDKKHLNGLSAISLIIVTYLMVVILVENIIGMSMPMKICSFTFLLLLLASPLLVAVRAQREEEHRFLSLDFPVTERTTLLDSPKLNSSSDVKDVMTNDMNVLEAICTTNFWLLFVAMICGMGSGLATINNIRQMGESLRYSTVQLNSLVSLWSIWNFLGRFGSGYISDTYLHSHGWPRPVFMAITLGLMAIGHIVMASGLLGSLYIGSLLVGLAYGSQWSLMPTITSEIFGVLHMGTIFYTISIASPVGSYFFSVKVIGYLYDKVASEDDHSCYGNHCFRTSFLIMAAMALLGSLVALVLLLRTKKFYATLVAKRILKNLIICVRKLTSGLAACQLPQVKSFEILVVKIVFKILNGNGDLAADKERCGSDNNEYTIENQTVSLFRLVQRFSNNSYLYDYIKLKLKALETMERINTKWVAAAASIWIQSFSGATYTFAIYSSILKSSQSYDQSTLDFVSVFKDIGGTFGIISGFLYTAMTSKSRGFGGPWVVVFVGLVQWFVGFFFIWASVVGLIAPPPVPLMCLFVFLAGHSLPFFNTANVVTAARNFSQYGGTAVGIMQGFLGLSGAILIQLYHAVCGGEGNPATFILLLAIVPTLVMFLAMPFVRVYETVTISDKKHLDGLSAISMIIAAYLMVVITVENVLGLSRSMQIFSFILVLLLLASPLLVAVRALREKRQTLSSLDGPVLDTSALLDPPSSNIFPDGDHLVAEDSNILEAMSTVNFWLLFLAMLCGMGSGFATVNNMRQIGESLRYSSVQLNSLVSLWSIWNFLGRFGAGYVSDTFLHKHSWPRPIFMAITLGVMAIGHIIVASGVQGSLYAGSVLIGMAYGSQWSLMPTITSEIFGIRHMGTIYFTISIAGPIGSYILSVKVIGYFYDKVASEDDNSCFGSQCFRTSFMIMASVALFGSLVASVLFFRTHKFYKNLVAKRNLKSLDSLFSAHAEPPVDVVQPHIVILSLVFPKVSAGVLKRDGLALRLVLNVLRLKSATPECLISGLKCLVHLLTTVESIMVNEGSDSYNILLNFVTHSDGKVRKLASSCLRDVLQKSHGTKAWQSVSGAITEMFQNYLDLAHKSEVGSTEGARGAKQVLYILSTLKECLALMSKKHIATLIEGFKVLMILRDPYITRPVIDSLNAVCLNPTSEVPVEALLEVLSLAAGLFSGHETSADAMTFTARLLKVGMTRSFTLNRDLCVVKLPSVFNGLNDIIASEHEEAIFAATDALKSLIFSCIDESLIREGVNEIRNSNLNVRKPSPTVIEKLCATVESLLDYKYHAVWDMAFQVVSAMFDKLGEHSAYFMRNTLQGLSDMQDLPDEGFPYRKQLHECVGSALGAMGPETFLSIVRLNLEANDLSEVKVWLFPILKQYTVGGRLSFFTEAIFSMVETMSHKAQKLKLQGLPVASRSVDSLVYSLWALLPSFCNYPVDTVESFADLGRILCGVLQTQAETHGIICASLNILIQQNKEVVEGKEVPTNDASPAMQRATARYDSQHAAANLKVLRLCAPKLLDVLSRIFHECSKDDGGSLQSAIGNLASIAEKKTVSKLLFKTLQELLEATKTAIAQDESPVSGMDVDNTADKNSSSNLRARLFDLLVSLLPGLDGQEVDTIFSSLKPAMQDSKGLIQKKAYKVLSVILKSSDGFVSKNLEELLVLMHNICHVSAKRHKLDCLYFLLAHASRTDDLKERKDIVSSFLPEVILALKEVNKKTRNRAYDVLVQIGHAYADEENGGDNEKLHGYFDMVVGCLAGEKPQMISAAVKGVARLTYEFSDLISSAYNLLPSTFLLLQRKNKEITKVRLLLEMLIKKCGTEAVKSVMPEEHMKLLTNIRKIKERKEKKYAAGSDISKSQHSKDTSSKVSRWNDTKIFSDVYADSEDSDGDDMDAESHGRSKASSLLKSKASALRSKKSRNQSHLEVDESDDEPLDLMDQHKTRLALRSSELRKRKADSDEEAEFDVEGRLVIREGERSKRKELSDADSDAKSSKGSRFSGNSSKKNQKRMKTSESGYAYTGKEYASKKASGDLKKKDKLEPYAYWPLDRKMMSRRPEQRAVAVRGMSSVVKMAKKMEGKSAAEALATTKFKKFKRSGQKKSAGKKKNK

SEQ ID NO: 70523 - protein, 2186 aa, Arabidopsis thaliana
  peptide (1)..(2186): Ceres Seq. ID no. 2711348
  misc_feature (189)..(352): Pfam Name: Sugar (and other) transporter Pfam Description: Sugar (and other) transporter
  misc_feature (1)..(410): Homolog of NCBI NO: 30686019 NR Description: nodulin-related protein [Arabidopsis thaliana]
  misc_feature (502)..(1024): Homolog of NCBI NO: 30686019 NR Description: nodulin-related protein [Arabidopsis thaliana]
  misc_feature (502)..(1021): Homolog of NCBI NO: 29824365 NR Description: unknown protein [Arabidopsis thaliana]
  misc_feature (502)..(1021): Homolog of NCBI NO: 15221382 NR Description: hypothetical protein; protein id: At1g74780.1
  misc_feature (1)..(408): Homolog of NCBI NO: 29824365 NR Description: unknown protein [Arabidopsis thaliana]
  misc_feature (1)..(408): Homolog of NCBI NO: 15221382 NR Description: hypothetical protein; protein id: At1g74780.1
  misc_feature (503)..(1020): Homolog of NCBI NO: 15221898 NR Description: hypothetical protein; protein id: At1g18940.1 thaliana] >gi|8778273|gb|AAF79282.1|AC068602_5 F14D16.8
  misc_feature (1)..(406): Homolog of NCBI NO: 15221898 NR Description: hypothetical protein; protein id: At1g18940.1 thaliana] >gi|8778273|gb|AAF79282.1|AC068602_5 F14D16.8
  misc_feature (675)..(1020): Homolog of NCBI NO: 34897160 NR Description: putative nodule-specific protein [Oryza sativa
  misc_feature (1)..(151): Homolog of NCBI NO: 34897160 NR Description: putative nodule-specific protein [Oryza sativa
MMCLFMFFAGHCQPFFNTAIVVTAVRNFSDYGGTAVGIMKGYLGLSGAILVQMYHIFCGGDPRNYILLLAVVPSLLILTLMPFVRTYDTVIAGDKKHLNGLSAISLIIVTYLMVVILVENIIGMSMPMKICSFTFLLLLLASPLLVAVRAQREEEHRFLSLDFPVTERTTLLDSPKLNSSSDVKDVMTNDMNVLEAICTTNFWLLFVAMICGMGSGLATINNIRQMGESLRYSTVQLNSLVSLWSIWNFLGRFGSGYISDTYLHSHGWPRPVFMAITLGLMAIGHIVMASGLLGSLYIGSLLVGLAYGSQWSLMPTITSEIFGVLHMGTIFYTISIASPVGSYFFSVKVIGYLYDKVASEDDHSCYGNHCFRTSFLIMAAMALLGSLVALVLLLRTKKFYATLVAKRILKNLIICVRKLTSGLAACQLPQVKSFEILVVKIVFKILNGNGDLAADKERCGSDNNEYTIENQTVSLFRLVQRFSNNSYLYDYIKLKLKALETMERINTKWVAAAASIWIQSFSGATYTFAIYSSILKSSQSYDQSTLDFVSVFKDIGGTFGIISGFLYTAMTSKSRGFGGPWVVVFVGLVQWFVGFFFIWASVVGLIAPPPVPLMCLFVFLAGHSLPFFNTANVVTAARNFSQYGGTAVGIMQGFLGLSGAILIQLYHAVCGGEGNPATFILLLAIVPTLVMFLAMPFVRVYETVTISDKKHLDGLSAISMIIAAYLMVVITVENVLGLSRSMQIFSFILVLLLLASPLLVAVRALREKRQTLSSLDGPVLDTSALLDPPSSNIFPDGDHLVAEDSNILEAMSTVNFWLLFLAMLCGMGSGFATVNNMRQIGESLRYSSVQLNSLVSLWSIWNFLGRFGAGYVSDTFLHKHSWPRPIFMAITLGVMAIGHIIVASGVQGSLYAGSVLIGMAYGSQWSLMPTITSEIFGIRHMGTIYFTISIAGPIGSYILSVKVIGYFYDKVASEDDNSCFGSQCFRTSFMIMASVALFGSLVASVLFFRTHKFYKNLVAKRNLKSLDSLFSAHAEPPVDVVQPHIVILSLVFPKVSAGVLKRDGLALRLVLNVLRLKSATPECLISGLKCLVHLLTTVESIMVNEGSDSYNILLNFVTHSDGKVRKLASSCLRDVLQKSHGTKAWQSVSGAITEMFQNYLDLAHKSEVGSTEGARGAKQVLYILSTLKECLALMSKKHIATLIEGFKVLMILRDPYITRPVIDSLNAVCLNPTSEVPVEALLEVLSLAAGLFSGHETSADAMTFTARLLKVGMTRSFTLNRDLCVVKLPSVFNGLNDIIASEHEEAIFAATDALKSLIFSCIDESLIREGVNEIRNSNLNVRKPSPTVIEKLCATVESLLDYKYHAVWDMAFQVVSAMFDKLGEHSAYFMRNTLQGLSDMQDLPDEGFPYRKQLHECVGSALGAMGPETFLSIVRLNLEANDLSEVKVWLFPILKQYTVGGRLSFFTEAIFSMVETMSHKAQKLKLQGLPVASRSVDSLVYSLWALLPSFCNYPVDTVESFADLGRILCGVLQTQAETHGIICASLNILIQQNKEVVEGKEVPTNDASPAMQRATARYDSQHAAANLKVLRLCAPKLLDVLSRIFHECSKDDGGSLQSAIGNLASIAEKKTVSKLLFKTLQELLEATKTAIAQDESPVSGMDVDNTADKNSSSNLRARLFDLLVSLLPGLDGQEVDTIFSSLKPAMQDSKGLIQKKAYKVLSVILKSSDGFVSKNLEELLVLMHNICHVSAKRHKLDCLYFLLAHASRTDDLKERKDIVSSFLPEVILALKEVNKKTRNRAYDVLVQIGHAYADEENGGDNEKLHGYFDMVVGCLAGEKPQMISAAVKGVARLTYEFSDLISSAYNLLPSTFLLLQRKNKEITKVRLLLEMLIKKCGTEAVKSVMPEEHMKLLTNIRKIKERKEKKYAAGSDISKSQHSKDTSSKVSRWNDTKIFSDVYADSEDSDGDDMDAESHGRSKASSLLKSKASALRSKKSRNQSHLEVDESDDEPLDLMDQHKTRLALRSSELRKRKADSDEEAEFDVEGRLVIREGERSKRKELSDADSDAKSSKGSRFSGNSSKKNQKRMKTSESGYAYTGKEYASKKASGDLKKKDKLEPYAYWPLDRKMMSRRPEQRAVAVRGMSSVVKMAKKMEGKSAAEALATTKFKKFKRSGQKKSAGKKKNK

SEQ ID NO: 70524 - DNA, 1425 bp, Arabidopsis thaliana
  misc_feature (1)..(1425): Ceres Seq. ID no. 2711390
  misc_feature: MA Experiment ID: 108462 Result: Up-regulated in Transcription
  misc_feature: MA Experiment 108462 PARAMETER Experiment Name: At_Germinating_Seeds_cDNA_P Parameter: Age (day) Value: 2 vs. 0
  misc_feature: MA Experiment 108462 PARAMETER Experiment Name: At_Germinating_Seeds_cDNA_P Parameter: Tissue Value: Germinating Seeds
  misc_feature: MA Experiment ID: 108464 Result: Up-regulated in Transcription
  misc_feature: MA Experiment 108464 PARAMETER Experiment Name: At_Germinating_Seeds_cDNA_P Parameter: Age (day) Value: 4 vs. 0
  misc_feature: MA Experiment 108464 PARAMETER Experiment Name: At_Germinating_Seeds_cDNA_P Parameter: Tissue Value: Germinating Seeds
atggtgtttttccgcagcgtatcggcctttactaggctgaggtctcgcgtccagggccaacaatcttcactcagcaattctgtcagatggattcagatgcagagctctaccgacctggacctgaagtcgcagctgcaagagttaattccggaacagcaggaccgtctgaagaaactgaagtcagaacatgggaaggtccaactgggaaacatcactgttgatatggttattggtggaatgagagggatgactggattgctttgggaaacctcattgcttgacccggaagagggtattcgctttaggggattgtcgattcctgagtgccagaaagtattacctactgcccagtctggagctgaaccattaccggagggtcttttgtggcttctcttaactggaaaggtacctagcaaagagcaagttgaagcactgtcgaaagacttggcgaaccgtgctgctgtgccagattatgtgtacaatgccatcgatgctctgccttccacagctcatccaatgactcaatttgctagcggtgttatggccctccaggtgcaaagtgagtttcaaaaggcatatgagaatggaattcataagtcaaagttctgggagccaacatatgaggattgcctcaacctgattgctcgtgttcctgttgtagctgcatatgtttatcgaaggatgtataagaatggtgattccattccctcagataaatctttggattatggtgcaaatttttcccacatgttgggatttgatgatgaaaaggtgaaagagctcatgaggctttacatcaccatccacagtgatcatgaaggtggaaatgttagtgctcacactggtcacctggttggtagtgcactttcagacccatatctgtcatttgcagctgcattaaatggtttagctgggccactccatggtttggctaatcaggaagttttgctttggatcaaatcagtcgtagaggaatgtggagaagatatatcaaaagaacagttgaaagaatatgtttggaaaacattaaacagtggcaaggttattccgggatatggtcacggtgttctgcgcaatactgatccaagatatgtatgccaaagagaatttgccttgaagcatctacctgacgaccctcttttccagctggtgtcaaagctttatgaagttgtgcctcctgttctcactgagcttggaaaggtgaagaacccgtggccaaatgttgatgctcacagtggggtcttgctgaaccactatggtctaaccgaagcaaggtactacaccgtgctctttggtgtttcaaggagtcttggcatctgctctcagcttatatgggaccgagctcttggacttgcacttgagaggccaaagagtgttaccatggactggcttgaagcccattgtaagaaagcttcatctgcttaa

SEQ ID NO: 70525 - protein, 474 aa, Arabidopsis thaliana
  peptide (1)..(474): Ceres Seq. ID no. 2711391
  misc_feature (79)..(456): Pfam Name: Citrate synthase Pfam Description: Citrate synthase
  misc_feature (1)..(474): Homolog of NCBI NO: 30689693 NR Description: citrate synthase [Arabidopsis thaliana]
  misc_feature (1)..(474): Homolog of NCBI NO: 18406515 NR Description: citrate synthase; protein id: At2g44350.1, by cDNA: 16528., supported by cDNA: gi_14423561 [Arabidopsis >gi|27735166|sp|P20115|CISY_ARATH Citrate synthase, mitochondrial
  misc_feature (1)..(474): Homolog of NCBI NO: 21553775 NR Description: citrate synthase [Arabidopsis thaliana]
  misc_feature (1)..(472): Homolog of NCBI NO: 8928010 NR Description: Citrate synthase, mitochondrial precursor
  misc_feature (1)..(472): Homolog of NCBI NO: 1352088 NR Description: Citrate synthase, mitochondrial precursor
  misc_feature (1)..(473): Homolog of NCBI NO: 11066954 NR Description: citrate synthase [Oryza sativa]
  misc_feature (1)..(474): Homolog of NCBI NO: 15982952 NR Description: citrate synthase [Prunus persica]
  misc_feature (1)..(471): Homolog of NCBI NO: 1556429 NR Description: citrate synthase [Nicotiana tabacum]
  misc_feature (1)..(474): Homolog of NCBI NO: 68230 NR Description: citrate (si)-synthase (EC 4.1.3.7) precursor,
  misc_feature (36)..(470): Homolog of NCBI NO: 1556380 NR Description: citrate (si)-synthase [Beta vulgaris]
MVFFRSVSAFTRLRSRVQGQQSSLSNSVRWIQMQSSTDLDLKSQLQELIPEQQDRLKKLKSEHGKVQLGNITVDMVIGGMRGMTGLLWETSLLDPEEGIRFRGLSIPECQKVLPTAQSGAEPLPEGLLWLLLTGKVPSKEQVEALSKDLANRAAVPDYVYNAIDALPSTAHPMTQFASGVMALQVQSEFQKAYENGIHKSKFWEPTYEDCLNLIARVPVVAAYVYRRMYKNGDSIPSDKSLDYGANFSHMLGFDDEKVKELMRLYITIHSDHEGGNVSAHTGHLVGSALSDPYLSFAAALNGLAGPLHGLANQEVLLWIKSVVEECGEDISKEQLKEYVWKTLNSGKVIPGYGHGVLRNTDPRYVCQREFALKHLPDDPLFQLVSKLYEVVPPVLTELGKVKNPWPNVDAHSGVLLNHYGLTEARYYTVLFGVSRSLGICSQLIWDRALGLALERPKSVTMDWLEAHCKKASSA

SEQ ID NO: 70526 - protein, 442 aa, Arabidopsis thaliana; identical to SEQ ID NO: 30073
  peptide (1)..(442): Ceres Seq. ID no. 2711392
  misc_feature (47)..(424): Pfam Name: Citrate synthase Pfam Description: Citrate synthase
  misc_feature (1)..(442): Homolog of NCBI NO: 30689693 NR Description: citrate synthase [Arabidopsis thaliana]
  misc_feature (1)..(442): Homolog of NCBI NO: 18406515 NR Description: citrate synthase; protein id: At2g44350.1, by cDNA: 16528., supported by cDNA: gi_14423561 [Arabidopsis >gi|27735166|sp|P20115|CISY_ARATH Citrate synthase, mitochondrial
  misc_feature (1)..(442): Homolog of NCBI NO: 21553775 NR Description: citrate synthase [Arabidopsis thaliana]
  misc_feature (1)..(440): Homolog of NCBI NO: 8928010 NR Description: Citrate synthase, mitochondrial precursor
  misc_feature (1)..(440): Homolog of NCBI NO: 1352088 NR Description: Citrate synthase, mitochondrial precursor
  misc_feature (1)..(441): Homolog of NCBI NO: 11066954 NR Description: citrate synthase [Oryza sativa]
  misc_feature (1)..(442): Homolog of NCBI NO: 15982952 NR Description: citrate synthase [Prunus persica]
  misc_feature (1)..(439): Homolog of NCBI NO: 1556429 NR Description: citrate synthase [Nicotiana tabacum]
  misc_feature (1)..(442): Homolog of NCBI NO: 68230 NR Description: citrate (si)-synthase (EC 4.1.3.7) precursor,
  misc_feature (4)..(438): Homolog of NCBI NO: 1556380 NR Description: citrate (si)-synthase [Beta vulgaris]

SEQ ID NO: 70527 - protein, 400 aa, Arabidopsis thaliana; identical to SEQ ID NO: 30074
  peptide (1)..(400): Ceres Seq. ID no. 2711393
  misc_feature (5)..(382): Pfam Name: Citrate synthase Pfam Description: Citrate synthase
  misc_feature (1)..(400): Homolog of NCBI NO: 30689693 NR Description: citrate synthase [Arabidopsis thaliana]
  misc_feature (1)..(400): Homolog of NCBI NO: 18406515 NR Description: citrate synthase; protein id: At2g44350.1, by cDNA: 16528., supported by cDNA: gi_14423561 [Arabidopsis >gi|27735166|sp|P20115|CISY_ARATH Citrate synthase, mitochondrial
  misc_feature (1)..(400): Homolog of NCBI NO: 21553775 NR Description: citrate synthase [Arabidopsis thaliana]
  misc_feature (1)..(398): Homolog of NCBI NO: 8928010 NR Description: Citrate synthase, mitochondrial precursor
  misc_feature (1)..(398): Homolog of NCBI NO: 1352088 NR Description: Citrate synthase, mitochondrial precursor
  misc_feature (1)..(399): Homolog of NCBI NO: 11066954 NR Description: citrate synthase [Oryza sativa]
  misc_feature (1)..(400): Homolog of NCBI NO: 15982952 NR Description: citrate synthase [Prunus persica]
  misc_feature (1)..(397): Homolog of NCBI NO: 1556429 NR Description: citrate synthase [Nicotiana tabacum]
  misc_feature (1)..(400): Homolog of NCBI NO: 68230 NR Description: citrate (si)-synthase (EC 4.1.3.7) precursor,
  misc_feature (1)..(396): Homolog of NCBI NO: 1556380 NR Description: citrate (si)-synthase [Beta vulgaris]

SEQ ID NO: 70528 - DNA, 1242 bp, Arabidopsis thaliana
  misc_feature (1)..(1242): Ceres Seq. ID no. 2711459
  misc_feature: MA Experiment ID: 20000327 Result: Up-regulated in Transcription
  misc_feature: MA Experiment 20000327 PARAMETER Experiment Name: At_42deg_Heat_Sub_P Parameter: Age (day) Value: 14
  misc_feature: MA Experiment 20000327 PARAMETER Experiment Name: At_42deg_Heat_Sub_P Parameter: Organism Value: A. thaliana
  misc_feature: MA Experiment 20000327 PARAMETER Experiment Name: At_42deg_Heat_Sub_P Parameter: Plant Line Value: WS
  misc_feature: MA Experiment 20000327 PARAMETER Experiment Name: At_42deg_Heat_Sub_P Parameter: Temperature (deg C) Value: 42 vs. 22
  misc_feature: MA Experiment 20000327 PARAMETER Experiment Name: At_42deg_Heat_Sub_P Parameter: Timepoint (hr) Value: 1
  misc_feature: MA Experiment 20000327 PARAMETER Experiment Name: At_42deg_Heat_Sub_P Parameter: Tissue Value: Aerial
  misc_feature: MA Experiment ID: 20000328 Result: Up-regulated in Transcription
  misc_feature: MA Experiment 20000328 PARAMETER Experiment Name: At_42deg_Heat_Sub_P Parameter: Age (day) Value: 14
  misc_feature: MA Experiment 20000328 PARAMETER Experiment Name: At_42deg_Heat_Sub_P Parameter: Organism Value: A. thaliana
  misc_feature: MA Experiment 20000328 PARAMETER Experiment Name: At_42deg_Heat_Sub_P Parameter: Plant Line Value: WS
  misc_feature: MA Experiment 20000328 PARAMETER Experiment Name: At_42deg_Heat_Sub_P Parameter: Temperature (deg C) Value: 42 vs. 22
  misc_feature: MA Experiment 20000328 PARAMETER Experiment Name: At_42deg_Heat_Sub_P Parameter: Timepoint (hr) Value: 6
  misc_feature: MA Experiment 20000328 PARAMETER Experiment Name: At_42deg_Heat_Sub_P Parameter: Tissue Value: Aerial
  misc_feature: MA Experiment ID: 20000355 Result: Up-regulated in Transcription
  misc_feature: MA Experiment 20000355 PARAMETER Experiment Name: At_Siliques_Sub_P Parameter: Age (day) Value: 21
  misc_feature: MA Experiment 20000355 PARAMETER Experiment Name: At_Siliques_Sub_P Parameter: Organism Value: A. thaliana
  misc_feature: MA Experiment 20000355 PARAMETER Experiment Name: At_Siliques_Sub_P Parameter: Plant Line Value: WS
  misc_feature: MA Experiment 20000355 PARAMETER Experiment Name: At_Siliques_Sub_P Parameter: Tissue Value: Less Than 5mm Siliques vs. Whole Plant
atgagttctcacgtggttgatgatcaaaggcaacctaataactcaatctcgagtttaagttctaaactaaccaagccatggatcacaaccacaatcttcatctttgtcttcttcttcttcatcatcctcgttggagcttctctcaggtggatggacatgtttttaatcggtggaggtagaatcaaagtgacaccaatatttacaagaaacaccaacgcaactatccccaaggaaaaactcactacaccactgaacttcacattgcaatgctcactagaccagaacatagcaacccagacgtgtcctgcaagcaacccggagaaatcacaacctagtaaggacgagccagagacttgtccagactacttcaggtggatccacaaggatcttgaagcatggcgtgagactggaatcactcgagagacgttagagagagcaagtgataaagctcacttccggctgataataaaaggaggaagagtgtatgtgcatcaatacaagaaatcttttcagacaagagatgttttcactatatggggaatagtacagctgctaaggatgtatcctggtcaagtccctgatcttgagcttctcttcatgtgccatgactcacctgaaatctggagaagagactataggccaagaccaggagtcaatgtgacgtggccacctcctccactcttccactattgtggacattccggtgctttcgacattgtcttccctgactggagcttttggggctggccggagattaacataaaggagtggaataaacagtcggagttgataagtgaagggataaagaaggtgaagtgggaagagagagagccttacgcatattggaaggggaatcctggagttgccatggccagagctatagggagaaatggaagtgggtatgtgcgaaagaatctaaagatgaagtatgtgtatgattacatgttgcatctactgcaaagctatgggaagttgatgaagatgaatgtagaagtgcctcaaggagccaaggaagtgtgtccggagacaatggcttgtccaatcaatggaggccgaatgagacaatctatggatgactcattggttatgtctccgagcgttaaggctacttgtgagatgcctccaccttttgaagaagatgagctcaaaaagtttcttgagaagaaagaaagtgttgagaaagaagttgagaagtggactaatgagtattggcaggaacagaagaagattcttaaacattga

SEQ ID NO: 70529 - protein, 413 aa, Arabidopsis thaliana
  peptide (1)..(413): Ceres Seq. ID no. 2711460
  misc_feature (114)..(405): Pfam Name: Arabidopsis thaliana protein of unknown function Pfam Description: Arabidopsis thaliana protein of unknown
  misc_feature (1)..(413): Homolog of NCBI NO: 15225901 NR Description: hypothetical protein; protein id: At2g45840.1
  misc_feature (281)..(413): Homolog of NCBI NO: 30267795 NR Description: hypothetical protein [Arabidopsis thaliana]
  misc_feature (187)..(292): Homolog of NCBI NO: 30267795 NR Description: hypothetical protein [Arabidopsis thaliana]
  misc_feature (13)..(292): Homolog of NCBI NO: 15229061 NR Description: putative protein; protein id: At3g48980.1
  misc_feature (282)..(409): Homolog of NCBI NO: 15229061 NR Description: putative protein; protein id: At3g48980.1
  misc_feature (69)..(314): Homolog of NCBI NO: 7486461 NR Description: hypothetical protein At2g45830 [imported] - thaliana >gi|3386611|gb|AAC28541.1| unknown protein [Arabidopsis
  misc_feature (281)..(412): Homolog of NCBI NO: 7486461 NR Description: hypothetical protein At2g45830 [imported] - thaliana >gi|3386611|gb|AAC28541.1| unknown protein [Arabidopsis
  misc_feature (63)..(292): Homolog of NCBI NO: 15237842 NR Description: putative protein; protein id: At5g23850.1 thaliana] >gi|10176852|dbj|BAB10058.1| contains similarity to
  misc_feature (282)..(409): Homolog of NCBI NO: 15237842 NR Description: putative protein; protein id: At5g23850.1 thaliana] >gi|10176852|dbj|BAB10058.1| contains similarity to
  misc_feature (282)..(404): Homolog of NCBI NO: 15233072 NR Description: putative protein; protein id: At3g61280.1
MSSHVVDDQRQPNNSISSLSSKLTKPWITTTIFIFVFFFFIILVGASLRWMDMFLIGGGRIKVTPIFTRNTNATIPKEKLTTPLNFTLQCSLDQNIATQTCPASNPEKSQPSKDEPETCPDYFRWIHKDLEAWRETGITRETLERASDKAHFRLIIKGGRVYVHQYKKSFQTRDVFTIWGIVQLLRMYPGQVPDLELLFMCHDSPEIWRRDYRPRPGVNVTWPPPPLFHYCGHSGAFDIVFPDWSFWGWPEINIKEWNKQSELISEGIKKVKWEEREPYAYWKGNPGVAMARAIGRNGSGYVRKNLKMKYVYDYMLHLLQSYGKLMKMNVEVPQGAKEVCPETMACPINGGRMRQSMDDSLVMSPSVKATCEMPPPFEEDELKKFLEKKESVEKEVEKWTNEYWQEQKKILKH

SEQ ID NO: 70530 - protein, 363 aa, Arabidopsis thaliana
  peptide (1)..(363): Ceres Seq. ID no. 2711461
  misc_feature (64)..(355): Pfam Name: Arabidopsis thaliana protein of unknown function Pfam Description: Arabidopsis thaliana protein of unknown
  misc_feature (1)..(242): Homolog of NCBI NO: 15229061 NR Description: putative protein; protein id: At3g48980.1
  misc_feature (232)..(359): Homolog of NCBI NO: 15229061 NR Description: putative protein; protein id: At3g48980.1
  misc_feature (19)..(264): Homolog of NCBI NO: 7486461 NR Description: hypothetical protein At2g45830 [imported] - thaliana >gi|3386611|gb|AAC28541.1| unknown protein [Arabidopsis
  misc_feature (231)..(362): Homolog of NCBI NO: 7486461 NR Description: hypothetical protein At2g45830 [imported] - thaliana >gi|3386611|gb|AAC28541.1| unknown protein [Arabidopsis
  misc_feature (231)..(363): Homolog of NCBI NO: 30267795 NR Description: hypothetical protein [Arabidopsis thaliana]
  misc_feature (137)..(242): Homolog of NCBI NO: 30267795 NR Description: hypothetical protein [Arabidopsis thaliana]
  misc_feature (1)..(363): Homolog of NCBI NO: 15225901 NR Description: hypothetical protein; protein id: At2g45840.1
  misc_feature (13)..(242): Homolog of NCBI NO: 15237842 NR Description: putative protein; protein id: At5g23850.1 thaliana] >gi|10176852|dbj|BAB10058.1| contains similarity to
  misc_feature (232)..(359): Homolog of NCBI NO: 15237842 NR Description: putative protein; protein id: At5g23850.1 thaliana] >gi|10176852|dbj|BAB10058.1| contains similarity to
  misc_feature (232)..(354): Homolog of NCBI NO: 15233072 NR Description: putative protein; protein id: At3g61280.1
MDMFLIGGGRIKVTPIFTRNTNATIPKEKLTTPLNFTLQCSLDQNIATQTCPASNPEKSQPSKDEPETCPDYFRWIHKDLEAWRETGITRETLERASDKAHFRLIIKGGRVYVHQYKKSFQTRDVFTIWGIVQLLRMYPGQVPDLELLFMCHDSPEIWRRDYRPRPGVNVTWPPPPLFHYCGHSGAFDIVFPDWSFWGWPEINIKEWNKQSELISEGIKKVKWEEREPYAYWKGNPGVAMARAIGRNGSGYVRKNLKMKYVYDYMLHLLQSYGKLMKMNVEVPQGAKEVCPETMACPINGGRMRQSMDDSLVMSPSVKATCEMPPPFEEDELKKFLEKKESVEKEVEKWTNEYWQEQKKILKH

SEQ ID NO: 70531 - protein, 361 aa, Arabidopsis thaliana
  peptide (1)..(361): Ceres Seq. ID no. 2711462
  misc_feature (62)..(353): Pfam Name: Arabidopsis thaliana protein of unknown function Pfam Description: Arabidopsis thaliana protein of unknown
  misc_feature (1)..(361): Homolog of NCBI NO: 15225901 NR Description: hypothetical protein; protein id: At2g45840.1
  misc_feature (229)..(361): Homolog of NCBI NO: 30267795 NR Description: hypothetical protein [Arabidopsis thaliana]
  misc_feature (135)..(240): Homolog of NCBI NO: 30267795 NR Description: hypothetical protein [Arabidopsis thaliana]
  misc_feature (1)..(240): Homolog of NCBI NO: 15229061 NR Description: putative protein; protein id: At3g48980.1
  misc_feature (230)..(357): Homolog of NCBI NO: 15229061 NR Description: putative protein; protein id: At3g48980.1
  misc_feature (17)..(262): Homolog of NCBI NO: 7486461 NR Description: hypothetical protein At2g45830 [imported] - thaliana >gi|3386611|gb|AAC28541.1| unknown protein [Arabidopsis
  misc_feature (229)..(360): Homolog of NCBI NO: 7486461 NR Description: hypothetical protein At2g45830 [imported] - thaliana >gi|3386611|gb|AAC28541.1| unknown protein [Arabidopsis
  misc_feature (11)..(240): Homolog of NCBI NO: 15237842 NR Description: putative protein; protein id: At5g23850.1 thaliana] >gi|10176852|dbj|BAB10058.1| contains similarity to
  misc_feature (230)..(357): Homolog of NCBI NO: 15237842 NR Description: putative protein; protein id: At5g23850.1 thaliana] >gi|10176852|dbj|BAB10058.1| contains similarity to
  misc_feature (230)..(352): Homolog of NCBI NO: 15233072 NR Description: putative protein; protein id: At3g61280.1
MFLIGGGRIKVTPIFTRNTNATIPKEKLTTPLNFTLQCSLDQNIATQTCPASNPEKSQPSKDEPETCPDYFRWIHKDLEAWRETGITRETLERASDKAHFRLIIKGGRVYVHQYKKSFQTRDVFTIWGIVQLLRMYPGQVPDLELLFMCHDSPEIWRRDYRPRPGVNVTWPPPPLFHYCGHSGAFDIVFPDWSFWGWPEINIKEWNKQSELISEGIKKVKWEEREPYAYWKGNPGVAMARAIGRNGSGYVRKNLKMKYVYDYMLHLLQSYGKLMKMNVEVPQGAKEVCPETMACPINGGRMRQSMDDSLVMSPSVKATCEMPPPFEEDELKKFLEKKESVEKEVEKWTNEYWQEQKKILKH

SEQ ID NO: 70532 - DNA, 2283 bp, Arabidopsis thaliana
  misc_feature (1)..(2283): Ceres Seq. ID no. 2711511
  misc_feature: MA Experiment ID: 20000307 Result: Up-regulated in Transcription
  misc_feature: MA Experiment 20000307 PARAMETER Experiment Name: At_Germinating_Seeds_Sub_P Parameter: Age (hr) Value: 24 vs. 0
  misc_feature: MA Experiment 20000307 PARAMETER Experiment Name: At_Germinating_Seeds_Sub_P Parameter: Organism Value: A. thaliana
  misc_feature: MA Experiment 20000307 PARAMETER Experiment Name: At_Germinating_Seeds_Sub_P Parameter: Plant Line Value: WS
  misc_feature: MA Experiment 20000307 PARAMETER Experiment Name: At_Germinating_Seeds_Sub_P Parameter: Tissue Value: Germinating Seeds
  misc_feature: MA Experiment ID: 20000347 Result: Up-regulated in Transcription
  misc_feature: MA Experiment 20000347 PARAMETER Experiment Name: At_2mM_SA_Sub_P Parameter: Age (day) Value: 14
  misc_feature: MA Experiment 20000347 PARAMETER Experiment Name: At_2mM_SA_Sub_P Parameter: Organism Value: A. thaliana
  misc_feature: MA Experiment 20000347 PARAMETER Experiment Name: At_2mM_SA_Sub_P Parameter: Plant Line Value: WS
  misc_feature: MA Experiment 20000347 PARAMETER Experiment Name: At_2mM_SA_Sub_P Parameter: Timepoint (hr) Value: 6
  misc_feature: MA Experiment 20000347 PARAMETER Experiment Name: At_2mM_SA_Sub_P Parameter: Tissue Value: Aerial
  misc_feature: MA Experiment 20000347 PARAMETER Experiment Name: At_2mM_SA_Sub_P Parameter: Treatment Value: 2mM SA vs. No Treatment
  misc_feature: MA Experiment ID: 20000440 Result: Down-regulated in Transcription
  misc_feature: MA Experiment 20000440 PARAMETER Experiment Name: At_Closed-Flower__Sub_P Parameter: Tissue Value: Closed Flower vs. Whole Plant
atgtacgccgccacacccgaaactcctttcggttccgcgagatcacaaccggttattacccgatctgtctcacaacgatataaccatccaggtcaaagtaatcaccatcatctcctccacagtctctcatttaaccaccagaacgtactagccttaccggcagcagcaagggagccgcctgtggatgtcaagattaacgatatcgctgggaattcgattgccgggatattgtacaaatgggtgaactatgggaaaggatggagaccaagatggtttgttttgcaagatggagtgctttcatattataaaatcaagggacctgataagatcgttgttatccatgagactgagaaaggatcaagagtgatcggagaggagtccacacgtatgatctctaggaataagcgtcacgccgccactaacaacaccaaccaccagctccgccgcaagccattcggcgaagttcatctcaaggtttcatcgattcgggagagtagatcagatgataagagattttcaatattcaccggcaccaagaggcttcacctacgtgcagagacaagagaggacagagaagcttggatagaggctttacaagctgtcaaagatatgtttccaagaatgtcaaactgcgagttgatggcaccgaccaacaacttagacatctcgatagagaagcttaggctgcgattggttgaggaaggagtgagtgagtcagccattcaagactgcgaacaaatcacgaggtctgagttctcggcaattcagagccagcttttgcttcttaaacaaaagcaatggcttctcattgatacactcagacaattagagacagagaaagtagatttggaaaacacggttgtagatgagactcaacgacaagctggcaacggagactcagaagaaacaattagtgaatctgatgatgataatgaacaatttgatgaggctgaggaggaaatggatacatgtgactctctttcttcaagttcattcaaaagtattggatccgtttttcgcacatcatcattctcttcagatgatgatggacttactaatggttttgagtcagagaatgatgatgttgatccttctatcaagactattggatttaactatccacatgtcaaaagacgaaagaagttacctgatccggttgaaaaagagaaaagtgttagcctttggtcaatgatcaaagacaacattggcaaggatctcacaaaagtttgtcttcctgtctacttcaatgagcctttatcttctctacaaaaatgctttgaagatttggagtattcatatcttcttgatcaagcttctgaatggggaaagaggggcaataacctcatgaggattctgaatgtagctgcatttgccgtatctggttatgcatcaactgaaggaagaatttgcaaaccttttaatccaatgttaggtgaaacatatgaggctgactatcccgataaaggccttcgatttttctcggaaaaggtgagtcatcatcctatgattgtggcatgtcattgtgatggcaccggatggaaattttggggagatagcaacttaaaaagcaaattttggggtcgatcaattcaacttgatcctattggtttgttgactttgcaatttgatgatggtgaaattgtgcaatggagtaaggtgactacatcaatatacaatctcatacttggtaaattgtattgtgatcactacgggacaatgaagattgaaggcaacggtgaatattcatgtaaacttaaattcaaggaacagtcgatgatcgatagaaatccgcatcaagttcaaggtatagtagaagacaagaatggaaaaacagtggctaggttgtttggaaaatgggatgagagtatacactatgtgatggttgatcaaggaaaggtgaatgaatcccatcttctgtggaaacgaaacaaacagcccgaaaacccgacaaagtataatctaacacggtttgggatcacattaaacgagctcacgcctggtttaaaggagaagttgccaccaacagattcaagacttagaccggaccagaggtatttagagaagggagagtatgaaatgggaaacgcagagaagttgaggttggaacaaagacaaagacaggcgagagagatgcaagagagaggttggaaaccaaagtggtttagaaaagagaaaggaagtgagacttatagatacattggaggttattgggaagctcgagattctggtagttgggatgattgtcctgacatctttggtcaagttcaccaatccatcaagtaa

SEQ ID NO: 70533 - protein, 760 aa, Arabidopsis thaliana
  peptide (1)..(760): Ceres Seq. ID no. 2711512
  misc_feature (353)..(742): Pfam Name: Oxysterol-binding protein Pfam Description: Oxysterol-binding protein
  misc_feature (33)..(744): Homolog of NCBI NO: 7486872 NR Description: hypothetical protein T12G13.20 - Arabidopsis >gi|5262191|emb|CAB45788.1| putative protein [Arabidopsis >gi|7267458|emb|CAB81154.1| putative protein [Arabidopsis
  misc_feature (298)..(756): Homolog of NCBI NO: 15224598 NR Description: putative oxysterol-binding protein; protein id:
  misc_feature (59)..(755): Homolog of NCBI NO: 22450593 NR Description: putative oxysterol binding protein [Oryza sativa
  misc_feature (316)..(759): Homolog of NCBI NO: 15235381 NR Description: putative SWH1 protein; protein id: At4g12460.1
  misc_feature (69)..(338): Homolog of NCBI NO: 15235381 NR Description: putative SWH1 protein; protein id: At4g12460.1
  misc_feature (332)..(759): Homolog of NCBI NO: 18415950 NR Description: putative protein; protein id: At4g22540.1, by cDNA: gi_15450518 [Arabidopsis thaliana] AT4g22540/F7K2_120 [Arabidopsis thaliana]
  misc_feature (37)..(320): Homolog of NCBI NO: 18415950 NR Description: putative protein; protein id: At4g22540.1, by cDNA: gi_15450518 [Arabidopsis thaliana] AT4g22540/F7K2_120 [Arabidopsis thaliana]
  misc_feature (150)..(757): Homolog of NCBI NO: 15222204 NR Description: putative oxysterol-binding protein; protein id: [Arabidopsis thaliana] >gi|25295691|pir||A86266 hypothetical
  misc_feature (275)..(599): Homolog of NCBI NO: 18568266 NR Description: putative oxysterol-binding protein [Zea mays]
  misc_feature (60)..(277): Homolog of NCBI NO: 18568266 NR Description: putative oxysterol-binding protein [Zea mays]
MYAATPETPFGSARSQPVITRSVSQRYNHPGQSNHHHLLHSLSFNHQNVLALPAAAREPPVDVKINDIAGNSIAGILYKWVNYGKGWRPRWFVLQDGVLSYYKIKGPDKIVVIHETEKGSRVIGEESTRMISRNKRHAATNNTNHQLRRKPFGEVHLKVSSIRESRSDDKRFSIFTGTKRLHLRAETREDREAWIEALQAVKDMFPRMSNCELMAPTNNLDISIEKLRLRLVEEGVSESAIQDCEQITRSEFSAIQSQLLLLKQKQWLLIDTLRQLETEKVDLENTVVDETQRQAGNGDSEETISESDDDNEQFDEAEEEMDTCDSLSSSSFKSIGSVFRTSSFSSDDDGLTNGFESENDDVDPSIKTIGFNYPHVKRRKKLPDPVEKEKSVSLWSMIKDNIGKDLTKVCLPVYFNEPLSSLQKCFEDLEYSYLLDQASEWGKRGNNLMRILNVAAFAVSGYASTEGRICKPFNPMLGETYEADYPDKGLRFFSEKVSHHPMIVACHCDGTGWKFWGDSNLKSKFWGRSIQLDPIGLLTLQFDDGEIVQWSKVTTSIYNLILGKLYCDHYGTMKIEGNGEYSCKLKFKEQSMIDRNPHQVQGIVEDKNGKTVARLFGKWDESIHYVMVDQGKVNESHLLWKRNKQPENPTKYNLTRFGITLNELTPGLKEKLPPTDSRLRPDQRYLEKGEYEMGNAEKLRLEQRQRQAREMQERGWKPKWFRKEKGSETYRYIGGYWEARDSGSWDDCPDIFGQVHQSIK

SEQ ID NO: 70534 - protein, 631 aa, Arabidopsis thaliana
  peptide (1)..(631): Ceres Seq. ID no. 2711513
  misc_feature (224)..(613): Pfam Name: Oxysterol-binding protein Pfam Description: Oxysterol-binding protein
  misc_feature (1)..(615): Homolog of NCBI NO: 7486872 NR Description: hypothetical protein T12G13.20 - Arabidopsis >gi|5262191|emb|CAB45788.1| putative protein [Arabidopsis >gi|7267458|emb|CAB81154.1| putative protein [Arabidopsis
  misc_feature (169)..(627): Homolog of NCBI NO: 15224598 NR Description: putative oxysterol-binding protein; protein id:
  misc_feature (1)..(626): Homolog of NCBI NO: 22450593 NR Description: putative oxysterol binding protein [Oryza sativa
  misc_feature (187)..(630): Homolog of NCBI NO: 15235381 NR Description: putative SWH1 protein; protein id: At4g12460.1
  misc_feature (1)..(209): Homolog of NCBI NO: 15235381 NR Description: putative SWH1 protein; protein id: At4g12460.1
  misc_feature (203)..(630): Homolog of NCBI NO: 18415950 NR Description: putative protein; protein id: At4g22540.1, by cDNA: gi_15450518 [Arabidopsis thaliana] AT4g22540/F7K2_120 [Arabidopsis thaliana]
  misc_feature (1)..(191): Homolog of NCBI NO: 18415950 NR Description: putative protein; protein id: At4g22540.1, by cDNA: gi_15450518 [Arabidopsis thaliana] AT4g22540/F7K2_120 [Arabidopsis thaliana]
  misc_feature (21)..(628): Homolog of NCBI NO: 15222204 NR Description: putative oxysterol-binding protein; protein id: [Arabidopsis thaliana] >gi|25295691|pir||A86266 hypothetical
  misc_feature (146)..(470): Homolog of NCBI NO: 18568266 NR Description: putative oxysterol-binding protein [Zea mays]
  misc_feature (1)..(148): Homolog of NCBI NO: 18568266 NR Description: putative oxysterol-binding protein [Zea mays]
MISRNKRHAATNNTNHQLRRKPFGEVHLKVSSIRESRSDDKRFSIFTGTKRLHLRAETREDREAWIEALQAVKDMFPRMSNCELMAPTNNLDISIEKLRLRLVEEGVSESAIQDCEQITRSEFSAIQSQLLLLKQKQWLLIDTLRQLETEKVDLENTVVDETQRQAGNGDSEETISESDDDNEQFDEAEEEMDTCDSLSSSSFKSIGSVFRTSSFSSDDDGLTNGFESENDDVDPSIKTIGFNYPHVKRRKKLPDPVEKEKSVSLWSMIKDNIGKDLTKVCLPVYFNEPLSSLQKCFEDLEYSYLLDQASEWGKRGNNLMRILNVAAFAVSGYASTEGRICKPFNPMLGETYEADYPDKGLRFFSEKVSHHPMIVACHCDGTGWKFWGDSNLKSKFWGRSIQLDPIGLLTLQFDDGEIVQWSKVTTSIYNLILGKLYCDHYGTMKIEGNGEYSCKLKFKEQSMIDRNPHQVQGIVEDKNGKTVARLFGKWDESIHYVMVDQGKVNESHLLWKRNKQPENPTKYNLTRFGITLNELTPGLKEKLPPTDSRLRPDQRYLEKGEYEMGNAEKLRLEQRQRQAREMQERGWKPKWFRKEKGSETYRYIGGYWEARDSGSWDDCPDIFGQVHQSIK

SEQ ID NO: 70535 - protein, 557 aa, Arabidopsis thaliana
  peptide (1)..(557): Ceres Seq. ID no. 2711514
  misc_feature (150)..(539): Pfam Name: Oxysterol-binding protein Pfam Description: Oxysterol-binding protein
  misc_feature (1)..(541): Homolog of NCBI NO: 7486872 NR Description: hypothetical protein T12G13.20 - Arabidopsis >gi|5262191|emb|CAB45788.1| putative protein [Arabidopsis >gi|7267458|emb|CAB81154.1| putative protein [Arabidopsis
  misc_feature (95)..(553): Homolog of NCBI NO: 15224598 NR Description: putative oxysterol-binding protein; protein id:
  misc_feature (1)..(552): Homolog of NCBI NO: 22450593 NR Description: putative oxysterol binding protein [Oryza sativa
  misc_feature (113)..(556): Homolog of NCBI NO: 15235381 NR Description: putative SWH1 protein; protein id: At4g12460.1
  misc_feature (1)..(135): Homolog of NCBI NO: 15235381 NR Description: putative SWH1 protein; protein id: At4g12460.1
  misc_feature (129)..(556): Homolog of NCBI NO: 18415950 NR Description: putative protein; protein id: At4g22540.1, by cDNA: gi_15450518 [Arabidopsis thaliana] AT4g22540/F7K2_120 [Arabidopsis thaliana]
  misc_feature (1)..(117): Homolog of NCBI NO: 18415950 NR Description: putative protein; protein id: At4g22540.1, by cDNA: gi_15450518 [Arabidopsis thaliana] AT4g22540/F7K2_120 [Arabidopsis thaliana]
  misc_feature (1)..(554): Homolog of NCBI NO: 15222204 NR Description: putative oxysterol-binding protein; protein id: [Arabidopsis thaliana] >gi|25295691|pir||A86266 hypothetical
  misc_feature (72)..(396): Homolog of NCBI NO: 18568266 NR Description: putative oxysterol-binding protein [Zea mays]
  misc_feature (1)..(74): Homolog of NCBI NO: 18568266 NR Description: putative oxysterol-binding protein [Zea mays]
MFPRMSNCELMAPTNNLDISIEKLRLRLVEEGVSESAIQDCEQITRSEFSAIQSQLLLLKQKQWLLIDTLRQLETEKVDLENTVVDETQRQAGNGDSEETISESDDDNEQFDEAEEEMDTCDSLSSSSFKSIGSVFRTSSFSSDDDGLTNGFESENDDVDPSIKTIGFNYPHVKRRKKLPDPVEKEKSVSLWSMIKDNIGKDLTKVCLPVYFNEPLSSLQKCFEDLEYSYLLDQASEWGKRGNNLMRILNVAAFAVSGYASTEGRICKPFNPMLGETYEADYPDKGLRFFSEKVSHHPMIVACHCDGTGWKFWGDSNLKSKFWGRSIQLDPIGLLTLQFDDGEIVQWSKVTTSIYNLILGKLYCDHYGTMKIEGNGEYSCKLKFKEQSMIDRNPHQVQGIVEDKNGKTVARLFGKWDESIHYVMVDQGKVNESHLLWKRNKQPENPTKYNLTRFGITLNELTPGLKEKLPPTDSRLRPDQRYLEKGEYEMGNAEKLRLEQRQRQAREMQERGWKPKWFRKEKGSETYRYIGGYWEARDSGSWDDCPDIFGQVHQSIK

SEQ ID NO: 70536 - DNA, 2247 bp, Arabidopsis thaliana
  misc_feature (1)..(2247): Ceres Seq. ID no. 2711549
  misc_feature: MA Experiment ID: 20000314 Result: Up-regulated in Transcription
  misc_feature: MA Experiment 20000314 PARAMETER Experiment Name: At_14day_Shoots-Roots_Sub_P Parameter: Age (day) Value: 14
  misc_feature: MA Experiment 20000314 PARAMETER Experiment Name: At_14day_Shoots-Roots_Sub_P Parameter: Organism Value: A. thaliana
  misc_feature: MA Experiment 20000314 PARAMETER Experiment Name: At_14day_Shoots-Roots_Sub_P Parameter: Plant Line Value: WS
  misc_feature: MA Experiment 20000314 PARAMETER Experiment Name: At_14day_Shoots-Roots_Sub_P Parameter: Tissue Value: Roots vs. Whole Plant
  misc_feature: Pfam Name: Cellulose_synt Pfam Description: Cellulose synthase
atggcggattcaagcttttctcttcctcctctttgtgaaaggatctcatacacgaactattttctaagagctgtatatctcacggttctaggccttttcttttctcttctcttgcaccgaatccgacatacgagcgaatacgacaacgtttggctcgtggctttcttttgtgaatcttgtttcttcttggtatgtctgcttattacttgcctaaaatggagtcctgctgatactaaaccctttcctgatagacttgatgaaagggttcatgaccttccttcggtggatatgttcgtgcccacagcagatccggttcgagagccaccgattatggttgtggacaccgtgctttcgctgttagctgtaaattatccggcaaataaactagcttgttatgtgtcggacgatggatgctcacctctcacttatttctctctcaaggaagcttctaagttcgccaagatttgggtaccgttctgcaaaaagtacaacactagagttagagctccttctagatattttctgaaacctataagcgtcgcaacagaggattatgaattcaatagagactgggaaaagacgaagagggagtacgagaagttgaggcggaaagtggaagatgccaccggagattctcatatgttggatgtagaagatgattttgaagcattctcaaacacaaaaccaaatgatcattcaactctagttaaggtggtatgggagaacaagggaggtgtaggagacgagaaagagatccctcatatcatatacatatcaagagagaaaagaccaaattatgttcataatcaaaaatgtggagccatgaactttctggcaagagtgtcagggttgatgacaaacgcaccatacatcttgaacgtggattgcgacatgtatgccaatgatgcagatgtagtccgacaagcaatgtgtatacttctgcaagaatcattaaatatgaaacattgtgcttttgttcaattccgtcaagaattctatgattcaagcaccgagctaatagtcgtcctacaatcacatttgggacgaggaatcgcgggaatccaaggaccgatatatataggatcaggatgcgtccacacgagaagagttatgtatggtttatctccagacgatttcgaagttgatggaagtctttcttcagttgctacaagggagtttttggttaaggatagtttagcgagaagatttggtaattctaaagagatgatgaaatcagtggttgatgcaatacaaagaaatccaaatccacaaaatatacttacaaactccatagaagcggctcgagaagtgggacattttatgcagatcggctggttatatgattcagtggcggaagatttaaacacgagtatcggaatacattcgagaggttggactagctcatacatttctccggatacacctgcatttcttggatctatgccggcaggagtacccgaggcgttactccagcagcgtcgatgggcgacaggatggatcgaaatccttttcaacaagcaaagtccgttgcgaggattgtttagcaagaaaataagattccgacaacgattagcttatctttgcattatcacctgtctaaggtcaatccctgagcttatttattgtctccttcctgcttattgcctactccacaactctaccttattccccaagggactttatttaggcataactgtcacacttgttgggatacattgtctctatactctatgggaatttatgagccttggttattccgtacaatcgtggctagtctcccaatcagtttggagaatagtagccactagtagttggttatttagcatctttgatatcacactcaagcttcttggcatctcggaaacggtgttcataatcactaaaaagactgtggctgggaccaagtcagcattagggtctggaccctctcaaggagaagacgttggtccaaactcagacttgtttaaatttgaatttgatggctcactttgtttcttgcctggcacatttattgtgttggtgaatatagccgctctagctgttttttctgtgggtctacaacggtcgagttacagccatgaaggaggtggttcgggtctggcagaggcttgcggatgtgttttggtaatgatgttgttccttccatttctaatgggtttgtttaagaaaggaaaatatggaaccccattgtctactctctctatagctggctttttagcagttttatttgttgttttctctgtttga

SEQ ID NO: 70537 - protein, 748 aa, Arabidopsis thaliana
  peptide (1)..(748): Ceres Seq. ID no. 2711550
  misc_feature: Pfam Name: Cellulose_synt Pfam Description: Cellulose synthase
  misc_feature (1)..(748): Homolog of NCBI NO: 30685335 NR Description: cellulose synthase - related [Arabidopsis >gi|19699079|gb|AAL90907.1| At2g32530/T26B15.9 [Arabidopsis >gi|25090435|gb|AAN72301.1| At2g32530/T26B15.9 [Arabidopsis
  misc_feature (1)..(748): Homolog of NCBI NO: 15225704 NR Description: putative cellulose synthase; protein id: [Arabidopsis thaliana] >gi|7484862|pir||T02553 cellulose synthase
  misc_feature (45)..(748): Homolog of NCBI NO: 7484865 NR Description: cellulose synthase homolog T26B15.9 - Arabidopsis >gi|3298541|gb|AAC25935.1| putative cellulose synthase
  misc_feature (97)..(748): Homolog of NCBI NO: 33589710 NR Description: At4g15290 [Arabidopsis thaliana]
  misc_feature (266)..(657): Homolog of NCBI NO: 15233771 NR Description: cellulose synthase like protein; protein id:
  misc_feature (1)..(239): Homolog of NCBI NO: 15233771 NR Description: cellulose synthase like protein; protein id:
  misc_feature (235)..(278): Homolog of NCBI NO: 15233771 NR Description: cellulose synthase like protein; protein id:
  misc_feature (347)..(748): Homolog of NCBI NO: 30683201 NR Description: cellulose synthase - related [Arabidopsis
  misc_feature (1)..(239): Homolog of NCBI NO: 30683201 NR Description: cellulose synthase - related [Arabidopsis
  misc_feature (347)..(748): Homolog of NCBI NO: 7485046 NR Description: hypothetical protein - Arabidopsis thaliana cellulose synthase like protein [Arabidopsis thaliana]
MADSSFSLPPLCERISYTNYFLRAVYLTVLGLFFSLLLHRIRHTSEYDNVWLVAFFCESCFFLVCLLITCLKWSPADTKPFPDRLDERVHDLPSVDMFVPTADPVREPPIMVVDTVLSLLAVNYPANKLACYVSDDGCSPLTYFSLKEASKFAKIWVPFCKKYNTRVRAPSRYFLKPISVATEDYEFNRDWEKTKREYEKLRRKVEDATGDSHMLDVEDDFEAFSNTKPNDHSTLVKVVWENKGGVGDEKEIPHIIYISREKRPNYVHNQKCGAMNFLARVSGLMTNAPYILNVDCDMYANDADVVRQAMCILLQESLNMKHCAFVQFRQEFYDSSTELIVVLQSHLGRGIAGIQGPIYIGSGCVHTRRVMYGLSPDDFEVDGSLSSVATREFLVKDSLARRFGNSKEMMKSVVDAIQRNPNPQNILTNSIEAAREVGHFMQIGWLYDSVAEDLNTSIGIHSRGWTSSYISPDTPAFLGSMPAGVPEALLQQRRWATGWIEILFNKQSPLRGLFSKKIRFRQRLAYLCIITCLRSIPELIYCLLPAYCLLHNSTLFPKGLYLGITVTLVGIHCLYTLWEFMSLGYSVQSWLVSQSVWRIVATSSWLFSIFDITLKLLGISETVFIITKKTVAGTKSALGSGPSQGEDVGPNSDLFKFEFDGSLCFLPGTFIVLVNIAALAVFSVGLQRSSYSHEGGGSGLAEACGCVLVMMLFLPFLMGLFKKGKYGTPLSTLSIAGFLAVLFVVFSV

SEQ ID NO: 70538 - protein, 652 aa, Arabidopsis thaliana
  peptide (1)..(652): Ceres Seq. ID no. 2711551
  misc_feature: Pfam Name: Cellulose_synt Pfam Description: Cellulose synthase
  misc_feature (1)..(652): Homolog of NCBI NO: 30685335 NR Description: cellulose synthase - related [Arabidopsis >gi|19699079|gb|AAL90907.1| At2g32530/T26B15.9 [Arabidopsis >gi|25090435|gb|AAN72301.1| At2g32530/T26B15.9 [Arabidopsis
  misc_feature (1)..(652): Homolog of NCBI NO: 15225704 NR Description: putative cellulose synthase; protein id: [Arabidopsis thaliana] >gi|7484862|pir||T02553 cellulose synthase
  misc_feature (1)..(652): Homolog of NCBI NO: 7484865 NR Description: cellulose synthase homolog T26B15.9 - Arabidopsis >gi|3298541|gb|AAC25935.1| putative cellulose synthase
  misc_feature (1)..(652): Homolog of NCBI NO: 33589710 NR Description: At4g15290 [Arabidopsis thaliana]
  misc_feature (170)..(561): Homolog of NCBI NO: 15233771 NR Description: cellulose synthase like protein; protein id:
  misc_feature (1)..(143): Homolog of NCBI NO: 15233771 NR Description: cellulose synthase like protein; protein id:
  misc_feature (139)..(182): Homolog of NCBI NO: 15233771 NR Description: cellulose synthase like protein; protein id:
  misc_feature (251)..(652): Homolog of NCBI NO: 30683201 NR Description: cellulose synthase - related [Arabidopsis
  misc_feature (1)..(143): Homolog of NCBI NO: 30683201 NR Description: cellulose synthase - related [Arabidopsis
  misc_feature (251)..(652): Homolog of NCBI NO: 7485046 NR Description: hypothetical protein - Arabidopsis thaliana cellulose synthase like protein [Arabidopsis thaliana]
MFVPTADPVREPPIMVVDTVLSLLAVNYPANKLACYVSDDGCSPLTYFSLKEASKFAKIWVPFCKKYNTRVRAPSRYFLKPISVATEDYEFNRDWEKTKREYEKLRRKVEDATGDSHMLDVEDDFEAFSNTKPNDHSTLVKVVWENKGGVGDEKEIPHIIYISREKRPNYVHNQKCGAMNFLARVSGLMTNAPYILNVDCDMYANDADVVRQAMCILLQESLNMKHCAFVQFRQEFYDSSTELIVVLQSHLGRGIAGIQGPIYIGSGCVHTRRVMYGLSPDDFEVDGSLSSVATREFLVKDSLARRFGNSKEMMKSVVDAIQRNPNPQNILTNSIEAAREVGHFMQIGWLYDSVAEDLNTSIGIHSRGWTSSYISPDTPAFLGSMPAGVPEALLQQRRWATGWIEILFNKQSPLRGLFSKKIRFRQRLAYLCIITCLRSIPELIYCLLPAYCLLHNSTLFPKGLYLGITVTLVGIHCLYTLWEFMSLGYSVQSWLVSQSVWRIVATSSWLFSIFDITLKLLGISETVFIITKKTVAGTKSALGSGPSQGEDVGPNSDLFKFEFDGSLCFLPGTFIVLVNIAALAVFSVGLQRSSYSHEGGGSGLAEACGCVLVMMLFLPFLMGLFKKGKYGTPLSTLSIAGFLAVLFVVFSV

SEQ ID NO: 70539 - protein, 638 aa, Arabidopsis thaliana
  peptide (1)..(638): Ceres Seq. ID no. 2711552
  misc_feature: Pfam Name: Cellulose_synt Pfam Description: Cellulose synthase
  misc_feature (1)..(638): Homolog of NCBI NO: 30685335 NR Description: cellulose synthase - related [Arabidopsis >gi|19699079|gb|AAL90907.1| At2g32530/T26B15.9 [Arabidopsis >gi|25090435|gb|AAN72301.1| At2g32530/T26B15.9 [Arabidopsis
  misc_feature (1)..(638): Homolog of NCBI NO: 15225704 NR Description: putative cellulose synthase; protein id: [Arabidopsis thaliana] >gi|7484862|pir||T02553 cellulose synthase
  misc_feature (1)..(638): Homolog of NCBI NO: 7484865 NR Description: cellulose synthase homolog T26B15.9 - Arabidopsis >gi|3298541|gb|AAC25935.1| putative cellulose synthase
  misc_feature (1)..(638): Homolog of NCBI NO: 33589710 NR Description: At4g15290 [Arabidopsis thaliana]
  misc_feature (156)..(547): Homolog of NCBI NO: 15233771 NR Description: cellulose synthase like protein; protein id:
  misc_feature (1)..(129): Homolog of NCBI NO: 15233771 NR Description: cellulose synthase like protein; protein id:
  misc_feature (125)..(168): Homolog of NCBI NO: 15233771 NR Description: cellulose synthase like protein; protein id:
  misc_feature (237)..(638): Homolog of NCBI NO: 30683201 NR Description: cellulose synthase - related [Arabidopsis
  misc_feature (1)..(129): Homolog of NCBI NO: 30683201 NR Description: cellulose synthase - related [Arabidopsis
  misc_feature (237)..(638): Homolog of NCBI NO: 7485046 NR Description: hypothetical protein - Arabidopsis thaliana cellulose synthase like protein [Arabidopsis thaliana]
MVVDTVLSLLAVNYPANKLACYVSDDGCSPLTYFSLKEASKFAKIWVPFCKKYNTRVRAPSRYFLKPISVATEDYEFNRDWEKTKREYEKLRRKVEDATGDSHMLDVEDDFEAFSNTKPNDHSTLVKVVWENKGGVGDEKEIPHIIYISREKRPNYVHNQKCGAMNFLARVSGLMTNAPYILNVDCDMYANDADVVRQAMCILLQESLNMKHCAFVQFRQEFYDSSTELIVVLQSHLGRGIAGIQGPIYIGSGCVHTRRVMYGLSPDDFEVDGSLSSVATREFLVKDSLARRFGNSKEMMKSVVDAIQRNPNPQNILTNSIEAAREVGHFMQIGWLYDSVAEDLNTSIGIHSRGWTSSYISPDTPAFLGSMPAGVPEALLQQRRWATGWIEILFNKQSPLRGLFSKKIRFRQRLAYLCIITCLRSIPELIYCLLPAYCLLHNSTLFPKGLYLGITVTLVGIHCLYTLWEFMSLGYSVQSWLVSQSVWRIVATSSWLFSIFDITLKLLGISETVFIITKKTVAGTKSALGSGPSQGEDVGPNSDLFKFEFDGSLCFLPGTFIVLVNIAALAVFSVGLQRSSYSHEGGGSGLAEACGCVLVMMLFLPFLMGLFKKGKYGTPLSTLSIAGFLAVLFVVFSV

SEQ ID NO: 70540 - DNA, 2115 bp, Arabidopsis thaliana
  misc_feature (1)..(2115): Ceres Seq. ID no. 2711553
  misc_feature: MA Experiment ID: 20000180 Result: Up-regulated in Transcription
  misc_feature: MA Experiment 20000180 PARAMETER Experiment Name: At_Germinating_Seeds_P Parameter: Age (hr) Value: 24 vs. 0
  misc_feature: MA Experiment 20000180 PARAMETER Experiment Name: At_Germinating_Seeds_P Parameter: Tissue Value: Germinating Seeds
  misc_feature: MA Experiment ID: 20000495 Result: Up-regulated in Transcription
  misc_feature: MA Experiment 20000495 PARAMETER Experiment Name: At_Guard_Cells_P Parameter: Harvest Date Value: 8/2/2002
  misc_feature: MA Experiment 20000495 PARAMETER Experiment Name: At_Guard_Cells_P Parameter: Organism Value: A. thaliana
  misc_feature: MA Experiment 20000495 PARAMETER Experiment Name: At_Guard_Cells_P Parameter: Tissue Value: Guard Cells vs. Leaves
  misc_feature: Pfam Name: Barren Pfam Description: Barren protein
atggatgaatccttaactccaaaccctaagcaaaagccagcttcaacgacgactcgaatccaggctccgacgagtcccttcttcttgggatctaacgatgacagattggaacgggaacaagctcgagccgcaagagccgctgctagccgtcgtaggtctgtcattttcgctcgtgggtctcagcctgagacggagtctgatccttgtttcgacaaacagcaaattctcgagttgtttcagaactgtatcaaattagccagtgaaaacaaaatcaatcaaaagaatacatgggagttgaatttgatcgaccatctttgtgagattatcaaagttgaagatgagaacaatacagaaacaaattttcaaaaggcaagttgcactcttgaagctggagttaagatttactcaatgcgggtagactctgttcattcagaggcatacaaggtcttgggtggaattacccgagctggccatgatgacggtggagatcacgaggatgctgctggtgccgtagaaaatgcaactaaccaaaagaagcagccagagaaaaagatatcgcctttatcaacactggaaccttcctttgatgcccttaacgtgaagaaatttgatgtggcatttgcagtggatcccctttatcatcagacttcagcacagtttgatgaaggtggagcaaagggcctgctgctaaacaatttaggagtctatggagggtgtcaagttctatttgattcacaagaaatccctggaaagcttgtttcgtctgcaaataagcatgacaaatcagaaacaattgatctatcctttgttaaaggtctggctttactggctgatatgcctcgctctaccattgtacatgttttattgcattatgctttctctgatgttgtggttaaatttgtagaatgtgtggagcaaatggtgctaaacatgcgaaagaaggatgagattgtaccatctcttcgggctataatcaatcaatttgatgaagagaaccaaagaccatctgacacgttttcttgtggtcagcagacgaccgagtcatttgatatttcacatggtaatgatgctagctatgccgacgatgatgaaggatatgagaactttggaacttcttttgattatgagggtcaatccggtgatgttgatgaaaactttggccccaatgaagcagaaccaatatattcaaattttcatgaggaagttgaaccagcctccctgcaagacatggattcagatgacagactggagaatgttgatgactatctctttttgtcgttgggaatttcatctaagcaaaattcttgggcaggtcctgatcactggaagtatcgaaaaacaaaaggtccagatgttcaacctgcttcagaaattaaatcctctccaccagcgaagaaaaccaggaaaaagaagcaagcagagcctgaactagattttgcaaaagctttggaggaagaaatgcctgatatttttgcccctccaaaaaacccaaagactttacttctcccagcaagtagaaccccttgtcaaacgaagcttccagaggattgccattatcaacctgagaatctaataaagctatttctactaccgaatgtgatggtatggcttgccaaacacagaccaagtgaaacttcaagacagcagcctgatgattatgaacatggggaatcctggggaaatgataatgtttatgatgatgatgatggcccattcgatgataatgaaaatgatcaaagtgatgcagaggataccaacacattaatctctcagccacgccaggtcaacaaaattgatgtccaatacgataaagcttcaaaacaagttgatgtgcaagtgctaaaggaaactctttgggagtgtcttcaggaatctcatcaacctccaattcagaatctgattgtgcaggatgaggaacatcaacaagaaccacctgaaagtagatctttcaaagtgctattggctagcttcccagatgattgccaagcagccgagagaacccaagacatctcaccacatctatgtttcatctgcttgctgcatttggcgaacgagcacaatctcagcctcattggttctcaaaacttggatgatctaacaatacaccttgcctga

SEQ ID NO: 70541 - protein, 704 aa, Arabidopsis thaliana
  peptide (1)..(704): Ceres Seq. ID no. 2711554
  misc_feature: Pfam Name: Barren Pfam Description: Barren protein
  misc_feature (243)..(703): Homolog of NCBI NO: 34913488 NR Description: putative condensin complex subunit [Oryza sativa
  misc_feature (4)..(271): Homolog of NCBI NO: 34913488 NR Description: putative condensin complex subunit [Oryza sativa
  misc_feature (25)..(535): Homolog of NCBI NO: 19075311 NR Description: putative condensin subunit [Schizosaccharomyces >gi|11131921|sp|Q9Y7R3|CND2_SCHPO Condensin complex subunit 2
  misc_feature (555)..(701): Homolog of NCBI NO: 19075311 NR Description: putative condensin subunit [Schizosaccharomyces >gi|11131921|sp|Q9Y7R3|CND2_SCHPO Condensin complex subunit 2
  misc_feature (316)..(574): Homolog of NCBI NO: 30172801 NR Description: Condensin subunit 2 (Barren homolog protein 1)
  misc_feature (13)..(233): Homolog of NCBI NO: 30172801 NR Description: Condensin subunit 2 (Barren homolog protein 1)
  misc_feature (586)..(701): Homolog of NCBI NO: 30172801 NR Description: Condensin subunit 2 (Barren homolog protein 1)
  misc_feature (316)..(574): Homolog of NCBI NO: 25121987 NR Description: barren [Homo sapiens]
  misc_feature (13)..(233): Homolog of NCBI NO: 25121987 NR Description: barren [Homo sapiens]
  misc_feature (586)..(701): Homolog of NCBI NO: 25121987 NR Description: barren [Homo sapiens]
MDESLTPNPKQKPASTTTRIQAPTSPFFLGSNDDRLEREQARAARAAASRRRSVIFARGSQPETESDPCFDKQQILELFQNCIKLASENKINQKNTWELNLIDHLCEIIKVEDENNTETNFQKASCTLEAGVKIYSMRVDSVHSEAYKVLGGITRAGHDDGGDHEDAAGAVENATNQKKQPEKKISPLSTLEPSFDALNVKKFDVAFAVDPLYHQTSAQFDEGGAKGLLLNNLGVYGGCQVLFDSQEIPGKLVSSANKHDKSETIDLSFVKGLALLADMPRSTIVHVLLHYAFSDVVVKFVECVEQMVLNMRKKDEIVPSLRAIINQFDEENQRPSDTFSCGQQTTESFDISHGNDASYADDDEGYENFGTSFDYEGQSGDVDENFGPNEAEPIYSNFHEEVEPASLQDMDSDDRLENVDDYLFLSLGISSKQNSWAGPDHWKYRKTKGPDVQPASEIKSSPPAKKTRKKKQAEPELDFAKALEEEMPDIFAPPKNPKTLLLPASRTPCQTKLPEDCHYQPENLIKLFLLPNVMVWLAKHRPSETSRQQPDDYEHGESWGNDNVYDDDDGPFDDNENDQSDAEDTNTLISQPRQVNKIDVQYDKASKQVDVQVLKETLWECLQESHQPPIQNLIVQDEEHQQEPPESRSFKVLLASFPDDCQAAERTQDISPHLCFICLLHLANEHNLSLIGSQNLDDLTIHLA

SEQ ID NO: 70542 - protein, 568 aa, Arabidopsis thaliana
  peptide (1)..(568): Ceres Seq. ID no. 2711555
  misc_feature: Pfam Name: Barren Pfam Description: Barren protein
  misc_feature (107)..(567): Homolog of NCBI NO: 34913488 NR Description: putative condensin complex subunit [Oryza sativa
  misc_feature (1)..(135): Homolog of NCBI NO: 34913488 NR Description: putative condensin complex subunit [Oryza sativa
  misc_feature (1)..(399): Homolog of NCBI NO: 19075311 NR Description: putative condensin subunit [Schizosaccharomyces >gi|11131921|sp|Q9Y7R3|CND2_SCHPO Condensin complex subunit 2
  misc_feature (419)..(565): Homolog of NCBI NO: 19075311 NR Description: putative condensin subunit [Schizosaccharomyces >gi|11131921|sp|Q9Y7R3|CND2_SCHPO Condensin complex subunit 2
  misc_feature (180)..(438): Homolog of NCBI NO: 30172801 NR Description: Condensin subunit 2 (Barren homolog protein 1)
  misc_feature (1)..(97): Homolog of NCBI NO: 30172801 NR Description: Condensin subunit 2 (Barren homolog protein 1)
  misc_feature (450)..(565): Homolog of NCBI NO: 30172801 NR Description: Condensin subunit 2 (Barren homolog protein 1)
  misc_feature (180)..(438): Homolog of NCBI NO: 25121987 NR Description: barren [Homo sapiens]
  misc_feature (1)..(97): Homolog of NCBI NO: 25121987 NR Description: barren [Homo sapiens]
  misc_feature (450)..(565): Homolog of NCBI NO: 25121987 NR Description: barren [Homo sapiens]
MRVDSVHSEAYKVLGGITRAGHDDGGDHEDAAGAVENATNQKKQPEKKISPLSTLEPSFDALNVKKFDVAFAVDPLYHQTSAQFDEGGAKGLLLNNLGVYGGCQVLFDSQEIPGKLVSSANKHDKSETIDLSFVKGLALLADMPRSTIVHVLLHYAFSDVVVKFVECVEQMVLNMRKKDEIVPSLRAIINQFDEENQRPSDTFSCGQQTTESFDISHGNDASYADDDEGYENFGTSFDYEGQSGDVDENFGPNEAEPIYSNFHEEVEPASLQDMDSDDRLENVDDYLFLSLGISSKQNSWAGPDHWKYRKTKGPDVQPASEIKSSPPAKKTRKKKQAEPELDFAKALEEEMPDIFAPPKNPKTLLLPASRTPCQTKLPEDCHYQPENLIKLFLLPNVMVWLAKHRPSETSRQQPDDYEHGESWGNDNVYDDDDGPFDDNENDQSDAEDTNTLISQPRQVNKIDVQYDKASKQVDVQVLKETLWECLQESHQPPIQNLIVQDEEHQQEPPESRSFKVLLASFPDDCQAAERTQDISPHLCFICLLHLANEHNLSLIGSQNLDDLTIHLA

SEQ ID NO: 70543 - protein, 426 aa, Arabidopsis thaliana
  peptide (1)..(426): Ceres Seq. ID no. 2711556
  misc_feature: Pfam Name: Barren Pfam Description: Barren protein
  misc_feature (1)..(425): Homolog of NCBI NO: 34913488 NR Description: putative condensin complex subunit [Oryza sativa
  misc_feature (1)..(257): Homolog of NCBI NO: 19075311 NR Description: putative condensin subunit [Schizosaccharomyces >gi|11131921|sp|Q9Y7R3|CND2_SCHPO Condensin complex subunit 2
  misc_feature (277)..(423): Homolog of NCBI NO: 19075311 NR Description: putative condensin subunit [Schizosaccharomyces >gi|11131921|sp|Q9Y7R3|CND2_SCHPO Condensin complex subunit 2
  misc_feature (38)..(296): Homolog of NCBI NO: 30172801 NR Description: Condensin subunit 2 (Barren homolog protein 1)
  misc_feature (308)..(423): Homolog of NCBI NO: 30172801 NR Description: Condensin subunit 2 (Barren homolog protein 1)
  misc_feature (38)..(296): Homolog of NCBI NO: 25121987 NR Description: barren [Homo sapiens]
  misc_feature (308)..(423): Homolog of NCBI NO: 25121987 NR Description: barren [Homo sapiens]
  misc_feature (38)..(296): Homolog of NCBI NO: 559715 NR Description: KIAA0074~The ha1438 gene product is related to a
  misc_feature (308)..(423): Homolog of NCBI NO: 559715 NR Description: KIAA0074~The ha1438 gene product is related to a
  misc_feature (22)..(423): Homolog of NCBI NO: 33417152 NR Description: Unknown (protein for MGC:69107) [Xenopus laevis]
MPRSTIVHVLLHYAFSDVVVKFVECVEQMVLNMRKKDEIVPSLRAIINQFDEENQRPSDTFSCGQQTTESFDISHGNDASYADDDEGYENFGTSFDYEGQSGDVDENFGPNEAEPIYSNFHEEVEPASLQDMDSDDRLENVDDYLFLSLGISSKQNSWAGPDHWKYRKTKGPDVQPASEIKSSPPAKKTRKKKQAEPELDFAKALEEEMPDIFAPPKNPKTLLLPASRTPCQTKLPEDCHYQPENLIKLFLLPNVMVWLAKHRPSETSRQQPDDYEHGESWGNDNVYDDDDGPFDDNENDQSDAEDTNTLISQPRQVNKIDVQYDKASKQVDVQVLKETLWECLQESHQPPIQNLIVQDEEHQQEPPESRSFKVLLASFPDDCQAAERTQDISPHLCFICLLHLANEHNLSLIGSQNLDDLTIHLA

SEQ ID NO: 70544 - DNA, 1449 bp, Arabidopsis thaliana
  misc_feature (1)..(1449): Ceres Seq. ID no. 2711589
  misc_feature: MA Experiment ID: 20000355 Result: Up-regulated in Transcription
  misc_feature: MA Experiment 20000355 PARAMETER Experiment Name: At_Siliques_Sub_P Parameter: Age (day) Value: 21
  misc_feature: MA Experiment 20000355 PARAMETER Experiment Name: At_Siliques_Sub_P Parameter: Organism Value: A. thaliana
  misc_feature: MA Experiment 20000355 PARAMETER Experiment Name: At_Siliques_Sub_P Parameter: Plant Line Value: WS
  misc_feature: MA Experiment 20000355 PARAMETER Experiment Name: At_Siliques_Sub_P Parameter: Tissue Value: Less Than 5mm Siliques vs. Whole Plant
atggtgcagattgtgccccacgtagcaaatgcacacatggtcaaaacttctagaaaaggactcttagcgcttgtcgtagttggagtagaagagtgttgcccgacgcgtcgatgtgatttgagagatccaaatttagtggtggattctaattgcttgctgtcaagatctacacatcaaagctcactcgttgaagattcaatcatcatcaatcatttccggatcttgaacttcaacaacagagcaagcatctttctttgtttgagaattggtgttatctgtagcactcaatctaagatgtatggtggaaaaagttacatactcaaagggagtgtatcactttccttgatcatcctcattcttttggtgacaacactcctggtttccgcaaaaaaccagcctcgcatttctctgattgaagtaaaaacttgtaacttggcaaagggggaatgggttgaagacaagaagcggccattgtattctggttttgaatgtaaacaatggttatcaaacatattttcctgcagggtaatgggcagacccgacttctcatttgagggttaccggtggcagccagaaggttgcaacataccagagtttaacagagtcaacttcttgagaagaatgcagaacaagactatagcatttataggagactccttgggaagggaacaatttcaatccctgatgtgtatggccactggaggtaaagagagtccggaggttcaaaacgtgggatcggagtatggtcttgtgatacctaaaggagctcctcgtcctggtggttgggcttataggtttccgaccacaaacacaacggttttgtcttattggtcagctagtttaacagatttggtaccgatgaacaatacagatccacctcatcttattgcaatgcatcttgaccgtccaccagcattcataagaaactaccttcaccgtttccatgtattggttctaaacaccggtcaccattggagcagagataagatagaaaaaaatcattgggtgatgcacgtaaatggaacacgtgtcgaaggcggatatttcaagaacgttgaaaacgctaaaatttttacaatacacagcctggtgaagtggcttgatgcacaacttccattgcatccacggttgaaagctttctttacgacgatttcccctaggcatgaaaagtgtaacaatactatccctttgtctagaggaagcaaaatcacaggcgaaggtggatcgctcgatacaatagttgagagtgctgtgaatgggacaagggtcaagattcttgacataactgcactttctaaactaagagatgaagctcatatcgcagggtgtaaactcaaaccgaaaaaggcgagtaacgtgacttcagctccaacgttcaacgattgcttgcattggtgcttacccgggatcccggatacttggaatgaacttctcatagcacagctttga

SEQ ID NO: 70545 - protein, 482 aa, Arabidopsis thaliana
  peptide (1)..(482): Ceres Seq. ID no. 2711590
  misc_feature (325)..(482): Pfam Name: Arabidopsis proteins of unknown function Pfam Description: Arabidopsis proteins of unknown function
  misc_feature (99)..(482): Homolog of NCBI NO: 30697938 NR Description: expressed protein [Arabidopsis thaliana]
  misc_feature (141)..(482): Homolog of NCBI NO: 15810385 NR Description: unknown protein [Arabidopsis thaliana]
  misc_feature (141)..(482): Homolog of NCBI NO: 18420285 NR Description: putative protein; protein id: At5g20680.1,
  misc_feature (141)..(482): Homolog of NCBI NO: 7487161 NR Description: hypothetical protein At2g38320 [imported] -
  misc_feature (1)..(482): Homolog of NCBI NO: 15224349 NR Description: unknown protein; protein id: At2g37720.1
  misc_feature (99)..(482): Homolog of NCBI NO: 8777315 NR Description: gene_id:MBM17.12~pir||T02538~strong similarity to
  misc_feature (141)..(482): Homolog of NCBI NO: 18404712 NR Description: expressed protein; protein id: At2g38320.1, by cDNA: gi_13878094 [Arabidopsis thaliana] unknown protein [Arabidopsis thaliana]
  misc_feature (107)..(482): Homolog of NCBI NO: 23617116 NR Description: leaf senescence related protein-like [Oryza
  misc_feature (104)..(482): Homolog of NCBI NO: 9759321 NR Description: gb|AAF00670.1~gene_id:MBL20.11~strong similarity
  misc_feature (140)..(482): Homolog of NCBI NO: 34907406 NR Description: P0018C10.29 [Oryza sativa (japonica
MVQIVPHVANAHMVKTSRKGLLALVVVGVEECCPTRRCDLRDPNLVVDSNCLLSRSTHQSSLVEDSIIINHFRILNFNNRASIFLCLRIGVICSTQSKMYGGKSYILKGSVSLSLIILILLVTTLLVSAKNQPRISLIEVKTCNLAKGEWVEDKKRPLYSGFECKQWLSNIFSCRVMGRPDFSFEGYRWQPEGCNIPEFNRVNFLRRMQNKTIAFIGDSLGREQFQSLMCMATGGKESPEVQNVGSEYGLVIPKGAPRPGGWAYRFPTTNTTVLSYWSASLTDLVPMNNTDPPHLIAMHLDRPPAFIRNYLHRFHVLVLNTGHHWSRDKIEKNHWVMHVNGTRVEGGYFKNVENAKIFTIHSLVKWLDAQLPLHPRLKAFFTTISPRHEKCNNTIPLSRGSKITGEGGSLDTIVESAVNGTRVKILDITALSKLRDEAHIAGCKLKPKKASNVTSAPTFNDCLHWCLPGIPDTWNELLIAQL

SEQ ID NO: 70546 - protein, 470 aa, Arabidopsis thaliana
  peptide (1)..(470): Ceres Seq. ID no. 2711591
  misc_feature (313)..(470): Pfam Name: Arabidopsis proteins of unknown function Pfam Description: Arabidopsis proteins of unknown function
  misc_feature (1)..(470): Homolog of NCBI NO: 15224349 NR Description: unknown protein; protein id: At2g37720.1
  misc_feature (87)..(470): Homolog of NCBI NO: 8777315 NR Description: gene_id:MBM17.12~pir||T02538~strong similarity to
  misc_feature (87)..(470): Homolog of NCBI NO: 30697938 NR Description: expressed protein [Arabidopsis thaliana]
  misc_feature (129)..(470): Homolog of NCBI NO: 15810385 NR Description: unknown protein [Arabidopsis thaliana]
  misc_feature (129)..(470): Homolog of NCBI NO: 18420285 NR Description: putative protein; protein id: At5g20680.1,
  misc_feature (129)..(470): Homolog of NCBI NO: 7487161 NR Description: hypothetical protein At2g38320 [imported] -
  misc_feature (129)..(470): Homolog of NCBI NO: 18404712 NR Description: expressed protein; protein id: At2g38320.1, by cDNA: gi_13878094 [Arabidopsis thaliana] unknown protein [Arabidopsis thaliana]
  misc_feature (95)..(470): Homolog of NCBI NO: 23617116 NR Description: leaf senescence related protein-like [Oryza
  misc_feature (92)..(470): Homolog of NCBI NO: 9759321 NR Description: gb|AAF00670.1~gene_id:MBL20.11~strong similarity
  misc_feature (128)..(470): Homolog of NCBI NO: 34907406 NR Description: P0018C10.29 [Oryza sativa (japonica
MVKTSRKGLLALVVVGVEECCPTRRCDLRDPNLVVDSNCLLSRSTHQSSLVEDSIIINHFRILNFNNRASIFLCLRIGVICSTQSKMYGGKSYILKGSVSLSLIILILLVTTLLVSAKNQPRISLIEVKTCNLAKGEWVEDKKRPLYSGFECKQWLSNIFSCRVMGRPDFSFEGYRWQPEGCNIPEFNRVNFLRRMQNKTIAFIGDSLGREQFQSLMCMATGGKESPEVQNVGSEYGLVIPKGAPRPGGWAYRFPTTNTTVLSYWSASLTDLVPMNNTDPPHLIAMHLDRPPAFIRNYLHRFHVLVLNTGHHWSRDKIEKNHWVMHVNGTRVEGGYFKNVENAKIFTIHSLVKWLDAQLPLHPRLKAFFTTISPRHEKCNNTIPLSRGSKITGEGGSLDTIVESAVNGTRVKILDITALSKLRDEAHIAGCKLKPKKASNVTSAPTFNDCLHWCLPGIPDTWNELLIAQL

SEQ ID NO: 70547 - protein, 384 aa, Arabidopsis thaliana
  peptide (1)..(384): Ceres Seq. ID no. 2711592
  misc_feature (227)..(384): Pfam Name: Arabidopsis proteins of unknown function Pfam Description: Arabidopsis proteins of unknown function
  misc_feature (1)..(384): Homolog of NCBI NO: 15224349 NR Description: unknown protein; protein id: At2g37720.1
  misc_feature (1)..(384): Homolog of NCBI NO: 8777315 NR Description: gene_id:MBM17.12~pir||T02538~strong similarity to
  misc_feature (1)..(384): Homolog of NCBI NO: 30697938 NR Description: expressed protein [Arabidopsis thaliana]
  misc_feature (43)..(384): Homolog of NCBI NO: 15810385 NR Description: unknown protein [Arabidopsis thaliana]
  misc_feature (43)..(384): Homolog of NCBI NO: 18420285 NR Description: putative protein; protein id: At5g20680.1,
  misc_feature (43)..(384): Homolog of NCBI NO: 7487161 NR Description: hypothetical protein At2g38320 [imported] -
  misc_feature (43)..(384): Homolog of NCBI NO: 18404712 NR Description: expressed protein; protein id: At2g38320.1, by cDNA: gi_13878094 [Arabidopsis thaliana] unknown protein [Arabidopsis thaliana]
  misc_feature (9)..(384): Homolog of NCBI NO: 23617116 NR Description: leaf senescence related protein-like [Oryza
  misc_feature (6)..(384): Homolog of NCBI NO: 9759321 NR Description: gb|AAF00670.1~gene_id:MBL20.11~strong similarity
  misc_feature (42)..(384): Homolog of NCBI NO: 34907406 NR Description: P0018C10.29 [Oryza sativa (japonica
MYGGKSYILKGSVSLSLIILILLVTTLLVSAKNQPRISLIEVKTCNLAKGEWVEDKKRPLYSGFECKQWLSNIFSCRVMGRPDFSFEGYRWQPEGCNIPEFNRVNFLRRMQNKTIAFIGDSLGREQFQSLMCMATGGKESPEVQNVGSEYGLVIPKGAPRPGGWAYRFPTTNTTVLSYWSASLTDLVPMNNTDPPHLIAMHLDRPPAFIRNYLHRFHVLVLNTGHHWSRDKIEKNHWVMHVNGTRVEGGYFKNVENAKIFTIHSLVKWLDAQLPLHPRLKAFFTTISPRHEKCNNTIPLSRGSKITGEGGSLDTIVESAVNGTRVKILDITALSKLRDEAHIAGCKLKPKKASNVTSAPTFNDCLHWCLPGIPDTWNELLIAQL

SEQ ID NO: 70548 - DNA, 942 bp, Arabidopsis thaliana
  misc_feature (1)..(942): Ceres Seq. ID no. 2711597
atgccggtgagagttgttgagagcaacacgcctgctcaagcattttctggtacgcaaaatgtctctaatcaacagaaggaggaagcttggagagtcaacgtccagatacagggtattgaccttgaacatggttatctttgtggcaccatggaagctctaaacgttcccatggcagacactcctgtcataacattctgggaaggggaaatcgttgatggaaagaattataccttttacaccggaaaatgggaagcaacgagggaagatgatatgagacattggtcaaagttcccgtctttttcgcctcttcagagatggaaagagcaatactttgtaaacgttggcacagattgtggactaacaatagctggattttactacgtatgcttctcctgcagcgatggttccatcagcggtttctattatgatccaaacagcagtttccatcacatgatcataagtagtagtaaaaatgtgttgaaaatggaagaagttgaggtgagcaagaagaggaaatttcagacagatcaatctgatgagttatcgttattacctctgtcaaaacacacttgttttgccaatgttgcttgttcagagaatacaaatggtaactcggagattgatacagagtattcaatgtcttcttatgtgaactcaacaacttctatggagtgtaacaatgatatagagatgaaagaggaatcatctggatcatgcggtgaagacaagatgatctctttcgaaagccatctagattacatctatgggactcagaacttagaggatttttcagagaaagtcattgaaaacattctctatctcgatgaacaagaagaagaagaggaagatgctaaaggatgtagtagtaatgctgctaagtttgttctgtcctctggaagatggactgttaaccaaggtaaagaaaaccggattttggtttga

SEQ ID NO: 70549 - protein, 313 aa, Arabidopsis thaliana
  peptide (1)..(313): Ceres Seq. ID no. 2711598
  misc_feature (1)..(313): Homolog of NCBI NO: 15224341 NR Description: hypothetical protein; protein id: At2g37680.1
  misc_feature (146)..(305): Homolog of NCBI NO: 19421998 NR Description: phytochrome A specific signal transduction
  misc_feature (146)..(305): Homolog of NCBI NO: 30794093 NR Description: unknown protein [Arabidopsis thaliana]
  misc_feature (146)..(305): Homolog of NCBI NO: 17148773 NR Description: far-red elongated hypocotyl protein 1
  misc_feature (13)..(103): Homolog of NCBI NO: 29150393 NR Description: unknown protein [Oryza sativa (japonica
  misc_feature (105)..(147): Homolog of NCBI NO: 29150393 NR Description: unknown protein [Oryza sativa (japonica
  misc_feature (13)..(84): Homolog of NCBI NO: 34895748 NR Description: P0024G09.20 [Oryza sativa (japonica
  misc_feature (105)..(147): Homolog of NCBI NO: 34895748 NR Description: P0024G09.20 [Oryza sativa (japonica
  misc_feature (11)..(105): Homolog of NCBI NO: 40747141 NR Description: hypothetical protein AN1179.2 [Aspergillus
  misc_feature (15)..(100): Homolog of NCBI NO: 13398295 NR Description: hypothetical protein [Mus musculus]
MPVRVVESNTPAQAFSGTQNVSNQQKEEAWRVNVQIQGIDLEHGYLCGTMEALNVPMADTPVITFWEGEIVDGKNYTFYTGKWEATREDDMRHWSKFPSFSPLQRWKEQYFVNVGTDCGLTIAGFYYVCFSCSDGSISGFYYDPNSSFHHMIISSSKNVLKMEEVEVSKKRKFQTDQSDELSLLPLSKHTCFANVACSENTNGNSEIDTEYSMSSYVNSTTSMECNNDIEMKEESSGSCGEDKMISFESHLDYIYGTQNLEDFSEKVIENILYLDEQEEEEEDAKGCSSNAAKFVLSSGRWTVNQGKENRILV

SEQ ID NO: 70550 - protein, 264 aa, Arabidopsis thaliana
  peptide (1)..(264): Ceres Seq. ID no. 2711599
  misc_feature (1)..(264): Homolog of NCBI NO: 15224341 NR Description: hypothetical protein; protein id: At2g37680.1
  misc_feature (97)..(256): Homolog of NCBI NO: 19421998 NR Description: phytochrome A specific signal transduction
  misc_feature (97)..(256): Homolog of NCBI NO: 30794093 NR Description: unknown protein [Arabidopsis thaliana]
  misc_feature (97)..(256): Homolog of NCBI NO: 17148773 NR Description: far-red elongated hypocotyl protein 1
  misc_feature (1)..(54): Homolog of NCBI NO: 29150393 NR Description: unknown protein [Oryza sativa (japonica
  misc_feature (56)..(98): Homolog of NCBI NO: 29150393 NR Description: unknown protein [Oryza sativa (japonica
  misc_feature (1)..(35): Homolog of NCBI NO: 34895748 NR Description: P0024G09.20 [Oryza sativa (japonica
  misc_feature (56)..(98): Homolog of NCBI NO: 34895748 NR Description: P0024G09.20 [Oryza sativa (japonica
  misc_feature (1)..(56): Homolog of NCBI NO: 40747141 NR Description: hypothetical protein AN1179.2 [Aspergillus
  misc_feature (1)..(51): Homolog of NCBI NO: 13398295 NR Description: hypothetical protein [Mus musculus]
MEALNVPMADTPVITFWEGEIVDGKNYTFYTGKWEATREDDMRHWSKFPSFSPLQRWKEQYFVNVGTDCGLTIAGFYYVCFSCSDGSISGFYYDPNSSFHHMIISSSKNVLKMEEVEVSKKRKFQTDQSDELSLLPLSKHTCFANVACSENTNGNSEIDTEYSMSSYVNSTTSMECNNDIEMKEESSGSCGEDKMISFESHLDYIYGTQNLEDFSEKVIENILYLDEQEEEEEDAKGCSSNAAKFVLSSGRWTVNQGKENRILV

SEQ ID NO: 70551 - protein, 257 aa, Arabidopsis thaliana
  peptide (1)..(257): Ceres Seq. ID no. 2711600
  misc_feature (1)..(257): Homolog of NCBI NO: 15224341 NR Description: hypothetical protein; protein id: At2g37680.1
  misc_feature (90)..(249): Homolog of NCBI NO: 19421998 NR Description: phytochrome A specific signal transduction
  misc_feature (90)..(249): Homolog of NCBI NO: 30794093 NR Description: unknown protein [Arabidopsis thaliana]
  misc_feature (90)..(249): Homolog of NCBI NO: 17148773 NR Description: far-red elongated hypocotyl protein 1
  misc_feature (1)..(47): Homolog of NCBI NO: 29150393 NR Description: unknown protein [Oryza sativa (japonica
  misc_feature (49)..(91): Homolog of NCBI NO: 29150393 NR Description: unknown protein [Oryza sativa (japonica
  misc_feature (1)..(28): Homolog of NCBI NO: 34895748 NR Description: P0024G09.20 [Oryza sativa (japonica
  misc_feature (49)..(91): Homolog of NCBI NO: 34895748 NR Description: P0024G09.20 [Oryza sativa (japonica
  misc_feature (1)..(49): Homolog of NCBI NO: 40747141 NR Description: hypothetical protein AN1179.2 [Aspergillus
  misc_feature (1)..(44): Homolog of NCBI NO: 13398295 NR Description: hypothetical protein [Mus musculus]
MADTPVITFWEGEIVDGKNYTFYTGKWEATREDDMRHWSKFPSFSPLQRWKEQYFVNVGTDCGLTIAGFYYVCFSCSDGSISGFYYDPNSSFHHMIISSSKNVLKMEEVEVSKKRKFQTDQSDELSLLPLSKHTCFANVACSENTNGNSEIDTEYSMSSYVNSTTSMECNNDIEMKEESSGSCGEDKMISFESHLDYIYGTQNLEDFSEKVIENILYLDEQEEEEEDAKGCSSNAAKFVLSSGRWTVNQGKENRILV

SEQ ID NO: 70552 - DNA, 2331 bp, Arabidopsis thaliana
  misc_feature (1)..(2331): Ceres Seq. ID no. 2711644
  misc_feature: MA Experiment ID: 20000180 Result: Up-regulated in Transcription
  misc_feature: MA Experiment 20000180 PARAMETER Experiment Name: At_Germinating_Seeds_P Parameter: Age (hr) Value: 24 vs. 0
  misc_feature: MA Experiment 20000180 PARAMETER Experiment Name: At_Germinating_Seeds_P Parameter: Tissue Value: Germinating Seeds
  misc_feature: MA Experiment ID: 20000184 Result: Up-regulated in Transcription
  misc_feature: MA Experiment 20000184 PARAMETER Experiment Name: At_Shoots__P Parameter: Age (day) Value: 7
  misc_feature: MA Experiment 20000184 PARAMETER Experiment Name: At_Shoots__P Parameter: Tissue Value: Shoots vs. Whole Plant
  misc_feature: MA Experiment ID: 20000227 Result: Up-regulated in Transcription
  misc_feature: MA Experiment 20000227 PARAMETER Experiment Name: At_Root-Tips-vs-Tops_P Parameter: Tissue Value: Root Tips vs. Root Tops
  misc_feature: MA Experiment ID: 20000437 Result: Down-regulated in Transcription
  misc_feature: MA Experiment 20000437 PARAMETER Experiment Name: At_Drought_P Parameter: Age (day) Value: 8
  misc_feature: MA Experiment 20000437 PARAMETER Experiment Name: At_Drought_P Parameter: Organism Value: A. thaliana
  misc_feature: MA Experiment 20000437 PARAMETER Experiment Name: At_Drought_P Parameter: Plant Line Value: WS
  misc_feature: MA Experiment 20000437 PARAMETER Experiment Name: At_Drought_P Parameter: Timepoint (hr) Value: 24
  misc_feature: MA Experiment 20000437 PARAMETER Experiment Name: At_Drought_P Parameter: Tissue Value: Whole Plant
  misc_feature: MA Experiment 20000437 PARAMETER Experiment Name: At_Drought_P Parameter: Treatment Value: Drought vs. No Drought
  misc_feature: MA Experiment ID: 20001247 Result: Up-regulated in Transcription
  misc_feature: MA Experiment 20001247 PARAMETER Experiment Name: At_Far-red-induction_P Parameter: Age (day) Value: 7
  misc_feature: MA Experiment 20001247 PARAMETER Experiment Name: At_Far-red-induction_P Parameter: Light Value: Far-red vs. White
  misc_feature: MA Experiment 20001247 PARAMETER Experiment Name: At_Far-red-induction_P Parameter: Organism Value: A. thaliana
  misc_feature: MA Experiment 20001247 PARAMETER Experiment Name: At_Far-red-induction_P Parameter: Plant Line Value: Columbia
  misc_feature: MA Experiment 20001247 PARAMETER Experiment Name: At_Far-red-induction_P Parameter: Timepoint (hr) Value: 1
  misc_feature: MA Experiment 20001247 PARAMETER Experiment Name: At_Far-red-induction_P Parameter: Tissue Value: Whole Plant
atgcaacccaattctcacatcttcgtcatcatcaccatttcatcactcatcattacagtttctgcgtatggctcaacaggcacaatcgcagcagctttcggcgaaaacggattcttctgcgccattgacgcaagtgggaagcaagaagtcatctgttgggatagaggaaacactaaccgatcattaaaccgacccccaggtgaaatctccggttattctcctccaatgacttctctttccggtggtgaaggttttctctgcgccattacgtcgaacacttcgcgtgcgttttgttggaaccttgaagatccttctgagaatctcgttcctcgagcttttcagtataattcttacttacagattgcttctggtaacaatcatgtttgtgctattagtggattgtattactcaggtcctgattatggtcctgttcattgttgggagtatagtgataacactaatttcacttctggtcttctttggaattcttcttttcataatccttatatagatagtctcatgtttcgtaagattgtttctggagatgggttttcttgtggtgttactaaagatggagacttggtttgttggggaccaaaatcaaaccttttgaatttctccaataatgaagaattcgaggttttagcttctgggaggaactctgtttgtggtgtctctaaagattcaggtcaacttcattgctttggagatgaaacagagtttggttcgttaccaaaccggcctcggtttattgctctttcagctggtgctaatcattattgtggtatacgtgaggatgatcatggagttgagtgttggggaaggaacttgaattcttcttcatcatcttcagctcctaatacttcagggtttgtggcgatttcgtcttcggattcaacaacttgtggagttagagagcttgatttagttcttgattgttggagagttcatgattcttcgaaagcggattatagtcctcctttggagttatgtagccccgggatgtgttcgcctcgcggtaattgtggtgatggttggtttgctttcaatgcaagtatcttgaaagaatctgagcttactagcttgtgctcgtttcataacctcaacatttgtttacgttgtggaatcagttgcttggaagggtatttcccttccagcacttgtaatccaaacgcggaccgggtctgtactccttgttcgctatgtcagaatagttcttgttacggtatctgtaagattcgggctacgaaatcgaaggagcatgagcagaaagagcagagagaggtacggagattggtgatcatcatagggtgctctgttttagggttcttggtgatgttgattggtttgtctttcattccaaagatgacaaaaggtagtaaacgagatgatgaagagaggagtaagatgacttgttgcttctgtttcgataagaattctgtagaagctgatcctgatcctgtccctcatcagtcggttcttctaccaaccgctgtatctctcggggaaaccaagatcttccgtctatcagaacttaaagacgcgactcacgggttcaaagaattcaacgagctcgggagaggtagcttcgggtttgtctataaagctgttttatctgatgggatacatgttgcggtcaaaagagcgaatgctgcaacgatcattcactctaataaccgaggtttcgagtccgagctagagattctttgcaaaatcagacacaacaatattgtgaatttgttaggatactgctcagagatgggggaaaggcttttggtttatgagtacatgccgcacggtacgcttcatgatcatctccatggagatctttcacaactggactggagcatgagactgaagatcatgttgcaggctgcaagaggacttgattacttacacaacgaagtagatcctccgataattcacagagatgtgaaaacgtccaacatcttgttagacggtgaaatgtgcgcaagaattgcggatttcggattggtaagctcgaatgaaagggattcaagcaatagtgatagagaaggtgatgtgtatgactttggtattgttctacttgagatactaagcgggcgaaaagctatcgatagagagtctgatcctgcggggattgcggaatgggcggttcctttgatcaggaaaggaaaagcagcggcgataatcgataggaacatttgtttgccaagaaatgtagagcctttgcttaaattggctgagttagctgagcttgctgtgagggaaaattcgaatgaacgaccaaatatcagaaatattctgtgttttcttgatctcatcgtcaagtctggcctcactttttaa

SEQ ID NO: 70553 - protein, 776 aa, Arabidopsis thaliana
  peptide (1)..(776): Ceres Seq. ID no. 2711645
  misc_feature (519)..(665): Pfam Name: Protein kinase domain Pfam Description: Protein kinase domain
  misc_feature (5)..(776): Homolog of NCBI NO: 15232759 NR Description: putative protein kinase; protein id: At3g09780.1 thaliana] >gi|6681340|gb|AAF23257.1|AC015985_15 putative protein
  misc_feature (9)..(673): Homolog of NCBI NO: 15721862 NR Description: CR4 [Oryza sativa]
  misc_feature (679)..(767): Homolog of NCBI NO: 15721862 NR Description: CR4 [Oryza sativa]
  misc_feature (24)..(673): Homolog of NCBI NO: 3913366 NR Description: Putative receptor protein kinase CRINKLY4
  misc_feature (679)..(767): Homolog of NCBI NO: 3913366 NR Description: Putative receptor protein kinase CRINKLY4
  misc_feature (325)..(675): Homolog of NCBI NO: 15231681 NR Description: putative protein; protein id: At3g59420.1, by cDNA: gi_20302589 [Arabidopsis thaliana]
  misc_feature (679)..(767): Homolog of NCBI NO: 15231681 NR Description: putative protein; protein id: At3g59420.1, by cDNA: gi_20302589 [Arabidopsis thaliana]
  misc_feature (177)..(665): Homolog of NCBI NO: 15238823 NR Description: receptor kinase-like protein; protein id:
  misc_feature (679)..(775): Homolog of NCBI NO: 15238823 NR Description: receptor kinase-like protein; protein id:
  misc_feature (1)..(342): Homolog of NCBI NO: 10998537 NR Description: cytokinin-regulated kinase 1 [Nicotiana tabacum]
MQPNSHIFVIITISSLIITVSAYGSTGTIAAAFGENGFFCAIDASGKQEVICWDRGNTNRSLNRPPGEISGYSPPMTSLSGGEGFLCAITSNTSRAFCWNLEDPSENLVPRAFQYNSYLQIASGNNHVCAISGLYYSGPDYGPVHCWEYSDNTNFTSGLLWNSSFHNPYIDSLMFRKIVSGDGFSCGVTKDGDLVCWGPKSNLLNFSNNEEFEVLASGRNSVCGVSKDSGQLHCFGDETEFGSLPNRPRFIALSAGANHYCGIREDDHGVECWGRNLNSSSSSSAPNTSGFVAISSSDSTTCGVRELDLVLDCWRVHDSSKADYSPPLELCSPGMCSPRGNCGDGWFAFNASILKESELTSLCSFHNLNICLRCGISCLEGYFPSSTCNPNADRVCTPCSLCQNSSCYGICKIRATKSKEHEQKEQREVRRLVIIIGCSVLGFLVMLIGLSFIPKMTKGSKRDDEERSKMTCCFCFDKNSVEADPDPVPHQSVLLPTAVSLGETKIFRLSELKDATHGFKEFNELGRGSFGFVYKAVLSDGIHVAVKRANAATIIHSNNRGFESELEILCKIRHNNIVNLLGYCSEMGERLLVYEYMPHGTLHDHLHGDLSQLDWSMRLKIMLQAARGLDYLHNEVDPPIIHRDVKTSNILLDGEMCARIADFGLVSSNERDSSNSDREGDVYDFGIVLLEILSGRKAIDRESDPAGIAEWAVPLIRKGKAAAIIDRNICLPRNVEPLLKLAELAELAVRENSNERPNIRNILCFLDLIVKSGLTF

SEQ ID NO: 70554 - protein, 701 aa, Arabidopsis thaliana
  peptide (1)..(701): Ceres Seq. ID no. 2711646
  misc_feature (444)..(590): Pfam Name: Protein kinase domain Pfam Description: Protein kinase domain
  misc_feature (1)..(701): Homolog of NCBI NO: 15232759 NR Description: putative protein kinase; protein id: At3g09780.1 thaliana] >gi|6681340|gb|AAF23257.1|AC015985_15 putative protein
  misc_feature (1)..(598): Homolog of NCBI NO: 15721862 NR Description: CR4 [Oryza sativa]
  misc_feature (604)..(692): Homolog of NCBI NO: 15721862 NR Description: CR4 [Oryza sativa]
  misc_feature (1)..(598): Homolog of NCBI NO: 3913366 NR Description: Putative receptor protein kinase CRINKLY4
  misc_feature (604)..(692): Homolog of NCBI NO: 3913366 NR Description: Putative receptor protein kinase CRINKLY4
  misc_feature (250)..(600): Homolog of NCBI NO: 15231681 NR Description: putative protein; protein id: At3g59420.1, by cDNA: gi_20302589 [Arabidopsis thaliana]
  misc_feature (604)..(692): Homolog of NCBI NO: 15231681 NR Description: putative protein; protein id: At3g59420.1, by cDNA: gi_20302589 [Arabidopsis thaliana]
  misc_feature (102)..(590): Homolog of NCBI NO: 15238823 NR Description: receptor kinase-like protein; protein id:
  misc_feature (604)..(700): Homolog of NCBI NO: 15238823 NR Description: receptor kinase-like protein; protein id:
  misc_feature (1)..(267): Homolog of NCBI NO: 10998537 NR Description: cytokinin-regulated kinase 1 [Nicotiana tabacum]
MTSLSGGEGFLCAITSNTSRAFCWNLEDPSENLVPRAFQYNSYLQIASGNNHVCAISGLYYSGPDYGPVHCWEYSDNTNFTSGLLWNSSFHNPYIDSLMFRKIVSGDGFSCGVTKDGDLVCWGPKSNLLNFSNNEEFEVLASGRNSVCGVSKDSGQLHCFGDETEFGSLPNRPRFIALSAGANHYCGIREDDHGVECWGRNLNSSSSSSAPNTSGFVAISSSDSTTCGVRELDLVLDCWRVHDSSKADYSPPLELCSPGMCSPRGNCGDGWFAFNASILKESELTSLCSFHNLNICLRCGISCLEGYFPSSTCNPNADRVCTPCSLCQNSSCYGICKIRATKSKEHEQKEQREVRRLVIIIGCSVLGFLVMLIGLSFIPKMTKGSKRDDEERSKMTCCFCFDKNSVEADPDPVPHQSVLLPTAVSLGETKIFRLSELKDATHGFKEFNELGRGSFGFVYKAVLSDGIHVAVKRANAATIIHSNNRGFESELEILCKIRHNNIVNLLGYCSEMGERLLVYEYMPHGTLHDHLHGDLSQLDWSMRLKIMLQAARGLDYLHNEVDPPIIHRDVKTSNILLDGEMCARIADFGLVSSNERDSSNSDREGDVYDFGIVLLEILSGRKAIDRESDPAGIAEWAVPLIRKGKAAAIIDRNICLPRNVEPLLKLAELAELAVRENSNERPNIRNILCFLDLIVKSGLTF

SEQ ID NO: 70555 - protein, 603 aa, Arabidopsis thaliana
  peptide (1)..(603): Ceres Seq. ID no. 2711647
  misc_feature (346)..(492): Pfam Name: Protein kinase domain Pfam Description: Protein kinase domain
  misc_feature (1)..(603): Homolog of NCBI NO: 15232759 NR Description: putative protein kinase; protein id: At3g09780.1 thaliana] >gi|6681340|gb|AAF23257.1|AC015985_15 putative protein
  misc_feature (1)..(500): Homolog of NCBI NO: 15721862 NR Description: CR4 [Oryza sativa]
  misc_feature (506)..(594): Homolog of NCBI NO: 15721862 NR Description: CR4 [Oryza sativa]
  misc_feature (1)..(500): Homolog of NCBI NO: 3913366 NR Description: Putative receptor protein kinase CRINKLY4
  misc_feature (506)..(594): Homolog of NCBI NO: 3913366 NR Description: Putative receptor protein kinase CRINKLY4
  misc_feature (152)..(502): Homolog of NCBI NO: 15231681 NR Description: putative protein; protein id: At3g59420.1, by cDNA: gi_20302589 [Arabidopsis thaliana]
  misc_feature (506)..(594): Homolog of NCBI NO: 15231681 NR Description: putative protein; protein id: At3g59420.1, by cDNA: gi_20302589 [Arabidopsis thaliana]
  misc_feature (4)..(492): Homolog of NCBI NO: 15238823 NR Description: receptor kinase-like protein; protein id:
  misc_feature (506)..(602): Homolog of NCBI NO: 15238823 NR Description: receptor kinase-like protein; protein id:
  misc_feature (1)..(169): Homolog of NCBI NO: 10998537 NR Description: cytokinin-regulated kinase 1 [Nicotiana tabacum]
MFRKIVSGDGFSCGVTKDGDLVCWGPKSNLLNFSNNEEFEVLASGRNSVCGVSKDSGQLHCFGDETEFGSLPNRPRFIALSAGANHYCGIREDDHGVECWGRNLNSSSSSSAPNTSGFVAISSSDSTTCGVRELDLVLDCWRVHDSSKADYSPPLELCSPGMCSPRGNCGDGWFAFNASILKESELTSLCSFHNLNICLRCGISCLEGYFPSSTCNPNADRVCTPCSLCQNSSCYGICKIRATKSKEHEQKEQREVRRLVIIIGCSVLGFLVMLIGLSFIPKMTKGSKRDDEERSKMTCCFCFDKNSVEADPDPVPHQSVLLPTAVSLGETKIFRLSELKDATHGFKEFNELGRGSFGFVYKAVLSDGIHVAVKRANAATIIHSNNRGFESELEILCKIRHNNIVNLLGYCSEMGERLLVYEYMPHGTLHDHLHGDLSQLDWSMRLKIMLQAARGLDYLHNEVDPPIIHRDVKTSNILLDGEMCARIADFGLVSSNERDSSNSDREGDVYDFGIVLLEILSGRKAIDRESDPAGIAEWAVPLIRKGKAAAIIDRNICLPRNVEPLLKLAELAELAVRENSNERPNIRNILCFLDLIVKSGLTF

SEQ ID NO: 70556 - DNA, 1041 bp, Arabidopsis thaliana
  misc_feature (1)..(1041): Ceres Seq. ID no. 2711763
  misc_feature: MA Experiment ID: 20000315 Result: Down-regulated in Transcription
  misc_feature: MA Experiment 20000315 PARAMETER Experiment Name: At_14day_Shoots-Roots_Sub_P Parameter: Age (day) Value: 14
  misc_feature: MA Experiment 20000315 PARAMETER Experiment Name: At_14day_Shoots-Roots_Sub_P Parameter: Organism Value: A. thaliana
  misc_feature: MA Experiment 20000315 PARAMETER Experiment Name: At_14day_Shoots-Roots_Sub_P Parameter: Plant Line Value: WS
  misc_feature: MA Experiment 20000315 PARAMETER Experiment Name: At_14day_Shoots-Roots_Sub_P Parameter: Tissue Value: Shoots vs. Whole Plant
  misc_feature: MA Experiment ID: 20000355 Result: Up-regulated in Transcription
  misc_feature: MA Experiment 20000355 PARAMETER Experiment Name: At_Siliques_Sub_P Parameter: Age (day) Value: 21
  misc_feature: MA Experiment 20000355 PARAMETER Experiment Name: At_Siliques_Sub_P Parameter: Organism Value: A. thaliana
  misc_feature: MA Experiment 20000355 PARAMETER Experiment Name: At_Siliques_Sub_P Parameter: Plant Line Value: WS
  misc_feature: MA Experiment 20000355 PARAMETER Experiment Name: At_Siliques_Sub_P Parameter: Tissue Value: Less Than 5mm Siliques vs. Whole Plant
  misc_feature: MA Experiment ID: 20000440 Result: Up-regulated in Transcription
  misc_feature: MA Experiment 20000440 PARAMETER Experiment Name: At_Closed-Flower__Sub_P Parameter: Tissue Value: Closed Flower vs. Whole Plant
  misc_feature: Pfam Name: F-box Pfam Description: F-box domain
atgcttctatacttgctcatcacttgtctctctttcttcttcttttccaaatctttatcctttcctcaatgggcatctaaaaccaaaaatttgctctccttctacttctccaagtatttgtttacaaacagtctacaccagatcacacccgatctagcctctccggtgctcggaaaaatgtcaattcttgacctccctgaccttccactcgactgcattcttgaacttcttccaccctctgaactatgtaccatggctagggtctgtagctcgttaagagagagatgtgtaagtgatcatttatgggagaaacacttgaagactaaatggggaaaaatccttggaccttctgctcacaaagaatggcaatgctatctatcttctccatatcatctcgattctcctcatcacaaaactagtcatcttggtttggccaaaatcatatctcttatgcgatcgctttcatccatttttcgagatgatgatcataggaggagatatccatcttcaatccctcttgactctaccatgaacttctacctatccctcgaaacaggtcgcttttggtttccagctcaagtttacaaccgtgagaatggacatgtagggttcatgttgtcatgctatgatgctgagctcagctatgacactgacactaatacttttcaagctaggtatccaccacatggtaaaagagcaattgcggttgaaaaagacgtgacatgggagaggataagagcagctcccgttgatgcatcaccccataatctctatgtgtcagattctctaaatgagttaaaacccggagaccacatagagatccagtggagaaggaacaaagagtttccttatgagatgatggtgttggaatttaaccagtacacagtcggatcaaggtggagaaaaacgatgattaacaggagagatcatagagagaaaggtaacgaggaagacgggttctatggaggaattcgaaaaataaattgtaaagaagatattgaaatgtggaagcgtctttggccatcctccatcttggagtag

SEQ ID NO: 70557 - protein, 346 aa, Arabidopsis thaliana
  peptide (1)..(346): Ceres Seq. ID no. 2711764
  misc_feature: Pfam Name: F-box Pfam Description: F-box domain
  misc_feature (1)..(346): Homolog of NCBI NO: 15225802 NR Description: unknown protein; protein id: At2g26850.1
  misc_feature (1)..(284): Homolog of NCBI NO: 30685347 NR Description: F-box protein family [Arabidopsis thaliana] unknown protein [Arabidopsis thaliana] unknown protein [Arabidopsis thaliana]
  misc_feature (285)..(346): Homolog of NCBI NO: 30685347 NR Description: F-box protein family [Arabidopsis thaliana] unknown protein [Arabidopsis thaliana] unknown protein [Arabidopsis thaliana]
  misc_feature (60)..(284): Homolog of NCBI NO: 7487431 NR Description: hypothetical protein At2g32560 [imported] - thaliana >gi|3298544|gb|AAC25938.1| unknown protein [Arabidopsis
  misc_feature (58)..(284): Homolog of NCBI NO: 34903372 NR Description: unnamed protein product [Oryza sativa (japonica group)] >gi|6498442|dbj|BAA87845.1| unnamed protein product
  misc_feature (285)..(346): Homolog of NCBI NO: 34903372 NR Description: unnamed protein product [Oryza sativa (japonica group)] >gi|6498442|dbj|BAA87845.1| unnamed protein product
  misc_feature (59)..(284): Homolog of NCBI NO: 30688559 NR Description: F-box protein family [Arabidopsis thaliana]
  misc_feature (285)..(346): Homolog of NCBI NO: 30688559 NR Description: F-box protein family [Arabidopsis thaliana]
  misc_feature (60)..(345): Homolog of NCBI NO: 34909060 NR Description: P0702B09.33 [Oryza sativa (japonica
  misc_feature (172)..(284): Homolog of NCBI NO: 7459607 NR Description: hypothetical protein At2g41170 [imported] - thaliana >gi|3402701|gb|AAD11995.1| unknown protein [Arabidopsis
MLLYLLITCLSFFFFSKSLSFPQWASKTKNLLSFYFSKYLFTNSLHQITPDLASPVLGKMSILDLPDLPLDCILELLPPSELCTMARVCSSLRERCVSDHLWEKHLKTKWGKILGPSAHKEWQCYLSSPYHLDSPHHKTSHLGLAKIISLMRSLSSIFRDDDHRRRYPSSIPLDSTMNFYLSLETGRFWFPAQVYNRENGHVGFMLSCYDAELSYDTDTNTFQARYPPHGKRAIAVEKDVTWERIRAAPVDASPHNLYVSDSLNELKPGDHIEIQWRRNKEFPYEMMVLEFNQYTVGSRWRKTMINRRDHREKGNEEDGFYGGIRKINCKEDIEMWKRLWPSSILE

SEQ ID NO: 70558 - protein, 287 aa, Arabidopsis thaliana
  peptide (1)..(287): Ceres Seq. ID no. 2711765
  misc_feature: Pfam Name: F-box Pfam Description: F-box domain
  misc_feature (1)..(287): Homolog of NCBI NO: 15225802 NR Description: unknown protein; protein id: At2g26850.1
  misc_feature (1)..(225): Homolog of NCBI NO: 30685347 NR Description: F-box protein family [Arabidopsis thaliana] unknown protein [Arabidopsis thaliana] unknown protein [Arabidopsis thaliana]
  misc_feature (226)..(287): Homolog of NCBI NO: 30685347 NR Description: F-box protein family [Arabidopsis thaliana] unknown protein [Arabidopsis thaliana] unknown protein [Arabidopsis thaliana]
  misc_feature (1)..(225): Homolog of NCBI NO: 7487431 NR Description: hypothetical protein At2g32560 [imported] - thaliana >gi|3298544|gb|AAC25938.1| unknown protein [Arabidopsis
  misc_feature (1)..(225): Homolog of NCBI NO: 34903372 NR Description: unnamed protein product [Oryza sativa (japonica group)] >gi|6498442|dbj|BAA87845.1| unnamed protein product
  misc_feature (226)..(287): Homolog of NCBI NO: 34903372 NR Description: unnamed protein product [Oryza sativa (japonica group)] >gi|6498442|dbj|BAA87845.1| unnamed protein product
  misc_feature (1)..(225): Homolog of NCBI NO: 30688559 NR Description: F-box protein family [Arabidopsis thaliana]
  misc_feature (226)..(287): Homolog of NCBI NO: 30688559 NR Description: F-box protein family [Arabidopsis thaliana]
  misc_feature (1)..(286): Homolog of NCBI NO: 34909060 NR Description: P0702B09.33 [Oryza sativa (japonica
  misc_feature (113)..(225): Homolog of NCBI NO: 7459607 NR Description: hypothetical protein At2g41170 [imported] - thaliana >gi|3402701|gb|AAD11995.1| unknown protein [Arabidopsis
MSILDLPDLPLDCILELLPPSELCTMARVCSSLRERCVSDHLWEKHLKTKWGKILGPSAHKEWQCYLSSPYHLDSPHHKTSHLGLAKIISLMRSLSSIFRDDDHRRRYPSSIPLDSTMNFYLSLETGRFWFPAQVYNRENGHVGFMLSCYDAELSYDTDTNTFQARYPPHGKRAIAVEKDVTWERIRAAPVDASPHNLYVSDSLNELKPGDHIEIQWRRNKEFPYEMMVLEFNQYTVGSRWRKTMINRRDHREKGNEEDGFYGGIRKINCKEDIEMWKRLWPSSILE

SEQ ID NO: 70559 - protein, 262 aa, Arabidopsis thaliana
  peptide (1)..(262): Ceres Seq. ID no. 2711766
  misc_feature: Pfam Name: F-box Pfam Description: F-box domain
  misc_feature (1)..(200): Homolog of NCBI NO: 30688559 NR Description: F-box protein family [Arabidopsis thaliana]
  misc_feature (201)..(262): Homolog of NCBI NO: 30688559 NR Description: F-box protein family [Arabidopsis thaliana]
  misc_feature (1)..(261): Homolog of NCBI NO: 34909060 NR Description: P0702B09.33 [Oryza sativa (japonica
  misc_feature (88)..(200): Homolog of NCBI NO: 7459607 NR Description: hypothetical protein At2g41170 [imported] - thaliana >gi|3402701|gb|AAD11995.1| unknown protein [Arabidopsis
  misc_feature (1)..(262): Homolog of NCBI NO: 15225802 NR Description: unknown protein; protein id: At2g26850.1
  misc_feature (1)..(200): Homolog of NCBI NO: 30685347 NR Description: F-box protein family [Arabidopsis thaliana] unknown protein [Arabidopsis thaliana] unknown protein [Arabidopsis thaliana]
  misc_feature (201)..(262): Homolog of NCBI NO: 30685347 NR Description: F-box protein family [Arabidopsis thaliana] unknown protein [Arabidopsis thaliana] unknown protein [Arabidopsis thaliana]
  misc_feature (1)..(200): Homolog of NCBI NO: 7487431 NR Description: hypothetical protein At2g32560 [imported] - thaliana >gi|3298544|gb|AAC25938.1| unknown protein [Arabidopsis
  misc_feature (1)..(200): Homolog of NCBI NO: 34903372 NR Description: unnamed protein product [Oryza sativa (japonica group)] >gi|6498442|dbj|BAA87845.1| unnamed protein product
  misc_feature (201)..(262): Homolog of NCBI NO: 34903372 NR Description: unnamed protein product [Oryza sativa (japonica group)] >gi|6498442|dbj|BAA87845.1| unnamed protein product
MARVCSSLRERCVSDHLWEKHLKTKWGKILGPSAHKEWQCYLSSPYHLDSPHHKTSHLGLAKIISLMRSLSSIFRDDDHRRRYPSSIPLDSTMNFYLSLETGRFWFPAQVYNRENGHVGFMLSCYDAELSYDTDTNTFQARYPPHGKRAIAVEKDVTWERIRAAPVDASPHNLYVSDSLNELKPGDHIEIQWRRNKEFPYEMMVLEFNQYTVGSRWRKTMINRRDHREKGNEEDGFYGGIRKINCKEDIEMWKRLWPSSILE

SEQ ID NO: 70560 - DNA, 1392 bp, Arabidopsis thaliana
  misc_feature (1)..(1392): Ceres Seq. ID no. 2711771
  misc_feature: MA Experiment ID: 20000166 Result: Down-regulated in Transcription
  misc_feature: MA Experiment 20000166 PARAMETER Experiment Name: At_100uM_ABA_P Parameter: Age (day) Value: 14
  misc_feature: MA Experiment 20000166 PARAMETER Experiment Name: At_100uM_ABA_P Parameter: Organism Value: A. thaliana
  misc_feature: MA Experiment 20000166 PARAMETER Experiment Name: At_100uM_ABA_P Parameter: Plant Line Value: WS
  misc_feature: MA Experiment 20000166 PARAMETER Experiment Name: At_100uM_ABA_P Parameter: Timepoint (hr) Value: 1
  misc_feature: MA Experiment 20000166 PARAMETER Experiment Name: At_100uM_ABA_P Parameter: Tissue Value: Aerial
  misc_feature: MA Experiment 20000166 PARAMETER Experiment Name: At_100uM_ABA_P Parameter: Treatment Value: 100uM ABA vs. No Treatment
  misc_feature: MA Experiment ID: 20000185 Result: Up-regulated in Transcription
  misc_feature: MA Experiment 20000185 PARAMETER Experiment Name: At_Roots__P Parameter: Age (day) Value: 7 vs. 21
  misc_feature: MA Experiment 20000185 PARAMETER Experiment Name: At_Roots__P Parameter: Organism Value: A. thaliana
  misc_feature: MA Experiment 20000185 PARAMETER Experiment Name: At_Roots__P Parameter: Tissue Value: Roots vs. Whole Plant
  misc_feature: MA Experiment ID: 20000439 Result: Up-regulated in Transcription
  misc_feature: MA Experiment 20000439 PARAMETER Experiment Name: At_Roots__P Parameter: Age (day) Value: 14 vs. 21
  misc_feature: MA Experiment 20000439 PARAMETER Experiment Name: At_Roots__P Parameter: Organism Value: A. thaliana
  misc_feature: MA Experiment 20000439 PARAMETER Experiment Name: At_Roots__P Parameter: Tissue Value: Roots vs. Whole Plant
  misc_feature: MA Experiment ID: 20001451 Result: Up-regulated in Transcription
  misc_feature: MA Experiment 20001451 PARAMETER Experiment Name: At_Far-red-induction_P Parameter: Age (day) Value: 7
  misc_feature: MA Experiment 20001451 PARAMETER Experiment Name: At_Far-red-induction_P Parameter: Light Value: Far-red vs. White
  misc_feature: MA Experiment 20001451 PARAMETER Experiment Name: At_Far-red-induction_P Parameter: Organism Value: A. thaliana
  misc_feature: MA Experiment 20001451 PARAMETER Experiment Name: At_Far-red-induction_P Parameter: Plant Line Value: Columbia
  misc_feature: MA Experiment 20001451 PARAMETER Experiment Name: At_Far-red-induction_P Parameter: Timepoint (hr) Value: 24
  misc_feature: MA Experiment 20001451 PARAMETER Experiment Name: At_Far-red-induction_P Parameter: Tissue Value: Whole Plant
atgtcagagccaatcaaaaacatagttctggtaggccgtactggtaatggaaaaagcagcacagggaacacccttcttggtacaaagcagttcaaatctaaaaaccaggcaaaaggcgttaccatgatatgtgaaatgtacagagctgcaatacaagatggtccaataatcaatgtcattgacactcctggtttgtgcgactcgttcgtgcccggagacgacataagtaacgaaataatcaattgcttaacaatggcggaagaaggtatacatgctgtgttgcttgttctatctgctaggggtcgcatttcaaaggaggaggagtctacagttaataccttgcagtgcatattcggcagccaaattcttgactattgcattgttgtgttcactggcggtgacgatttggaagaagacgatcagacattagacgattatttcagagctggttgccctgaattcttgacgaaagttctcagactctgtggtggacggaaggtgctatttgataacaaaagtaaagatgaaaagaagaaggttgagcaagttaagcagcttctagcccgtgtggaaaatgtaggagagcaaactggtggaataccgtatacttatcagttgcaccgtaagataaaggaagaaaatgatgaaaggctaagggaagaagaaagggtgattgaatctaaaaaccgtgctgaagcagaactagcagagatgcaacagaatttactaatggaaaaggagaagttacaaatggaggaggcgaaaaacaaacagttgattgcacaagcggaagcaaatgaaaagcttatggaacaagaaagggccaaaaaccgtgctgaaaccgaactagctgcagtaatggtggagaagttacaaatggaagaggagaaaaacaagcagttgattgcacaggcgaatcgcatgatctgcgcaagggatcttaacatcgaatggtctcatagcgaagagcattggaaatgggtaaatctggatcacaacatatcaagcaatacattcgtcgaagttgctgagcttctaggagtttattggtttgacgtaagtggaagtttggacacgacggaaatggcaccatggacacattacgaggttctgttcgttgttaatttaaaagactcagcttttaaatggaatgcagcggtgaaaatgaacctgttttacatcaacagtaggccaggaggtccaggaacgcaagagcgagctgttgacatgaggcagcatattgggaaaggatgggtaactatacacgccggtgaattcattacgacaccggagaatgtcggactgattgggttccgcatgtctgaggtcgactccggcgataacaggggagggctcattgtcaaaggtgttttaattcgtcctataaactaa

SEQ ID NO: 70561 - protein, 463 aa, Arabidopsis thaliana
  peptide (1)..(463): Ceres Seq. ID no. 2711772
  misc_feature (6)..(222): Pfam Name: AIG1 family Pfam Description: AIG1 family
  misc_feature (1)..(463): Homolog of NCBI NO: 15225799 NR Description: similar to avrRpt2-induced protein 1; protein id:
  misc_feature (2)..(299): Homolog of NCBI NO: 15217719 NR Description: AIG1-like protein; protein id: At1g33900.1
  misc_feature (4)..(308): Homolog of NCBI NO: 9665089 NR Description: Hypothetical protein [Arabidopsis thaliana]
  misc_feature (4)..(311): Homolog of NCBI NO: 10092442 NR Description: disease resistance protein AIG1; 916-2572
  misc_feature (4)..(311): Homolog of NCBI NO: 15217731 NR Description: AIG1; protein id: At1g33960.1, supported by cDNA: [Arabidopsis thaliana] >gi|1703219|sp|P54120|AIG1_ARATH AIG1 >gi|1127804|gb|AAC49282.1| AIG1
  misc_feature (2)..(297): Homolog of NCBI NO: 15217724 NR Description: AIG1-like protein; protein id: At1g33930.1
  misc_feature (5)..(302): Homolog of NCBI NO: 15217717 NR Description: AIG1-like protein; protein id: At1g33890.1
  misc_feature (4)..(214): Homolog of NCBI NO: 15217675 NR Description: AIG1-like protein; protein id: At1g33830.1
  misc_feature (2)..(284): Homolog of NCBI NO: 15220922 NR Description: AIG1-like protein; protein id: At1g33950.1
  misc_feature (31)..(278): Homolog of NCBI NO: 15217702 NR Description: AIG1-like protein; protein id: At1g33870.1
MSEPIKNIVLVGRTGNGKSSTGNTLLGTKQFKSKNQAKGVTMICEMYRAAIQDGPIINVIDTPGLCDSFVPGDDISNEIINCLTMAEEGIHAVLLVLSARGRISKEEESTVNTLQCIFGSQILDYCIVVFTGGDDLEEDDQTLDDYFRAGCPEFLTKVLRLCGGRKVLFDNKSKDEKKKVEQVKQLLARVENVGEQTGGIPYTYQLHRKIKEENDERLREEERVIESKNRAEAELAEMQQNLLMEKEKLQMEEAKNKQLIAQAEANEKLMEQERAKNRAETELAAVMVEKLQMEEEKNKQLIAQANRMICARDLNIEWSHSEEHWKWVNLDHNISSNTFVEVAELLGVYWFDVSGSLDTTEMAPWTHYEVLFVVNLKDSAFKWNAAVKMNLFYINSRPGGPGTQERAVDMRQHIGKGWVTIHAGEFITTPENVGLIGFRMSEVDSGDNRGGLIVKGVLIRPIN

SEQ ID NO: 70562 - protein, 422 aa, Arabidopsis thaliana
  peptide (1)..(422): Ceres Seq. ID no. 2711773
  misc_feature (1)..(181): Pfam Name: AIG1 family Pfam Description: AIG1 family
  misc_feature (1)..(422): Homolog of NCBI NO: 15225799 NR Description: similar to avrRpt2-induced protein 1; protein id:
  misc_feature (1)..(258): Homolog of NCBI NO: 15217719 NR Description: AIG1-like protein; protein id: At1g33900.1
  misc_feature (1)..(267): Homolog of NCBI NO: 9665089 NR Description: Hypothetical protein [Arabidopsis thaliana]
  misc_feature (1)..(270): Homolog of NCBI NO: 10092442 NR Description: disease resistance protein AIG1; 916-2572
  misc_feature (1)..(270): Homolog of NCBI NO: 15217731 NR Description: AIG1; protein id: At1g33960.1, supported by cDNA: [Arabidopsis thaliana] >gi|1703219|sp|P54120|AIG1_ARATH AIG1 >gi|1127804|gb|AAC49282.1| AIG1
  misc_feature (1)..(256): Homolog of NCBI NO: 15217724 NR Description: AIG1-like protein; protein id: At1g33930.1
  misc_feature (1)..(261): Homolog of NCBI NO: 15217717 NR Description: AIG1-like protein; protein id: At1g33890.1
  misc_feature (1)..(173): Homolog of NCBI NO: 15217675 NR Description: AIG1-like protein; protein id: At1g33830.1
  misc_feature (1)..(243): Homolog of NCBI NO: 15220922 NR Description: AIG1-like protein; protein id: At1g33950.1
  misc_feature (1)..(237): Homolog of NCBI NO: 15217702 NR Description: AIG1-like protein; protein id: At1g33870.1
MICEMYRAAIQDGPIINVIDTPGLCDSFVPGDDISNEIINCLTMAEEGIHAVLLVLSARGRISKEEESTVNTLQCIFGSQILDYCIVVFTGGDDLEEDDQTLDDYFRAGCPEFLTKVLRLCGGRKVLFDNKSKDEKKKVEQVKQLLARVENVGEQTGGIPYTYQLHRKIKEENDERLREEERVIESKNRAEAELAEMQQNLLMEKEKLQMEEAKNKQLIAQAEANEKLMEQERAKNRAETELAAVMVEKLQMEEEKNKQLIAQANRMICARDLNIEWSHSEEHWKWVNLDHNISSNTFVEVAELLGVYWFDVSGSLDTTEMAPWTHYEVLFVVNLKDSAFKWNAAVKMNLFYINSRPGGPGTQERAVDMRQHIGKGWVTIHAGEFITTPENVGLIGFRMSEVDSGDNRGGLIVKGVLIRPIN

SEQ ID NO: 70563 - protein, 418 aa, Arabidopsis thaliana
  peptide (1)..(418): Ceres Seq. ID no. 2711774
  misc_feature (1)..(177): Pfam Name: AIG1 family Pfam Description: AIG1 family
  misc_feature (1)..(418): Homolog of NCBI NO: 15225799 NR Description: similar to avrRpt2-induced protein 1; protein id:
  misc_feature (1)..(254): Homolog of NCBI NO: 15217719 NR Description: AIG1-like protein; protein id: At1g33900.1
  misc_feature (1)..(263): Homolog of NCBI NO: 9665089 NR Description: Hypothetical protein [Arabidopsis thaliana]
  misc_feature (1)..(266): Homolog of NCBI NO: 10092442 NR Description: disease resistance protein AIG1; 916-2572
  misc_feature (1)..(266): Homolog of NCBI NO: 15217731 NR Description: AIG1; protein id: At1g33960.1, supported by cDNA: [Arabidopsis thaliana] >gi|1703219|sp|P54120|AIG1_ARATH AIG1 >gi|1127804|gb|AAC49282.1| AIG1
  misc_feature (1)..(252): Homolog of NCBI NO: 15217724 NR Description: AIG1-like protein; protein id: At1g33930.1
  misc_feature (1)..(257): Homolog of NCBI NO: 15217717 NR Description: AIG1-like protein; protein id: At1g33890.1
  misc_feature (1)..(169): Homolog of NCBI NO: 15217675 NR Description: AIG1-like protein; protein id: At1g33830.1
  misc_feature (1)..(239): Homolog of NCBI NO: 15220922 NR Description: AIG1-like protein; protein id: At1g33950.1
  misc_feature (1)..(233): Homolog of NCBI NO: 15217702 NR Description: AIG1-like protein; protein id: At1g33870.1
MYRAAIQDGPIINVIDTPGLCDSFVPGDDISNEIINCLTMAEEGIHAVLLVLSARGRISKEEESTVNTLQCIFGSQILDYCIVVFTGGDDLEEDDQTLDDYFRAGCPEFLTKVLRLCGGRKVLFDNKSKDEKKKVEQVKQLLARVENVGEQTGGIPYTYQLHRKIKEENDERLREEERVIESKNRAEAELAEMQQNLLMEKEKLQMEEAKNKQLIAQAEANEKLMEQERAKNRAETELAAVMVEKLQMEEEKNKQLIAQANRMICARDLNIEWSHSEEHWKWVNLDHNISSNTFVEVAELLGVYWFDVSGSLDTTEMAPWTHYEVLFVVNLKDSAFKWNAAVKMNLFYINSRPGGPGTQERAVDMRQHIGKGWVTIHAGEFITTPENVGLIGFRMSEVDSGDNRGGLIVKGVLIRPIN

SEQ ID NO: 70564 - DNA, 1068 bp, Arabidopsis thaliana
  misc_feature (1)..(1068): Ceres Seq. ID no. 2711945
  misc_feature: MA Experiment ID: 20000440 Result: Up-regulated in Transcription
  misc_feature: MA Experiment 20000440 PARAMETER Experiment Name: At_Closed-Flower__Sub_P Parameter: Tissue Value: Closed Flower vs. Whole Plant
  misc_feature: Pfam Name: Lipase_3 Pfam Description: Lipase (class 3)
atggtaggagacatcgccacgagatggaaagaattgagcggtagtagcaagtggaaagacctgcttgatcctcttgacttggatctacgccgttatatcctacactatggtgatatggctgaggagatagctgctacaccaaagaagagctctttgctcgaaccggttacctcaaagccaaccctttcagacgaaggcaagaagttgttagggaggaggggcattgttgttgcatggcgagggaccattcagctgtacgagtgggctaacgatttcgatttcccacttgaatcagctgttatggttttccctggagctaacccgaatgacgagcctcgcgtagcaaatggttggctatccctttatacatccactgatccacgatcacgttttgacaagaccagtgcacaagaacaggttcaagaagagctcaaaaggttactagaattgtacaaaaacgaagacgttaccatcaccttaacaggccatagcttgggcgcagttatgtcgattctatccgccgcagactttctccataacgaatggcctaagatcacaccaagtctacaacacagcctatgtgtcacagtatttgctttcgggagtccccaaatcggtgaccgaagcttcaaaagactcgtagagtctctcgaacacctccacatcctaagagtaacaaacgtcccggacctcattccccgttaccccgtattcaggttcacagatataggcgaggagcttcaaatcaacacattaaaatcagagtacctaaaacgatctctaaacctgggacatttccataacctggaggcttacttacacggcgtggcagggacacaacacaaccaaggagaattcaaactagagattaaccgagatatagcactggtaaacaaaggtttagatgctcttgaagataagtacttagtaccaggacattggtgggttcttgagaacaaaggaatggttcaaagtgatgatgggacatggaaactaaatggtgacaggtcaaagaagaaacaagaagaagaagacgaaaaagaagaaaacaattgcaaattcccatga

SEQ ID NO: 70565 - protein, 355 aa, Arabidopsis thaliana
  peptide (1)..(355): Ceres Seq. ID no. 2711946
  misc_feature: Pfam Name: Lipase_3 Pfam Description: Lipase (class 3)
  misc_feature (1)..(355): Homolog of NCBI NO: 15224613 NR Description: putative lipase; protein id: At2g31100.1
  misc_feature (63)..(351): Homolog of NCBI NO: 21537306 NR Description: lipase-like protein [Arabidopsis thaliana]
  misc_feature (1)..(41): Homolog of NCBI NO: 21537306 NR Description: lipase-like protein [Arabidopsis thaliana]
  misc_feature (63)..(351): Homolog of NCBI NO: 15221426 NR Description: lipase-like protein; protein id: At1g06250.1, by cDNA: 12912. [Arabidopsis thaliana] >gi|25406908|pir||C86198
  misc_feature (1)..(41): Homolog of NCBI NO: 15221426 NR Description: lipase-like protein; protein id: At1g06250.1, by cDNA: 12912. [Arabidopsis thaliana] >gi|25406908|pir||C86198
  misc_feature (64)..(332): Homolog of NCBI NO: 15233922 NR Description: lipase-like protein; protein id: At4g18550.1
  misc_feature (4)..(41): Homolog of NCBI NO: 15233922 NR Description: lipase-like protein; protein id: At4g18550.1
  misc_feature (135)..(344): Homolog of NCBI NO: 34911870 NR Description: lipase-like protein [Oryza sativa (japonica
  misc_feature (63)..(157): Homolog of NCBI NO: 34911870 NR Description: lipase-like protein [Oryza sativa (japonica
  misc_feature (5)..(41): Homolog of NCBI NO: 34911870 NR Description: lipase-like protein [Oryza sativa (japonica
MVGDIATRWKELSGSSKWKDLLDPLDLDLRRYILHYGDMAEEIAATPKKSSLLEPVTSKPTLSDEGKKLLGRRGIVVAWRGTIQLYEWANDFDFPLESAVMVFPGANPNDEPRVANGWLSLYTSTDPRSRFDKTSAQEQVQEELKRLLELYKNEDVTITLTGHSLGAVMSILSAADFLHNEWPKITPSLQHSLCVTVFAFGSPQIGDRSFKRLVESLEHLHILRVTNVPDLIPRYPVFRFTDIGEELQINTLKSEYLKRSLNLGHFHNLEAYLHGVAGTQHNQGEFKLEINRDIALVNKGLDALEDKYLVPGHWWVLENKGMVQSDDGTWKLNGDRSKKKQEEEDEKEENNCKFP

SEQ ID NO: 70566 - protein, 317 aa, Arabidopsis thaliana
  peptide (1)..(317): Ceres Seq. ID no. 2711947
  misc_feature: Pfam Name: Lipase_3 Pfam Description: Lipase (class 3)
  misc_feature (1)..(317): Homolog of NCBI NO: 15224613 NR Description: putative lipase; protein id: At2g31100.1
  misc_feature (25)..(313): Homolog of NCBI NO: 21537306 NR Description: lipase-like protein [Arabidopsis thaliana]
  misc_feature (25)..(313): Homolog of NCBI NO: 15221426 NR Description: lipase-like protein; protein id: At1g06250.1, by cDNA: 12912. [Arabidopsis thaliana] >gi|25406908|pir||C86198
  misc_feature (26)..(294): Homolog of NCBI NO: 15233922 NR Description: lipase-like protein; protein id: At4g18550.1
  misc_feature (97)..(306): Homolog of NCBI NO: 34911870 NR Description: lipase-like protein [Oryza sativa (japonica
  misc_feature (25)..(119): Homolog of NCBI NO: 34911870 NR Description: lipase-like protein [Oryza sativa (japonica
  misc_feature (25)..(294): Homolog of NCBI NO: 34911830 NR Description: lipase-like protein [Oryza sativa (japonica
  misc_feature (33)..(294): Homolog of NCBI NO: 34911842 NR Description: lipase-like protein [Oryza sativa (japonica
  misc_feature (25)..(310): Homolog of NCBI NO: 34911832 NR Description: lipase-like protein [Oryza sativa (japonica
  misc_feature (71)..(294): Homolog of NCBI NO: 4103627 NR Description: lipase [Dianthus caryophyllus]
MAEEIAATPKKSSLLEPVTSKPTLSDEGKKLLGRRGIVVAWRGTIQLYEWANDFDFPLESAVMVFPGANPNDEPRVANGWLSLYTSTDPRSRFDKTSAQEQVQEELKRLLELYKNEDVTITLTGHSLGAVMSILSAADFLHNEWPKITPSLQHSLCVTVFAFGSPQIGDRSFKRLVESLEHLHILRVTNVPDLIPRYPVFRFTDIGEELQINTLKSEYLKRSLNLGHFHNLEAYLHGVAGTQHNQGEFKLEINRDIALVNKGLDALEDKYLVPGHWWVLENKGMVQSDDGTWKLNGDRSKKKQEEEDEKEENNCKFP

SEQ ID NO: 70567 - protein, 255 aa, Arabidopsis thaliana
  peptide (1)..(255): Ceres Seq. ID no. 2711948
  misc_feature: Pfam Name: Lipase_3 Pfam Description: Lipase (class 3)
  misc_feature (1)..(255): Homolog of NCBI NO: 15224613 NR Description: putative lipase; protein id: At2g31100.1
  misc_feature (1)..(251): Homolog of NCBI NO: 21537306 NR Description: lipase-like protein [Arabidopsis thaliana]
  misc_feature (1)..(251): Homolog of NCBI NO: 15221426 NR Description: lipase-like protein; protein id: At1g06250.1, by cDNA: 12912. [Arabidopsis thaliana] >gi|25406908|pir||C86198
  misc_feature (1)..(232): Homolog of NCBI NO: 15233922 NR Description: lipase-like protein; protein id: At4g18550.1
  misc_feature (35)..(244): Homolog of NCBI NO: 34911870 NR Description: lipase-like protein [Oryza sativa (japonica
  misc_feature (1)..(57): Homolog of NCBI NO: 34911870 NR Description: lipase-like protein [Oryza sativa (japonica
  misc_feature (1)..(232): Homolog of NCBI NO: 34911830 NR Description: lipase-like protein [Oryza sativa (japonica
  misc_feature (1)..(232): Homolog of NCBI NO: 34911842 NR Description: lipase-like protein [Oryza sativa (japonica
  misc_feature (1)..(248): Homolog of NCBI NO: 34911832 NR Description: lipase-like protein [Oryza sativa (japonica
  misc_feature (9)..(232): Homolog of NCBI NO: 4103627 NR Description: lipase [Dianthus caryophyllus]
MVFPGANPNDEPRVANGWLSLYTSTDPRSRFDKTSAQEQVQEELKRLLELYKNEDVTITLTGHSLGAVMSILSAADFLHNEWPKITPSLQHSLCVTVFAFGSPQIGDRSFKRLVESLEHLHILRVTNVPDLIPRYPVFRFTDIGEELQINTLKSEYLKRSLNLGHFHNLEAYLHGVAGTQHNQGEFKLEINRDIALVNKGLDALEDKYLVPGHWWVLENKGMVQSDDGTWKLNGDRSKKKQEEEDEKEENNCKFP

SEQ ID NO: 70568 - DNA, 2655 bp, Arabidopsis thaliana
  misc_feature (1)..(2655): Ceres Seq. ID no. 2712086
  misc_feature: MA Experiment ID: 20000227 Result: Down-regulated in Transcription
  misc_feature: MA Experiment 20000227 PARAMETER Experiment Name: At_Root-Tips-vs-Tops_P Parameter: Tissue Value: Root Tips vs. Root Tops
  misc_feature: MA Experiment ID: 20000451 Result: Down-regulated in Transcription
  misc_feature: MA Experiment 20000451 PARAMETER Experiment Name: At_CS6879_Shoots-Roots_P Parameter: Age (day) Value: 14
  misc_feature: MA Experiment 20000451 PARAMETER Experiment Name: At_CS6879_Shoots-Roots_P Parameter: Organism Value: A. thaliana
  misc_feature: MA Experiment 20000451 PARAMETER Experiment Name: At_CS6879_Shoots-Roots_P Parameter: Plant Line Value: CS6879 vs. WS
  misc_feature: MA Experiment 20000451 PARAMETER Experiment Name: At_CS6879_Shoots-Roots_P Parameter: Tissue Value: Roots
  misc_feature: MA Experiment ID: 20001451 Result: Up-regulated in Transcription
  misc_feature: MA Experiment 20001451 PARAMETER Experiment Name: At_Far-red-induction_P Parameter: Age (day) Value: 7
  misc_feature: MA Experiment 20001451 PARAMETER Experiment Name: At_Far-red-induction_P Parameter: Light Value: Far-red vs. White
  misc_feature: MA Experiment 20001451 PARAMETER Experiment Name: At_Far-red-induction_P Parameter: Organism Value: A. thaliana
  misc_feature: MA Experiment 20001451 PARAMETER Experiment Name: At_Far-red-induction_P Parameter: Plant Line Value: Columbia
  misc_feature: MA Experiment 20001451 PARAMETER Experiment Name: At_Far-red-induction_P Parameter: Timepoint (hr) Value: 24
  misc_feature: MA Experiment 20001451 PARAMETER Experiment Name: At_Far-red-induction_P Parameter: Tissue Value: Whole Plant
  misc_feature: Pfam Name: Pkinase Pfam Description: Protein kinase domain
atgaagattcaccttttgttggccatgattggaacctttgtcgttataattggagcccaggatcaagaaggtttcatcagtttagattgtggattacctagtgacgaatctccttacgatgattcgtttaacggattaacattcacatcggattccactttcatccaaacaggaaaaattgatagtgtcgataaagatcttaacataaacttatcaaaacaatatttgactcttagatacttcccagaaggaaaacgtaattgttatagtcttgatgtcaagcgtggcacaacttatctcatcgtggttagctttgtatatggaaattatgatggtcttaaccgtgatccaaacttcgatatccatcttggtcccaataagtggaaaagaatagatttggatggagagaaagaaggtacaagagaagagatcatacacaaagccaggtcaaactctttggatatttgtcttgttaagacaggagaaactttgccaataatttcagccatagaaatacggccactaaggaataatacgtatgttacacaatctggttcgctgatgatgtctttccgggtttatcttagcaattcagatgcatctataaggtatgctgatgacgtccatgatcgtatttggtctccattcaacggatcttcacatacacatataacaactgatctcaatataaacaactcaaatgcatatgagattccaaaaaatatactccaaactgctgccataccaagaaacgccagtgcgccgctgattattacgtgggatccactacccattaatgcggaggtatacttgtacatgcactttgcggagattcaaacccttgaagccaacgagacgaggcagtttgacgttatcttgagaggaaactttaatcattcaggatttagtccaaccaagttaaaggtatttacattatacacagaagaaccaatgaaatgtggttcagaaggttgttatttacagctagtaaaaacaccgaactcaactctgccacctctgatcaacgctattgaggcatacagtgttatcgagttctcacaattggaaacaagtcttagtgatgtggacgctatcaagaacatcaaaaatacttataagctgaataaaatcacttggcaaggagatccatgtctccctcaagatttgtcgtgggaaagtattagatgcacctacgtagatggctccacttcaccaacaatcatttccttagatttgtcgaaaagtggattaaatgggagtataccccaaattttacaaaatttcacgcaattacaagaactggacttatcaaataatagcttgactggaccggtgcctatcttccttgccaacatgaaaacgttatctttaataaacttaagtgggaacaatctcagtggttcagttcctcaagctcttcttgacaaagaaaaagaaggacttgtgttaaaacttgaaggaaatccagatttgtgcaaatccagtttttgcaataccgaaaagaaaaataaattcttgctcccggttattgcatcagctgcctctttggttattgtagttgtggttgtggctcttttttttgtcttccgaaagaagaaggccagcccttcaaatctacatgctccaccaagtatgcctgtatcgaatcccgggcacaatagtcaatcagaatcatcattcacatcgaaaaaaattaggtttacttactctgaggttcaagaaatgacaaataacttcgataaagctctcggtgaaggaggatttggagtcgtgtatcatggttttgttaatgttattgaacaagtagcagttaaattgctatcacaatcatcttctcaaggctataagcatttcaaggcagaggtggaactccttatgagagttcaccatataaatttggtgagtcttgttgggtattgtgatgaaggagaacacttggctcttatttatgaatacatgccaaatggagacttaaagcaacatttgtcaggaaagcatggcggattcgtcctgagctgggaaagtagactaaaaatagttttggatgcagcactaggattggagtatttacatactggatgtgtaccaccaatggttcacagagatatcaaaactacgaatatacttctagatcaacatctccaagctaaattagctgattttgggctttcaagatcttttcccatcggaaatgagaaaaatgtgtcaactgttgttgctggtactcctggatatcttgatcctgagtattatcaaacaaattggttgacagaaaagagtgatatatacagtttcggaattgtactgttagagataatttcaaaccgtcctataatccagcaatcccgtgaaaagcctcacatagtggaatgggtcagttttatgataacaaaaggagatcttagaagtattatggatccaaacctccaccaagattatgatattggttctgtctggaaggccattgaattagcaatgtcatgtgtgagtctttcttctgcaagacgaccaaacatgtctcgagttgtgaatgaattaaaagaatgtcttatatccgaaacctctaggataggtgagggacgagacatggaatcaaaaggttcaatggaattcagcagagacatttataatgaggtaatacctcaagctcgctag

SEQ ID NO: 70569 - protein, 884 aa, Arabidopsis thaliana
  peptide (1)..(884): Ceres Seq. ID no. 2712087
  misc_feature: Pfam Name: Pkinase Pfam Description: Protein kinase domain
  misc_feature (1)..(884): Homolog of NCBI NO: 25387148 NR Description: probable protein kinase [imported] - Arabidopsis >gi|9802795|gb|AAF99864.1|AC015448_14 Putative protein kinase
  misc_feature (155)..(884): Homolog of NCBI NO: 15218050 NR Description: light repressible receptor protein kinase,
  misc_feature (1)..(133): Homolog of NCBI NO: 15218050 NR Description: light repressible receptor protein kinase,
  misc_feature (16)..(884): Homolog of NCBI NO: 9294681 NR Description: receptor-like protein kinase [Arabidopsis
  misc_feature (10)..(884): Homolog of NCBI NO: 9758831 NR Description: receptor-like protein kinase [Arabidopsis
  misc_feature (1)..(884): Homolog of NCBI NO: 25387123 NR Description: probable protein kinase [imported] - Arabidopsis >gi|9802784|gb|AAF99853.1|AC015448_3 Putative protein kinase
  misc_feature (5)..(884): Homolog of NCBI NO: 15238489 NR Description: serine/threonine-specific protein kinase - like;
  misc_feature (10)..(884): Homolog of NCBI NO: 22330177 NR Description: receptor protein kinase, putative; protein id:
  misc_feature (3)..(884): Homolog of NCBI NO: 9758834 NR Description: receptor-like protein kinase [Arabidopsis
  misc_feature (304)..(621): Homolog of NCBI NO: 15238490 NR Description: leucine-rich repeat transmembrane protein kinase,
MKIHLLLAMIGTFVVIIGAQDQEGFISLDCGLPSDESPYDDSFNGLTFTSDSTFIQTGKIDSVDKDLNINLSKQYLTLRYFPEGKRNCYSLDVKRGTTYLIVVSFVYGNYDGLNRDPNFDIHLGPNKWKRIDLDGEKEGTREEIIHKARSNSLDICLVKTGETLPIISAIEIRPLRNNTYVTQSGSLMMSFRVYLSNSDASIRYADDVHDRIWSPFNGSSHTHITTDLNINNSNAYEIPKNILQTAAIPRNASAPLIITWDPLPINAEVYLYMHFAEIQTLEANETRQFDVILRGNFNHSGFSPTKLKVFTLYTEEPMKCGSEGCYLQLVKTPNSTLPPLINAIEAYSVIEFSQLETSLSDVDAIKNIKNTYKLNKITWQGDPCLPQDLSWESIRCTYVDGSTSPTIISLDLSKSGLNGSIPQILQNFTQLQELDLSNNSLTGPVPIFLANMKTLSLINLSGNNLSGSVPQALLDKEKEGLVLKLEGNPDLCKSSFCNTEKKNKFLLPVIASAASLVIVVVVVALFFVFRKKKASPSNLHAPPSMPVSNPGHNSQSESSFTSKKIRFTYSEVQEMTNNFDKALGEGGFGVVYHGFVNVIEQVAVKLLSQSSSQGYKHFKAEVELLMRVHHINLVSLVGYCDEGEHLALIYEYMPNGDLKQHLSGKHGGFVLSWESRLKIVLDAALGLEYLHTGCVPPMVHRDIKTTNILLDQHLQAKLADFGLSRSFPIGNEKNVSTVVAGTPGYLDPEYYQTNWLTEKSDIYSFGIVLLEIISNRPIIQQSREKPHIVEWVSFMITKGDLRSIMDPNLHQDYDIGSVWKAIELAMSCVSLSSARRPNMSRVVNELKECLISETSRIGEGRDMESKGSMEFSRDIYNEVIPQAR

SEQ ID NO: 70570 - protein, 876 aa, Arabidopsis thaliana
  peptide (1)..(876): Ceres Seq. ID no. 2712088
  misc_feature: Pfam Name: Pkinase Pfam Description: Protein kinase domain
  misc_feature (1)..(876): Homolog of NCBI NO: 25387148 NR Description: probable protein kinase [imported] - Arabidopsis >gi|9802795|gb|AAF99864.1|AC015448_14 Putative protein kinase
  misc_feature (147)..(876): Homolog of NCBI NO: 15218050 NR Description: light repressible receptor protein kinase,
  misc_feature (1)..(125): Homolog of NCBI NO: 15218050 NR Description: light repressible receptor protein kinase,
  misc_feature (8)..(876): Homolog of NCBI NO: 9294681 NR Description: receptor-like protein kinase [Arabidopsis
  misc_feature (2)..(876): Homolog of NCBI NO: 9758831 NR Description: receptor-like protein kinase [Arabidopsis
  misc_feature (1)..(876): Homolog of NCBI NO: 25387123 NR Description: probable protein kinase [imported] - Arabidopsis >gi|9802784|gb|AAF99853.1|AC015448_3 Putative protein kinase
  misc_feature (1)..(876): Homolog of NCBI NO: 15238489 NR Description: serine/threonine-specific protein kinase - like;
  misc_feature (2)..(876): Homolog of NCBI NO: 22330177 NR Description: receptor protein kinase, putative; protein id:
  misc_feature (1)..(876): Homolog of NCBI NO: 9758834 NR Description: receptor-like protein kinase [Arabidopsis
  misc_feature (296)..(613): Homolog of NCBI NO: 15238490 NR Description: leucine-rich repeat transmembrane protein kinase,
MIGTFVVIIGAQDQEGFISLDCGLPSDESPYDDSFNGLTFTSDSTFIQTGKIDSVDKDLNINLSKQYLTLRYFPEGKRNCYSLDVKRGTTYLIVVSFVYGNYDGLNRDPNFDIHLGPNKWKRIDLDGEKEGTREEIIHKARSNSLDICLVKTGETLPIISAIEIRPLRNNTYVTQSGSLMMSFRVYLSNSDASIRYADDVHDRIWSPFNGSSHTHITTDLNINNSNAYEIPKNILQTAAIPRNASAPLIITWDPLPINAEVYLYMHFAEIQTLEANETRQFDVILRGNFNHSGFSPTKLKVFTLYTEEPMKCGSEGCYLQLVKTPNSTLPPLINAIEAYSVIEFSQLETSLSDVDAIKNIKNTYKLNKITWQGDPCLPQDLSWESIRCTYVDGSTSPTIISLDLSKSGLNGSIPQILQNFTQLQELDLSNNSLTGPVPIFLANMKTLSLINLSGNNLSGSVPQALLDKEKEGLVLKLEGNPDLCKSSFCNTEKKNKFLLPVIASAASLVIVVVVVALFFVFRKKKASPSNLHAPPSMPVSNPGHNSQSESSFTSKKIRFTYSEVQEMTNNFDKALGEGGFGVVYHGFVNVIEQVAVKLLSQSSSQGYKHFKAEVELLMRVHHINLVSLVGYCDEGEHLALIYEYMPNGDLKQHLSGKHGGFVLSWESRLKIVLDAALGLEYLHTGCVPPMVHRDIKTTNILLDQHLQAKLADFGLSRSFPIGNEKNVSTVVAGTPGYLDPEYYQTNWLTEKSDIYSFGIVLLEIISNRPIIQQSREKPHIVEWVSFMITKGDLRSIMDPNLHQDYDIGSVWKAIELAMSCVSLSSARRPNMSRVVNELKECLISETSRIGEGRDMESKGSMEFSRDIYNEVIPQAR

SEQ ID NO: 70571 - protein, 697 aa, Arabidopsis thaliana
  peptide (1)..(697): Ceres Seq. ID no. 2712089
  misc_feature: Pfam Name: Pkinase Pfam Description: Protein kinase domain
  misc_feature (1)..(697): Homolog of NCBI NO: 25387148 NR Description: probable protein kinase [imported] - Arabidopsis >gi|9802795|gb|AAF99864.1|AC015448_14 Putative protein kinase
  misc_feature (1)..(697): Homolog of NCBI NO: 15218050 NR Description: light repressible receptor protein kinase,
  misc_feature (1)..(697): Homolog of NCBI NO: 9294681 NR Description: receptor-like protein kinase [Arabidopsis
  misc_feature (1)..(697): Homolog of NCBI NO: 9758831 NR Description: receptor-like protein kinase [Arabidopsis
  misc_feature (1)..(697): Homolog of NCBI NO: 25387123 NR Description: probable protein kinase [imported] - Arabidopsis >gi|9802784|gb|AAF99853.1|AC015448_3 Putative protein kinase
  misc_feature (1)..(697): Homolog of NCBI NO: 15238489 NR Description: serine/threonine-specific protein kinase - like;
  misc_feature (1)..(697): Homolog of NCBI NO: 22330177 NR Description: receptor protein kinase, putative; protein id:
  misc_feature (1)..(697): Homolog of NCBI NO: 9758834 NR Description: receptor-like protein kinase [Arabidopsis
  misc_feature (117)..(434): Homolog of NCBI NO: 15238490 NR Description: leucine-rich repeat transmembrane protein kinase,
  misc_feature (460)..(697): Homolog of NCBI NO: 15238490 NR Description: leucine-rich repeat transmembrane protein kinase,
MMSFRVYLSNSDASIRYADDVHDRIWSPFNGSSHTHITTDLNINNSNAYEIPKNILQTAAIPRNASAPLIITWDPLPINAEVYLYMHFAEIQTLEANETRQFDVILRGNFNHSGFSPTKLKVFTLYTEEPMKCGSEGCYLQLVKTPNSTLPPLINAIEAYSVIEFSQLETSLSDVDAIKNIKNTYKLNKITWQGDPCLPQDLSWESIRCTYVDGSTSPTIISLDLSKSGLNGSIPQILQNFTQLQELDLSNNSLTGPVPIFLANMKTLSLINLSGNNLSGSVPQALLDKEKEGLVLKLEGNPDLCKSSFCNTEKKNKFLLPVIASAASLVIVVVVVALFFVFRKKKASPSNLHAPPSMPVSNPGHNSQSESSFTSKKIRFTYSEVQEMTNNFDKALGEGGFGVVYHGFVNVIEQVAVKLLSQSSSQGYKHFKAEVELLMRVHHINLVSLVGYCDEGEHLALIYEYMPNGDLKQHLSGKHGGFVLSWESRLKIVLDAALGLEYLHTGCVPPMVHRDIKTTNILLDQHLQAKLADFGLSRSFPIGNEKNVSTVVAGTPGYLDPEYYQTNWLTEKSDIYSFGIVLLEIISNRPIIQQSREKPHIVEWVSFMITKGDLRSIMDPNLHQDYDIGSVWKAIELAMSCVSLSSARRPNMSRVVNELKECLISETSRIGEGRDMESKGSMEFSRDIYNEVIPQAR

SEQ ID NO: 70572 - DNA, 849 bp, Arabidopsis thaliana
  misc_feature (1)..(849): Ceres Seq. ID no. 2712102
  misc_feature: MA Experiment ID: 20000306 Result: Up-regulated in Transcription
  misc_feature: MA Experiment 20000306 PARAMETER Experiment Name: At_Germinating_Seeds_Sub_P Parameter: Age (hr) Value: 6 vs. 0
  misc_feature: MA Experiment 20000306 PARAMETER Experiment Name: At_Germinating_Seeds_Sub_P Parameter: Organism Value: A. thaliana
  misc_feature: MA Experiment 20000306 PARAMETER Experiment Name: At_Germinating_Seeds_Sub_P Parameter: Plant Line Value: WS
  misc_feature: MA Experiment 20000306 PARAMETER Experiment Name: At_Germinating_Seeds_Sub_P Parameter: Tissue Value: Germinating Seeds
  misc_feature: MA Experiment ID: 20000307 Result: Up-regulated in Transcription
  misc_feature: MA Experiment 20000307 PARAMETER Experiment Name: At_Germinating_Seeds_Sub_P Parameter: Age (hr) Value: 24 vs. 0
  misc_feature: MA Experiment 20000307 PARAMETER Experiment Name: At_Germinating_Seeds_Sub_P Parameter: Organism Value: A. thaliana
  misc_feature: MA Experiment 20000307 PARAMETER Experiment Name: At_Germinating_Seeds_Sub_P Parameter: Plant Line Value: WS
  misc_feature: MA Experiment 20000307 PARAMETER Experiment Name: At_Germinating_Seeds_Sub_P Parameter: Tissue Value: Germinating Seeds
  misc_feature: MA Experiment ID: 20000314 Result: Up-regulated in Transcription
  misc_feature: MA Experiment 20000314 PARAMETER Experiment Name: At_14day_Shoots-Roots_Sub_P Parameter: Age (day) Value: 14
  misc_feature: MA Experiment 20000314 PARAMETER Experiment Name: At_14day_Shoots-Roots_Sub_P Parameter: Organism Value: A. thaliana
  misc_feature: MA Experiment 20000314 PARAMETER Experiment Name: At_14day_Shoots-Roots_Sub_P Parameter: Plant Line Value: WS
  misc_feature: MA Experiment 20000314 PARAMETER Experiment Name: At_14day_Shoots-Roots_Sub_P Parameter: Tissue Value: Roots vs. Whole Plant
  misc_feature: MA Experiment ID: 20000355 Result: Up-regulated in Transcription
  misc_feature: MA Experiment 20000355 PARAMETER Experiment Name: At_Siliques_Sub_P Parameter: Age (day) Value: 21
  misc_feature: MA Experiment 20000355 PARAMETER Experiment Name: At_Siliques_Sub_P Parameter: Organism Value: A. thaliana
  misc_feature: MA Experiment 20000355 PARAMETER Experiment Name: At_Siliques_Sub_P Parameter: Plant Line Value: WS
  misc_feature: MA Experiment 20000355 PARAMETER Experiment Name: At_Siliques_Sub_P Parameter: Tissue Value: Less Than 5mm Siliques vs. Whole Plant
  misc_feature: MA Experiment ID: 20000440 Result: Up-regulated in Transcription
  misc_feature: MA Experiment 20000440 PARAMETER Experiment Name: At_Closed-Flower__Sub_P Parameter: Tissue Value: Closed Flower vs. Whole Plant
atgttgtatcaggcggcttcagaggctgcacaaaagagatggactacaagcgatttcgatatcggaaagccacttggtagaggaaagtttggccatgtttatctagcaagagagaaacggagcgatcacattgtggctttaaaggttctttttaaggctcagcttcaacaatctcaagttgaacaccagttacgaagggaagtagagattcaatctcatcttcggcatcccaatattctgcggctctacggttacttctatgatcagaaaagagtttatttgattttggagtatgctgtaaggggtgagctttataaagagcttcagaagtgcaagtacttcagcgaacgtcgagcagcaacttatgttgcgtcattggctagagccctcatctattgccatggaaagcatgtaattcacagagatataaaacctgaaaatctgttgattggtgctcagggtgagctcaagattgcagattttggatggtcagtacacacattcaaccgtagaaggactatgtgtggcactttggattaccttccacctgagatggtggaaagcgttgaacatgatgcgagtgtcgatatatggagtctaggaattctctgctacgaatttctttatggtgttcctccttttgaggccagggagcattcagagacatacaaaaggattgttcaagtggatctcaagttccctcccaaacccattgtgtcatcatctgcaaaggacctgattagccagatgttggttaaggagtctacgcaacgtttggccttgcacaagcttcttgaacacccgtggattgtgcaaaacgcagacccatcaggcctttacagaggatga

SEQ ID NO: 70573 - protein, 282 aa, Arabidopsis thaliana
  peptide (1)..(282): Ceres Seq. ID no. 2712103
  misc_feature (19)..(270): Pfam Name: Protein kinase domain Pfam Description: Protein kinase domain
  misc_feature (1)..(282): Homolog of NCBI NO: 15225210 NR Description: putative protein kinase; protein id: At2g25880.1
  misc_feature (5)..(281): Homolog of NCBI NO: 15233958 NR Description: putative serine/threonine protein kinase; protein
  misc_feature (5)..(281): Homolog of NCBI NO: 21592557 NR Description: putative serine/threonine protein kinase
  misc_feature (12)..(282): Homolog of NCBI NO: 34906424 NR Description: putative protein kinase [Oryza sativa (japonica group)] >gi|9049474|dbj|BAA99439.1| putative protein kinase
  misc_feature (4)..(278): Homolog of NCBI NO: 20862949 NR Description: serine/threonine kinase 6 [Mus musculus]
  misc_feature (4)..(278): Homolog of NCBI NO: 27923856 NR Description: Serine/threonine kinase 6 (Aurora-family kinase 1)
  misc_feature (4)..(278): Homolog of NCBI NO: 33355454 NR Description: serine/threonine protein kinase 6 [Mus musculus]
  misc_feature (4)..(277): Homolog of NCBI NO: 26351841 NR Description: unnamed protein product [Mus musculus]
  misc_feature (11)..(279): Homolog of NCBI NO: 15225495 NR Description: putative protein kinase; protein id: At2g45490.1, by cDNA: gi_18491288 [Arabidopsis thaliana]
  misc_feature (4)..(278): Homolog of NCBI NO: 2257984 NR Description: IPL1 and aurora related kinase 1 [Mus musculus]
MLYQAASEAAQKRWTTSDFDIGKPLGRGKFGHVYLAREKRSDHIVALKVLFKAQLQQSQVEHQLRREVEIQSHLRHPNILRLYGYFYDQKRVYLILEYAVRGELYKELQKCKYFSERRAATYVASLARALIYCHGKHVIHRDIKPENLLIGAQGELKIADFGWSVHTFNRRRTMCGTLDYLPPEMVESVEHDASVDIWSLGILCYEFLYGVPPFEAREHSETYKRIVQVDLKFPPKPIVSSSAKDLISQMLVKESTQRLALHKLLEHPWIVQNADPSGLYRG

SEQ ID NO: 70574 - DNA, 1347 bp, Arabidopsis thaliana
  misc_feature (1)..(1347): Ceres Seq. ID no. 2712578
  misc_feature: MA Experiment ID: 20000169 Result: Up-regulated in Transcription
  misc_feature: MA Experiment 20000169 PARAMETER Experiment Name: At_100uM_ABA_P Parameter: Age (day) Value: 14
  misc_feature: MA Experiment 20000169 PARAMETER Experiment Name: At_100uM_ABA_P Parameter: Organism Value: A. thaliana
  misc_feature: MA Experiment 20000169 PARAMETER Experiment Name: At_100uM_ABA_P Parameter: Plant Line Value: WS
  misc_feature: MA Experiment 20000169 PARAMETER Experiment Name: At_100uM_ABA_P Parameter: Timepoint (hr) Value: 6
  misc_feature: MA Experiment 20000169 PARAMETER Experiment Name: At_100uM_ABA_P Parameter: Tissue Value: Aerial
  misc_feature: MA Experiment 20000169 PARAMETER Experiment Name: At_100uM_ABA_P Parameter: Treatment Value: 100uM ABA vs. No Treatment
  misc_feature: MA Experiment ID: 20000180 Result: Up-regulated in Transcription
  misc_feature: MA Experiment 20000180 PARAMETER Experiment Name: At_Germinating_Seeds_P Parameter: Age (hr) Value: 24 vs. 0
  misc_feature: MA Experiment 20000180 PARAMETER Experiment Name: At_Germinating_Seeds_P Parameter: Tissue Value: Germinating Seeds
  misc_feature: MA Experiment ID: 20000184 Result: Down-regulated in Transcription
  misc_feature: MA Experiment 20000184 PARAMETER Experiment Name: At_Shoots__P Parameter: Age (day) Value: 7
  misc_feature: MA Experiment 20000184 PARAMETER Experiment Name: At_Shoots__P Parameter: Tissue Value: Shoots vs. Whole Plant
  misc_feature: MA Experiment ID: 20000234 Result: Down-regulated in Transcription
  misc_feature: MA Experiment 20000234 PARAMETER Experiment Name: At_Siliques_P Parameter: Age (day) Value: 21
  misc_feature: MA Experiment 20000234 PARAMETER Experiment Name: At_Siliques_P Parameter: Organism Value: A. thaliana
  misc_feature: MA Experiment 20000234 PARAMETER Experiment Name: At_Siliques_P Parameter: Plant Line Value: WS
  misc_feature: MA Experiment 20000234 PARAMETER Experiment Name: At_Siliques_P Parameter: Tissue Value: Less Than 5mm Siliques vs. Whole Plant
  misc_feature: MA Experiment ID: 20000264 Result: Down-regulated in Transcription
  misc_feature: MA Experiment 20000264 PARAMETER Experiment Name: At_Open_Flower_P Parameter: Age (day) Value: 21
  misc_feature: MA Experiment 20000264 PARAMETER Experiment Name: At_Open_Flower_P Parameter: Plant Line Value: WS
  misc_feature: MA Experiment 20000264 PARAMETER Experiment Name: At_Open_Flower_P Parameter: Tissue Value: Open Flower vs. Whole Plant
  misc_feature: MA Experiment ID: 20000265 Result: Down-regulated in Transcription
  misc_feature: MA Experiment 20000265 PARAMETER Experiment Name: At_Open_Flower_P Parameter: Age (day) Value: 21
  misc_feature: MA Experiment 20000265 PARAMETER Experiment Name: At_Open_Flower_P Parameter: Plant Line Value: WS
  misc_feature: MA Experiment 20000265 PARAMETER Experiment Name: At_Open_Flower_P Parameter: Tissue Value: Closed Flower vs. Whole Plant
  misc_feature: MA Experiment ID: 20000286 Result: Down-regulated in Transcription
  misc_feature: MA Experiment 20000286 PARAMETER Experiment Name: At_Open_Flower_P Parameter: Age (day) Value: 21
  misc_feature: MA Experiment 20000286 PARAMETER Experiment Name: At_Open_Flower_P Parameter: Plant Line Value: WS
  misc_feature: MA Experiment 20000286 PARAMETER Experiment Name: At_Open_Flower_P Parameter: Tissue Value: Half Open vs. Whole Plant
  misc_feature: MA Experiment ID: 20000438 Result: Down-regulated in Transcription
  misc_feature: MA Experiment 20000438 PARAMETER Experiment Name: At_Shoots__P Parameter: Age (day) Value: 14
  misc_feature: MA Experiment 20000438 PARAMETER Experiment Name: At_Shoots__P Parameter: Tissue Value: Shoots vs. Whole Plant
  misc_feature: MA Experiment ID: 20000439 Result: Up-regulated in Transcription
  misc_feature: MA Experiment 20000439 PARAMETER Experiment Name: At_Roots__P Parameter: Age (day) Value: 14 vs. 21
  misc_feature: MA Experiment 20000439 PARAMETER Experiment Name: At_Roots__P Parameter: Organism Value: A. thaliana
  misc_feature: MA Experiment 20000439 PARAMETER Experiment Name: At_Roots__P Parameter: Tissue Value: Roots vs. Whole Plant
  misc_feature: MA Experiment ID: 20000453 Result: Up-regulated in Transcription
  misc_feature: MA Experiment 20000453 PARAMETER Experiment Name: At_100uM_ABA_P Parameter: Age (day) Value: 15
  misc_feature: MA Experiment 20000453 PARAMETER Experiment Name: At_100uM_ABA_P Parameter: Organism Value: A. thaliana
  misc_feature: MA Experiment 20000453 PARAMETER Experiment Name: At_100uM_ABA_P Parameter: Plant Line Value: WS
  misc_feature: MA Experiment 20000453 PARAMETER Experiment Name: At_100uM_ABA_P Parameter: Timepoint (hr) Value: 24
  misc_feature: MA Experiment 20000453 PARAMETER Experiment Name: At_100uM_ABA_P Parameter: Tissue Value: Aerial
  misc_feature: MA Experiment 20000453 PARAMETER Experiment Name: At_100uM_ABA_P Parameter: Treatment Value: 100uM ABA vs. No Treatment
  misc_feature: MA Experiment ID: 20000495 Result: Up-regulated in Transcription
  misc_feature: MA Experiment 20000495 PARAMETER Experiment Name: At_Guard_Cells_P Parameter: Harvest Date Value: 8/2/2002
  misc_feature: MA Experiment 20000495 PARAMETER Experiment Name: At_Guard_Cells_P Parameter: Organism Value: A. thaliana
  misc_feature: MA Experiment 20000495 PARAMETER Experiment Name: At_Guard_Cells_P Parameter: Tissue Value: Guard Cells vs. Leaves
  misc_feature: MA Experiment ID: 20001450 Result: Up-regulated in Transcription
  misc_feature: MA Experiment 20001450 PARAMETER Experiment Name: At_Far-red-induction_P Parameter: Age (day) Value: 7
  misc_feature: MA Experiment 20001450 PARAMETER Experiment Name: At_Far-red-induction_P Parameter: Light Value: Far-red vs. White
  misc_feature: MA Experiment 20001450 PARAMETER Experiment Name: At_Far-red-induction_P Parameter: Organism Value: A. thaliana
  misc_feature: MA Experiment 20001450 PARAMETER Experiment Name: At_Far-red-induction_P Parameter: Plant Line Value: Columbia
  misc_feature: MA Experiment 20001450 PARAMETER Experiment Name: At_Far-red-induction_P Parameter: Timepoint (hr) Value: 8
  misc_feature: MA Experiment 20001450 PARAMETER Experiment Name: At_Far-red-induction_P Parameter: Tissue Value: Whole Plant
  misc_feature: MA Experiment ID: 20001451 Result: Up-regulated in Transcription
  misc_feature: MA Experiment 20001451 PARAMETER Experiment Name: At_Far-red-induction_P Parameter: Age (day) Value: 7
  misc_feature: MA Experiment 20001451 PARAMETER Experiment Name: At_Far-red-induction_P Parameter: Light Value: Far-red vs. White
  misc_feature: MA Experiment 20001451 PARAMETER Experiment Name: At_Far-red-induction_P Parameter: Organism Value: A. thaliana
  misc_feature: MA Experiment 20001451 PARAMETER Experiment Name: At_Far-red-induction_P Parameter: Plant Line Value: Columbia
  misc_feature: MA Experiment 20001451 PARAMETER Experiment Name: At_Far-red-induction_P Parameter: Timepoint (hr) Value: 24
  misc_feature: MA Experiment 20001451 PARAMETER Experiment Name: At_Far-red-induction_P Parameter: Tissue Value: Whole Plant
  misc_feature: MA Experiment ID: 20001773 Result: Up-regulated in Transcription
  misc_feature: MA Experiment 20001773 PARAMETER Experiment Name: At_Far-red-enriched-adult_P Parameter: Age (day) Value: 30
  misc_feature: MA Experiment 20001773 PARAMETER Experiment Name: At_Far-red-enriched-adult_P Parameter: Light Value: Far-red enriched vs. White
  misc_feature: MA Experiment 20001773 PARAMETER Experiment Name: At_Far-red-enriched-adult_P Parameter: Organism Value: A. thaliana
  misc_feature: MA Experiment 20001773 PARAMETER Experiment Name: At_Far-red-enriched-adult_P Parameter: Plant Line Value: Columbia
  misc_feature: MA Experiment 20001773 PARAMETER Experiment Name: At_Far-red-enriched-adult_P Parameter: Timepoint (hr) Value: 48
  misc_feature: MA Experiment 20001773 PARAMETER Experiment Name: At_Far-red-enriched-adult_P Parameter: Tissue Value: Aerial
  misc_feature: MA Experiment ID: 20001904 Result: Up-regulated in Transcription
  misc_feature: MA Experiment 20001904 PARAMETER Experiment Name: At_Drought_Reproduction_P Parameter: Age (day) Value: 37
  misc_feature: MA Experiment 20001904 PARAMETER Experiment Name: At_Drought_Reproduction_P Parameter: Organism Value: A. thaliana
  misc_feature: MA Experiment 20001904 PARAMETER Experiment Name: At_Drought_Reproduction_P Parameter: Plant Line Value: WS
  misc_feature: MA Experiment 20001904 PARAMETER Experiment Name: At_Drought_Reproduction_P Parameter: Timepoint (day) Value: 7
  misc_feature: MA Experiment 20001904 PARAMETER Experiment Name: At_Drought_Reproduction_P Parameter: Tissue Value: Rosettes
  misc_feature: MA Experiment 20001904 PARAMETER Experiment Name: At_Drought_Reproduction_P Parameter: Treatment Value: Drought vs. No Drought
atgacaacacataaacatagaagaacagagaaaaatctctgttttaagcaatactacaaatggatcctctgttttatcctcactctctatttttttgcttccttctttgtcgaccatgatcaagatcatagatcttctacttccatatcaaagcatcttcttactaaccataaacctaagcttttcgcttctcgtgccatgtttgaatctaaaatccatgatcacaaacttgggtttacctctcaacaacctaacatcaaaacagacgtattcaacaatttgaaaatctacgtctatgacttaccttcaaagttcaacaaagactggttagccaatgatagatgcaccaaccacctctttgccgcggaagtggctctccataaggcgtttctcagcctcgaaggagatgtaaggacggaagatccgtatgaagccgatttcttctttgtccctgtctatgtctcttgcaacttcagcaccattaatggctttccagcgattggccatgcacgatcactcatcaatgacgcgataaagctcgtctcgactcaataccctttttggaaccgaaccagtggctctgatcatgtcttcacggccacacacgactttggctcttgcttccacaccatggaggatagagctattgctgatggagtaccaatttttttgagaaactctataattttgcaaacatttggtgttacttttaaccatccatgccaagaggtagagaacgtggtgataccaccgtacatctcaccggaaagtttacacaagactcaaaagaatattccggtaactaaagaacgagacatttgggtttttttccgtggcaagatggaacttcatcccaaaaacatcagtggacgcttctatagcaagcgtgtaaggacgaatatatggcggagttacggtggtgaccggaggttttatctccaacggcaaagatttgccggttaccagtcagaaatagctcgttctgttttctgtttatgtcctctcgggtgggcaccgtggagcccaagacttgttgaatcggtggctcttggctgtgttccggtgattatagccgacgggattcgtttgccgttcccttccaccgtacgttggccggatatttcgctcacggtggcggagagagacgttggaaagctaggggatattttggaacacgtggcggctactaatttgtcagtcatacagagaaacttggaggatccgtctgttaggcgggcccttatgtttaatgttccttcaagagagggagatgccacgtggcaagttttggaggctttgtcaaagaaattgaataggtctgttagaaggtcaaactctttcttgtaa

SEQ ID NO: 70575 - protein, 448 aa, Arabidopsis thaliana
  peptide (1)..(448): Ceres Seq. ID no. 2712579
  misc_feature (96)..(405): Pfam Name: Exostosin family Pfam Description: Exostosin family
  misc_feature (1)..(448): Homolog of NCBI NO: 25407954 NR Description: hypothetical protein At2g28110 [imported] - thaliana >gi|4063747|gb|AAC98455.1| hypothetical protein
  misc_feature (15)..(444): Homolog of NCBI NO: 15237173 NR Description: putative protein; protein id: At5g22940.1 thaliana] >gi|10177241|dbj|BAB10615.1|
  misc_feature (212)..(443): Homolog of NCBI NO: 34902390 NR Description: Unknown protein [Oryza sativa (japonica
  misc_feature (94)..(212): Homolog of NCBI NO: 34902390 NR Description: Unknown protein [Oryza sativa (japonica
  misc_feature (1)..(211): Homolog of NCBI NO: 30683766 NR Description: expressed protein [Arabidopsis thaliana] unknown protein [Arabidopsis thaliana]
  misc_feature (86)..(437): Homolog of NCBI NO: 34907048 NR Description: contains EST D24978(R2878)~similar to Arabidopsis
  misc_feature (86)..(437): Homolog of NCBI NO: 34907044 NR Description: hypothetical protein~similar to Arabidopsis
  misc_feature (86)..(441): Homolog of NCBI NO: 18424516 NR Description: putative protein; protein id: At5g61840.1, by cDNA: 34861., supported by cDNA: gi_15809825, supported by gi_17978868 [Arabidopsis thaliana] >gi|15809826|gb|AAL06841.1|
  misc_feature (86)..(437): Homolog of NCBI NO: 34907046 NR Description: contains EST D39982(S1682)~similar to Arabidopsis
  misc_feature (61)..(437): Homolog of NCBI NO: 15223522 NR Description: unknown protein; protein id: At1g27440.1 thaliana] >gi|9802541|gb|AAF99743.1|AC004557_22 F17L21.23
MTTHKHRRTEKNLCFKQYYKWILCFILTLYFFASFFVDHDQDHRSSTSISKHLLTNHKPKLFASRAMFESKIHDHKLGFTSQQPNIKTDVFNNLKIYVYDLPSKFNKDWLANDRCTNHLFAAEVALHKAFLSLEGDVRTEDPYEADFFFVPVYVSCNFSTINGFPAIGHARSLINDAIKLVSTQYPFWNRTSGSDHVFTATHDFGSCFHTMEDRAIADGVPIFLRNSIILQTFGVTFNHPCQEVENVVIPPYISPESLHKTQKNIPVTKERDIWVFFRGKMELHPKNISGRFYSKRVRTNIWRSYGGDRRFYLQRQRFAGYQSEIARSVFCLCPLGWAPWSPRLVESVALGCVPVIIADGIRLPFPSTVRWPDISLTVAERDVGKLGDILEHVAATNLSVIQRNLEDPSVRRALMFNVPSREGDATWQVLEALSKKLNRSVRRSNSFL

SEQ ID NO: 70576 - protein, 382 aa, Arabidopsis thaliana
  peptide (1)..(382): Ceres Seq. ID no. 2712580
  misc_feature (30)..(339): Pfam Name: Exostosin family Pfam Description: Exostosin family
  misc_feature (20)..(371): Homolog of NCBI NO: 34907044 NR Description: hypothetical protein~similar to Arabidopsis
  misc_feature (20)..(375): Homolog of NCBI NO: 18424516 NR Description: putative protein; protein id: At5g61840.1, by cDNA: 34861., supported by cDNA: gi_15809825, supported by gi_17978868 [Arabidopsis thaliana] >gi|15809826|gb|AAL06841.1|
  misc_feature (1)..(382): Homolog of NCBI NO: 25407954 NR Description: hypothetical protein At2g28110 [imported] - thaliana >gi|4063747|gb|AAC98455.1| hypothetical protein
  misc_feature (146)..(377): Homolog of NCBI NO: 34902390 NR Description: Unknown protein [Oryza sativa (japonica
  misc_feature (1)..(145): Homolog of NCBI NO: 30683766 NR Description: expressed protein [Arabidopsis thaliana] unknown protein [Arabidopsis thaliana]
  misc_feature (20)..(371): Homolog of NCBI NO: 34907048 NR Description: contains EST D24978(R2878)~similar to Arabidopsis
  misc_feature (28)..(146): Homolog of NCBI NO: 34902390 NR Description: Unknown protein [Oryza sativa (japonica
  misc_feature (1)..(378): Homolog of NCBI NO: 15237173 NR Description: putative protein; protein id: At5g22940.1 thaliana] >gi|10177241|dbj|BAB10615.1|
  misc_feature (20)..(371): Homolog of NCBI NO: 34907046 NR Description: contains EST D39982(S1682)~similar to Arabidopsis
  misc_feature (1)..(371): Homolog of NCBI NO: 15223522 NR Description: unknown protein; protein id: At1g27440.1 thaliana] >gi|9802541|gb|AAF99743.1|AC004557_22 F17L21.23
MFESKIHDHKLGFTSQQPNIKTDVFNNLKIYVYDLPSKFNKDWLANDRCTNHLFAAEVALHKAFLSLEGDVRTEDPYEADFFFVPVYVSCNFSTINGFPAIGHARSLINDAIKLVSTQYPFWNRTSGSDHVFTATHDFGSCFHTMEDRAIADGVPIFLRNSIILQTFGVTFNHPCQEVENVVIPPYISPESLHKTQKNIPVTKERDIWVFFRGKMELHPKNISGRFYSKRVRTNIWRSYGGDRRFYLQRQRFAGYQSEIARSVFCLCPLGWAPWSPRLVESVALGCVPVIIADGIRLPFPSTVRWPDISLTVAERDVGKLGDILEHVAATNLSVIQRNLEDPSVRRALMFNVPSREGDATWQVLEALSKKLNRSVRRSNSFL

SEQ ID NO: 70577 - protein, 238 aa, Arabidopsis thaliana
  peptide (1)..(238): Ceres Seq. ID no. 2712581
  misc_feature (1)..(195): Pfam Name: Exostosin family Pfam Description: Exostosin family
  misc_feature (1)..(238): Homolog of NCBI NO: 25407954 NR Description: hypothetical protein At2g28110 [imported] - thaliana >gi|4063747|gb|AAC98455.1| hypothetical protein
  misc_feature (1)..(234): Homolog of NCBI NO: 15237173 NR Description: putative protein; protein id: At5g22940.1 thaliana] >gi|10177241|dbj|BAB10615.1|
  misc_feature (2)..(233): Homolog of NCBI NO: 34902390 NR Description: Unknown protein [Oryza sativa (japonica
  misc_feature (1)..(227): Homolog of NCBI NO: 34907048 NR Description: contains EST D24978(R2878)~similar to Arabidopsis
  misc_feature (1)..(227): Homolog of NCBI NO: 34907044 NR Description: hypothetical protein~similar to Arabidopsis
  misc_feature (1)..(231): Homolog of NCBI NO: 18424516 NR Description: putative protein; protein id: At5g61840.1, by cDNA: 34861., supported by cDNA: gi_15809825, supported by gi_17978868 [Arabidopsis thaliana] >gi|15809826|gb|AAL06841.1|
  misc_feature (1)..(227): Homolog of NCBI NO: 34907046 NR Description: contains EST D39982(S1682)~similar to Arabidopsis
  misc_feature (1)..(227): Homolog of NCBI NO: 15223522 NR Description: unknown protein; protein id: At1g27440.1 thaliana] >gi|9802541|gb|AAF99743.1|AC004557_22 F17L21.23
  misc_feature (1)..(231): Homolog of NCBI NO: 21592991 NR Description: unknown [Arabidopsis thaliana]
  misc_feature (1)..(227): Homolog of NCBI NO: 37531708 NR Description: unknown protein [Oryza sativa (japonica
MEDRAIADGVPIFLRNSIILQTFGVTFNHPCQEVENVVIPPYISPESLHKTQKNIPVTKERDIWVFFRGKMELHPKNISGRFYSKRVRTNIWRSYGGDRRFYLQRQRFAGYQSEIARSVFCLCPLGWAPWSPRLVESVALGCVPVIIADGIRLPFPSTVRWPDISLTVAERDVGKLGDILEHVAATNLSVIQRNLEDPSVRRALMFNVPSREGDATWQVLEALSKKLNRSVRRSNSFL

SEQ ID NO: 70578 - DNA, 1503 bp, Arabidopsis thaliana
  misc_feature (1)..(1503): Ceres Seq. ID no. 2712611
  misc_feature: MA Experiment ID: 20000180 Result: Down-regulated in Transcription
  misc_feature: MA Experiment 20000180 PARAMETER Experiment Name: At_Germinating_Seeds_P Parameter: Age (hr) Value: 24 vs. 0
  misc_feature: MA Experiment 20000180 PARAMETER Experiment Name: At_Germinating_Seeds_P Parameter: Tissue Value: Germinating Seeds
atgtcttgtctgagaaattattattgtcgagctttcggttataaacagtctcgatcttgctacagtcgatcactgaatcgtgaaatagctaacgagtcatctgaagttgagagacgagctcgttctctgagagttttggatatcatatcttcgaaatctggtggagtttcgaatcgtcaggaccattttggtttcgttcaggaatttcgacaaacagattcgtggcgattcagaggtcaggcaatttccgaggattttgatctctcaagaaccaaaaatggagtttcaagcgtgctcgaagaagttatgctggaggattcttcaagctctgtcaagcgagatggatggagtttcgatgcttatggtttatcatccgccgtgagatcttgtgggttgaatcgagactttagaaccggttctgggtttcattgtttagcgttgaaaggtgggtttatctcagatgtctacttaggaagttctctggtcgttttgtacagagattctggtgaagtagagaatgcatataaagtgtttgaagaaatgcctgagaggaatgtggtttcatggacggctatgatttcagggtttgcgcaagaatggcgagttgatatctgcttgaagctttattcaaagatgagaaagtcaacctctgatccgaatgattacacattcacggctctcttgagcgcttgcacgggaagcggagccctagggcaaggaagaagtgttcattgtcagacactccacatgggattgaagtcgtatctacatatctcaaactctctcatctcgatgtactgcaaatgcggtgatttgaaggatgcttttcgtatctttgaccagttttcaaacaaagacgttgtttcttggaactctatgattgctggttacgcgcagcacggccttgcaatgcaagcaatcgagctctttgaattaatgatgcctaaaagcggaacaaagccagatgcaatcacatatctaggagttttgtcatcgtgtagacacgcaggtcttgtaaaagaaggaagaaagttcttcaatttgatggcggaacacggcctgaaaccagaactcaaccattactcttgtctagtcgatcttctcgggagatttggtctgttgcaagaagccctggaactgatcgagaacatgccaatgaaaccaaactcagtcatatggggatctctgctattctcttgccgtgttcacggcgatgtctggaccggaatcagagctgcagaggaacgactaatgcttgaacctgattgcgcagccacgcatgtccagctggcaaatctttacgccagtgtagggtactggaaagaagcggcgacagtgaggaagctgatgaaagataaaggactgaagacgaatccgggttgcagttggatcgagatcaataactatgttttcatgtttaaagctgaagatggtagcaactgtagaatgctagagattgttcatgttcttcattgtctcattgatcacatggagttcctctaa

SEQ ID NO: 70579 - protein, 500 aa, Arabidopsis thaliana
  peptide (1)..(500): Ceres Seq. ID no. 2712612
  misc_feature (187)..(221): Pfam Name: PPR repeat Pfam Description: PPR repeat
  misc_feature (1)..(500): Homolog of NCBI NO: 15228119 NR Description: hypothetical protein; protein id: At2g37320.1
  misc_feature (117)..(498): Homolog of NCBI NO: 40253530 NR Description: putative pentatricopeptide (PPR)
  misc_feature (119)..(486): Homolog of NCBI NO: 37534806 NR Description: putative PPR-repeat containing protein [Oryza
  misc_feature (58)..(494): Homolog of NCBI NO: 15238326 NR Description: putative protein; protein id: At5g04780.1
  misc_feature (113)..(486): Homolog of NCBI NO: 15229561 NR Description: hypothetical protein; protein id: At3g24000.1 thaliana] >gi|9294669|dbj|BAB03018.1| contains similarity to
  misc_feature (119)..(498): Homolog of NCBI NO: 15237212 NR Description: selenium-binding protein-like; protein id:
  misc_feature (113)..(497): Homolog of NCBI NO: 15227724 NR Description: putative selenium-binding protein; protein id:
  misc_feature (113)..(497): Homolog of NCBI NO: 28392910 NR Description: putative selenium-binding protein [Arabidopsis
  misc_feature (111)..(477): Homolog of NCBI NO: 15222917 NR Description: hypothetical protein; protein id: At1g50270.1
  misc_feature (111)..(480): Homolog of NCBI NO: 15221566 NR Description: hypothetical protein; protein id: At1g68930.1
MSCLRNYYCRAFGYKQSRSCYSRSLNREIANESSEVERRARSLRVLDIISSKSGGVSNRQDHFGFVQEFRQTDSWRFRGQAISEDFDLSRTKNGVSSVLEEVMLEDSSSSVKRDGWSFDAYGLSSAVRSCGLNRDFRTGSGFHCLALKGGFISDVYLGSSLVVLYRDSGEVENAYKVFEEMPERNVVSWTAMISGFAQEWRVDICLKLYSKMRKSTSDPNDYTFTALLSACTGSGALGQGRSVHCQTLHMGLKSYLHISNSLISMYCKCGDLKDAFRIFDQFSNKDVVSWNSMIAGYAQHGLAMQAIELFELMMPKSGTKPDAITYLGVLSSCRHAGLVKEGRKFFNLMAEHGLKPELNHYSCLVDLLGRFGLLQEALELIENMPMKPNSVIWGSLLFSCRVHGDVWTGIRAAEERLMLEPDCAATHVQLANLYASVGYWKEAATVRKLMKDKGLKTNPGCSWIEINNYVFMFKAEDGSNCRMLEIVHVLHCLIDHMEFL

SEQ ID NO: 70580 - protein, 398 aa, Arabidopsis thaliana
  peptide (1)..(398): Ceres Seq. ID no. 2712613
  misc_feature (85)..(119): Pfam Name: PPR repeat Pfam Description: PPR repeat
  misc_feature (1)..(398): Homolog of NCBI NO: 15228119 NR Description: hypothetical protein; protein id: At2g37320.1
  misc_feature (15)..(396): Homolog of NCBI NO: 40253530 NR Description: putative pentatricopeptide (PPR)
  misc_feature (17)..(384): Homolog of NCBI NO: 37534806 NR Description: putative PPR-repeat containing protein [Oryza
  misc_feature (1)..(392): Homolog of NCBI NO: 15238326 NR Description: putative protein; protein id: At5g04780.1
  misc_feature (11)..(384): Homolog of NCBI NO: 15229561 NR Description: hypothetical protein; protein id: At3g24000.1 thaliana] >gi|9294669|dbj|BAB03018.1| contains similarity to
  misc_feature (17)..(396): Homolog of NCBI NO: 15237212 NR Description: selenium-binding protein-like; protein id:
  misc_feature (11)..(395): Homolog of NCBI NO: 15227724 NR Description: putative selenium-binding protein; protein id:
  misc_feature (11)..(395): Homolog of NCBI NO: 28392910 NR Description: putative selenium-binding protein [Arabidopsis
  misc_feature (9)..(375): Homolog of NCBI NO: 15222917 NR Description: hypothetical protein; protein id: At1g50270.1
  misc_feature (9)..(378): Homolog of NCBI NO: 15221566 NR Description: hypothetical protein; protein id: At1g68930.1
MLEDSSSSVKRDGWSFDAYGLSSAVRSCGLNRDFRTGSGFHCLALKGGFISDVYLGSSLVVLYRDSGEVENAYKVFEEMPERNVVSWTAMISGFAQEWRVDICLKLYSKMRKSTSDPNDYTFTALLSACTGSGALGQGRSVHCQTLHMGLKSYLHISNSLISMYCKCGDLKDAFRIFDQFSNKDVVSWNSMIAGYAQHGLAMQAIELFELMMPKSGTKPDAITYLGVLSSCRHAGLVKEGRKFFNLMAEHGLKPELNHYSCLVDLLGRFGLLQEALELIENMPMKPNSVIWGSLLFSCRVHGDVWTGIRAAEERLMLEPDCAATHVQLANLYASVGYWKEAATVRKLMKDKGLKTNPGCSWIEINNYVFMFKAEDGSNCRMLEIVHVLHCLIDHMEFL

SEQ ID NO: 70581 - protein, 320 aa, Arabidopsis thaliana
  peptide (1)..(320): Ceres Seq. ID no. 2712614
  misc_feature (7)..(41): Pfam Name: PPR repeat Pfam Description: PPR repeat
  misc_feature (1)..(320): Homolog of NCBI NO: 15228119 NR Description: hypothetical protein; protein id: At2g37320.1
  misc_feature (1)..(318): Homolog of NCBI NO: 40253530 NR Description: putative pentatricopeptide (PPR)
  misc_feature (1)..(306): Homolog of NCBI NO: 37534806 NR Description: putative PPR-repeat containing protein [Oryza
  misc_feature (1)..(314): Homolog of NCBI NO: 15238326 NR Description: putative protein; protein id: At5g04780.1
  misc_feature (1)..(306): Homolog of NCBI NO: 15229561 NR Description: hypothetical protein; protein id: At3g24000.1 thaliana] >gi|9294669|dbj|BAB03018.1| contains similarity to
  misc_feature (1)..(318): Homolog of NCBI NO: 15237212 NR Description: selenium-binding protein-like; protein id:
  misc_feature (1)..(317): Homolog of NCBI NO: 15227724 NR Description: putative selenium-binding protein; protein id:
  misc_feature (1)..(317): Homolog of NCBI NO: 28392910 NR Description: putative selenium-binding protein [Arabidopsis
  misc_feature (1)..(297): Homolog of NCBI NO: 15222917 NR Description: hypothetical protein; protein id: At1g50270.1
  misc_feature (1)..(300): Homolog of NCBI NO: 15221566 NR Description: hypothetical protein; protein id: At1g68930.1
MPERNVVSWTAMISGFAQEWRVDICLKLYSKMRKSTSDPNDYTFTALLSACTGSGALGQGRSVHCQTLHMGLKSYLHISNSLISMYCKCGDLKDAFRIFDQFSNKDVVSWNSMIAGYAQHGLAMQAIELFELMMPKSGTKPDAITYLGVLSSCRHAGLVKEGRKFFNLMAEHGLKPELNHYSCLVDLLGRFGLLQEALELIENMPMKPNSVIWGSLLFSCRVHGDVWTGIRAAEERLMLEPDCAATHVQLANLYASVGYWKEAATVRKLMKDKGLKTNPGCSWIEINNYVFMFKAEDGSNCRMLEIVHVLHCLIDHMEFL

SEQ ID NO: 70582 - DNA, 1059 bp, Arabidopsis thaliana
  misc_feature (1)..(1059): Ceres Seq. ID no. 2712716
  misc_feature: MA Experiment ID: 20000173 Result: Down-regulated in Transcription
  misc_feature: MA Experiment 20000173 PARAMETER Experiment Name: At_42deg_Heat_P Parameter: Age (day) Value: 14
  misc_feature: MA Experiment 20000173 PARAMETER Experiment Name: At_42deg_Heat_P Parameter: Organism Value: A. thaliana
  misc_feature: MA Experiment 20000173 PARAMETER Experiment Name: At_42deg_Heat_P Parameter: Plant Line Value: WS
  misc_feature: MA Experiment 20000173 PARAMETER Experiment Name: At_42deg_Heat_P Parameter: Temperature (deg C) Value: 42 vs. 22
  misc_feature: MA Experiment 20000173 PARAMETER Experiment Name: At_42deg_Heat_P Parameter: Timepoint (hr) Value: 6
  misc_feature: MA Experiment 20000173 PARAMETER Experiment Name: At_42deg_Heat_P Parameter: Tissue Value: Aerial
  misc_feature: MA Experiment ID: 20000180 Result: Up-regulated in Transcription
  misc_feature: MA Experiment 20000180 PARAMETER Experiment Name: At_Germinating_Seeds_P Parameter: Age (hr) Value: 24 vs. 0
  misc_feature: MA Experiment 20000180 PARAMETER Experiment Name: At_Germinating_Seeds_P Parameter: Tissue Value: Germinating Seeds
  misc_feature: MA Experiment ID: 20000234 Result: Up-regulated in Transcription
  misc_feature: MA Experiment 20000234 PARAMETER Experiment Name: At_Siliques_P Parameter: Age (day) Value: 21
  misc_feature: MA Experiment 20000234 PARAMETER Experiment Name: At_Siliques_P Parameter: Organism Value: A. thaliana
  misc_feature: MA Experiment 20000234 PARAMETER Experiment Name: At_Siliques_P Parameter: Plant Line Value: WS
  misc_feature: MA Experiment 20000234 PARAMETER Experiment Name: At_Siliques_P Parameter: Tissue Value: Less Than 5mm Siliques vs. Whole Plant
  misc_feature: MA Experiment ID: 20000235 Result: Up-regulated in Transcription
  misc_feature: MA Experiment 20000235 PARAMETER Experiment Name: At_Siliques_P Parameter: Age (day) Value: 21
  misc_feature: MA Experiment 20000235 PARAMETER Experiment Name: At_Siliques_P Parameter: Organism Value: A. thaliana
  misc_feature: MA Experiment 20000235 PARAMETER Experiment Name: At_Siliques_P Parameter: Plant Line Value: WS
  misc_feature: MA Experiment 20000235 PARAMETER Experiment Name: At_Siliques_P Parameter: Tissue Value: 5-10mm Siliques vs. Whole Plant
  misc_feature: MA Experiment ID: 20000264 Result: Up-regulated in Transcription
  misc_feature: MA Experiment 20000264 PARAMETER Experiment Name: At_Open_Flower_P Parameter: Age (day) Value: 21
  misc_feature: MA Experiment 20000264 PARAMETER Experiment Name: At_Open_Flower_P Parameter: Plant Line Value: WS
  misc_feature: MA Experiment 20000264 PARAMETER Experiment Name: At_Open_Flower_P Parameter: Tissue Value: Open Flower vs. Whole Plant
  misc_feature: MA Experiment ID: 20000286 Result: Up-regulated in Transcription
  misc_feature: MA Experiment 20000286 PARAMETER Experiment Name: At_Open_Flower_P Parameter: Age (day) Value: 21
  misc_feature: MA Experiment 20000286 PARAMETER Experiment Name: At_Open_Flower_P Parameter: Plant Line Value: WS
  misc_feature: MA Experiment 20000286 PARAMETER Experiment Name: At_Open_Flower_P Parameter: Tissue Value: Half Open vs. Whole Plant
  misc_feature: MA Experiment ID: 20000437 Result: Up-regulated in Transcription
  misc_feature: MA Experiment 20000437 PARAMETER Experiment Name: At_Drought_P Parameter: Age (day) Value: 8
  misc_feature: MA Experiment 20000437 PARAMETER Experiment Name: At_Drought_P Parameter: Organism Value: A. thaliana
  misc_feature: MA Experiment 20000437 PARAMETER Experiment Name: At_Drought_P Parameter: Plant Line Value: WS
  misc_feature: MA Experiment 20000437 PARAMETER Experiment Name: At_Drought_P Parameter: Timepoint (hr) Value: 24
  misc_feature: MA Experiment 20000437 PARAMETER Experiment Name: At_Drought_P Parameter: Tissue Value: Whole Plant
  misc_feature: MA Experiment 20000437 PARAMETER Experiment Name: At_Drought_P Parameter: Treatment Value: Drought vs. No Drought
  misc_feature: MA Experiment ID: 20000573 Result: Up-regulated in Transcription
  misc_feature: MA Experiment 20000573 PARAMETER Experiment Name: At_100uM_ABA_Mutants__P Parameter: Organism Value: A. thaliana
  misc_feature: MA Experiment 20000573 PARAMETER Experiment Name: At_100uM_ABA_Mutants__P Parameter: Plant Line Value: CS22 vs. Ler wt
  misc_feature: MA Experiment 20000573 PARAMETER Experiment Name: At_100uM_ABA_Mutants__P Parameter: Timepoint (hr) Value: N/A
  misc_feature: MA Experiment 20000573 PARAMETER Experiment Name: At_100uM_ABA_Mutants__P Parameter: Tissue Value: Whole Plant
  misc_feature: MA Experiment 20000573 PARAMETER Experiment Name: At_100uM_ABA_Mutants__P Parameter: Treatment Value: None
  misc_feature: MA Experiment ID: 20000574 Result: Up-regulated in Transcription
  misc_feature: MA Experiment 20000574 PARAMETER Experiment Name: At_100uM_ABA_Mutants__P Parameter: Organism Value: A. thaliana
  misc_feature: MA Experiment 20000574 PARAMETER Experiment Name: At_100uM_ABA_Mutants__P Parameter: Plant Line Value: CS23 vs. Ler wt
  misc_feature: MA Experiment 20000574 PARAMETER Experiment Name: At_100uM_ABA_Mutants__P Parameter: Timepoint (hr) Value: N/A
  misc_feature: MA Experiment 20000574 PARAMETER Experiment Name: At_100uM_ABA_Mutants__P Parameter: Tissue Value: Whole Plant
  misc_feature: MA Experiment 20000574 PARAMETER Experiment Name: At_100uM_ABA_Mutants__P Parameter: Treatment Value: None
  misc_feature: MA Experiment ID: 20000794 Result: Up-regulated in Transcription
  misc_feature: MA Experiment 20000794 PARAMETER Experiment Name: At_Petals_P Parameter: Age (day) Value: 23-25 days
  misc_feature: MA Experiment 20000794 PARAMETER Experiment Name: At_Petals_P Parameter: Plant Line Value: WS
  misc_feature: MA Experiment 20000794 PARAMETER Experiment Name: At_Petals_P Parameter: Tissue Value: Petals vs. Whole plant
  misc_feature: MA Experiment ID: 20001557 Result: Down-regulated in Transcription
  misc_feature: MA Experiment 20001557 PARAMETER Experiment Name: At_Drought_Soil_Dry_P Parameter: Age (day) Value: 27
  misc_feature: MA Experiment 20001557 PARAMETER Experiment Name: At_Drought_Soil_Dry_P Parameter: Organism Value: A. thaliana
  misc_feature: MA Experiment 20001557 PARAMETER Experiment Name: At_Drought_Soil_Dry_P Parameter: Plant Line Value: WS
  misc_feature: MA Experiment 20001557 PARAMETER Experiment Name: At_Drought_Soil_Dry_P Parameter: Post Timepoint (hr) Value: 3
  misc_feature: MA Experiment 20001557 PARAMETER Experiment Name: At_Drought_Soil_Dry_P Parameter: Post-Treatment Value: Re-Water vs. No Drought
  misc_feature: MA Experiment 20001557 PARAMETER Experiment Name: At_Drought_Soil_Dry_P Parameter: Timepoint (day) Value: 13
  misc_feature: MA Experiment 20001557 PARAMETER Experiment Name: At_Drought_Soil_Dry_P Parameter: Treatment Value: Drought vs. No Drought
  misc_feature: MA Experiment ID: 20001558 Result: Down-regulated in Transcription
  misc_feature: MA Experiment 20001558 PARAMETER Experiment Name: At_Drought_Soil_Dry_P Parameter: Age (day) Value: 27
  misc_feature: MA Experiment 20001558 PARAMETER Experiment Name: At_Drought_Soil_Dry_P Parameter: Organism Value: A. thaliana
  misc_feature: MA Experiment 20001558 PARAMETER Experiment Name: At_Drought_Soil_Dry_P Parameter: Plant Line Value: WS
  misc_feature: MA Experiment 20001558 PARAMETER Experiment Name: At_Drought_Soil_Dry_P Parameter: Post Timepoint (hr) Value: 6
  misc_feature: MA Experiment 20001558 PARAMETER Experiment Name: At_Drought_Soil_Dry_P Parameter: Post-Treatment Value: Re-Water vs. No Drought
  misc_feature: MA Experiment 20001558 PARAMETER Experiment Name: At_Drought_Soil_Dry_P Parameter: Timepoint (day) Value: 13
  misc_feature: MA Experiment 20001558 PARAMETER Experiment Name: At_Drought_Soil_Dry_P Parameter: Treatment Value: Drought vs. No Drought
  misc_feature: MA Experiment ID: 20001905 Result: Down-regulated in Transcription
  misc_feature: MA Experiment 20001905 PARAMETER Experiment Name: At_Drought_Reproduction_P Parameter: Age (day) Value: 40
  misc_feature: MA Experiment 20001905 PARAMETER Experiment Name: At_Drought_Reproduction_P Parameter: Organism Value: A. thaliana
  misc_feature: MA Experiment 20001905 PARAMETER Experiment Name: At_Drought_Reproduction_P Parameter: Plant Line Value: WS
  misc_feature: MA Experiment 20001905 PARAMETER Experiment Name: At_Drought_Reproduction_P Parameter: Timepoint (day) Value: 10
  misc_feature: MA Experiment 20001905 PARAMETER Experiment Name: At_Drought_Reproduction_P Parameter: Tissue Value: Rosettes
  misc_feature: MA Experiment 20001905 PARAMETER Experiment Name: At_Drought_Reproduction_P Parameter: Treatment Value: Drought vs. No Drought
atgacttctttgagtaggcgttgcgaaaagagaaactttgatgagcttgagggagctccaagcagtaaaaacacatatattgatggcatggcagttgacactttctcggtggtttttaatgggtttacaaatggtgaaagacaatatctagaactaaatgacggtgagtctaacggttctcaggatgtaactagtcgcctgaatgatgtagcagatagctccatgtgggtttcaagggctcctggtggcactgatgaattaaatgatggttttgaagacatcaaatatgatttgacattagactgtcaaaaggattgtgtggttggagcagagatatctctgagatatgattgtgttgggatatcaaatcctcacatcagtgattctctctcaagtggtagtgtgttcctatgtcatggaagcataagaagaaaccaaacagggttgctactgactcaagaactcagttcttgtagtcaggatcagagtagtggcgctaagtcccatgacgttggtccttttgaaatattgaagcctcaacagttaaaagaaaagttatcttggttgacattatcgatacatgaagaggattgtcgttatattctacaaaaggaggatgaagttgcgaatttgcgacaacaaactttcaagcttacattacctgatttagtgacctttccagattttcttgtgaaaagaagccggtatgaaggagcgatacagaggaaatggacttgcagggacaagtgtaaggtttggtggagaaacaaaggcgaagaagatggtcgttggtgggaaggaggaattctagctgtgaaacccaaatcaactcattttcttgatagtccatgggagaggttcccagttcctttgtctcttgaggtaataagatcaaggattgagaacaactattaccggagtatggaagcgttaaggcacgatgtatcagttatgctatccaatgcagagactttctttgatctaaacaaatgtgtaggtgtagcagtcaaaatttcagatctttctcaatggttcgaccgcacgttgtcttctttgtag

SEQ ID NO: 70583 - protein, 352 aa, Arabidopsis thaliana
  peptide (1)..(352): Ceres Seq. ID no. 2712717
  misc_feature (290)..(338): Pfam Name: Bromodomain Pfam Description: Bromodomain
  misc_feature (1)..(352): Homolog of NCBI NO: 15226044 NR Description: hypothetical protein; protein id: At2g15030.1
  misc_feature (30)..(213): Homolog of NCBI NO: 29649027 NR Description: hypothetical protein [Arabidopsis thaliana]
  misc_feature (30)..(213): Homolog of NCBI NO: 29649018 NR Description: hypothetical protein [Arabidopsis thaliana]
  misc_feature (160)..(289): Homolog of NCBI NO: 9759426 NR Description: WD-40 repeat protein-like [Arabidopsis thaliana]
  misc_feature (74)..(144): Homolog of NCBI NO: 9759426 NR Description: WD-40 repeat protein-like [Arabidopsis thaliana]
  misc_feature (286)..(351): Homolog of NCBI NO: 9759426 NR Description: WD-40 repeat protein-like [Arabidopsis thaliana]
  misc_feature (19)..(73): Homolog of NCBI NO: 9759426 NR Description: WD-40 repeat protein-like [Arabidopsis thaliana]
  misc_feature (1)..(23): Homolog of NCBI NO: 9759426 NR Description: WD-40 repeat protein-like [Arabidopsis thaliana]
  misc_feature (160)..(289): Homolog of NCBI NO: 15239884 NR Description: WD-40 repeat protein-like; protein id:
  misc_feature (74)..(144): Homolog of NCBI NO: 15239884 NR Description: WD-40 repeat protein-like; protein id:
MTSLSRRCEKRNFDELEGAPSSKNTYIDGMAVDTFSVVFNGFTNGERQYLELNDGESNGSQDVTSRLNDVADSSMWVSRAPGGTDELNDGFEDIKYDLTLDCQKDCVVGAEISLRYDCVGISNPHISDSLSSGSVFLCHGSIRRNQTGLLLTQELSSCSQDQSSGAKSHDVGPFEILKPQQLKEKLSWLTLSIHEEDCRYILQKEDEVANLRQQTFKLTLPDLVTFPDFLVKRSRYEGAIQRKWTCRDKCKVWWRNKGEEDGRWWEGGILAVKPKSTHFLDSPWERFPVPLSLEVIRSRIENNYYRSMEALRHDVSVMLSNAETFFDLNKCVGVAVKISDLSQWFDRTLSSL

SEQ ID NO: 70584 - protein, 323 aa, Arabidopsis thaliana
  peptide (1)..(323): Ceres Seq. ID no. 2712718
  misc_feature (261)..(309): Pfam Name: Bromodomain Pfam Description: Bromodomain
  misc_feature (1)..(323): Homolog of NCBI NO: 15226044 NR Description: hypothetical protein; protein id: At2g15030.1
  misc_feature (1)..(184): Homolog of NCBI NO: 29649027 NR Description: hypothetical protein [Arabidopsis thaliana]
  misc_feature (1)..(184): Homolog of NCBI NO: 29649018 NR Description: hypothetical protein [Arabidopsis thaliana]
  misc_feature (131)..(260): Homolog of NCBI NO: 9759426 NR Description: WD-40 repeat protein-like [Arabidopsis thaliana]
  misc_feature (45)..(115): Homolog of NCBI NO: 9759426 NR Description: WD-40 repeat protein-like [Arabidopsis thaliana]
  misc_feature (257)..(322): Homolog of NCBI NO: 9759426 NR Description: WD-40 repeat protein-like [Arabidopsis thaliana]
  misc_feature (1)..(44): Homolog of NCBI NO: 9759426 NR Description: WD-40 repeat protein-like [Arabidopsis thaliana]
  misc_feature (131)..(260): Homolog of NCBI NO: 15239884 NR Description: WD-40 repeat protein-like; protein id:
  misc_feature (45)..(115): Homolog of NCBI NO: 15239884 NR Description: WD-40 repeat protein-like; protein id:
  misc_feature (257)..(322): Homolog of NCBI NO: 15239884 NR Description: WD-40 repeat protein-like; protein id:
MAVDTFSVVFNGFTNGERQYLELNDGESNGSQDVTSRLNDVADSSMWVSRAPGGTDELNDGFEDIKYDLTLDCQKDCVVGAEISLRYDCVGISNPHISDSLSSGSVFLCHGSIRRNQTGLLLTQELSSCSQDQSSGAKSHDVGPFEILKPQQLKEKLSWLTLSIHEEDCRYILQKEDEVANLRQQTFKLTLPDLVTFPDFLVKRSRYEGAIQRKWTCRDKCKVWWRNKGEEDGRWWEGGILAVKPKSTHFLDSPWERFPVPLSLEVIRSRIENNYYRSMEALRHDVSVMLSNAETFFDLNKCVGVAVKISDLSQWFDRTLSSL

SEQ ID NO: 70585 - protein, 278 aa, Arabidopsis thaliana
  peptide (1)..(278): Ceres Seq. ID no. 2712719
  misc_feature (216)..(264): Pfam Name: Bromodomain Pfam Description: Bromodomain
  misc_feature (1)..(278): Homolog of NCBI NO: 15226044 NR Description: hypothetical protein; protein id: At2g15030.1
  misc_feature (1)..(139): Homolog of NCBI NO: 29649027 NR Description: hypothetical protein [Arabidopsis thaliana]
  misc_feature (1)..(139): Homolog of NCBI NO: 29649018 NR Description: hypothetical protein [Arabidopsis thaliana]
  misc_feature (86)..(215): Homolog of NCBI NO: 9759426 NR Description: WD-40 repeat protein-like [Arabidopsis thaliana]
  misc_feature (1)..(70): Homolog of NCBI NO: 9759426 NR Description: WD-40 repeat protein-like [Arabidopsis thaliana]
  misc_feature (212)..(277): Homolog of NCBI NO: 9759426 NR Description: WD-40 repeat protein-like [Arabidopsis thaliana]
  misc_feature (86)..(215): Homolog of NCBI NO: 15239884 NR Description: WD-40 repeat protein-like; protein id:
  misc_feature (1)..(70): Homolog of NCBI NO: 15239884 NR Description: WD-40 repeat protein-like; protein id:
  misc_feature (212)..(277): Homolog of NCBI NO: 15239884 NR Description: WD-40 repeat protein-like; protein id:
  misc_feature (51)..(139): Homolog of NCBI NO: 9759426 NR Description: WD-40 repeat protein-like [Arabidopsis thaliana]
MWVSRAPGGTDELNDGFEDIKYDLTLDCQKDCVVGAEISLRYDCVGISNPHISDSLSSGSVFLCHGSIRRNQTGLLLTQELSSCSQDQSSGAKSHDVGPFEILKPQQLKEKLSWLTLSIHEEDCRYILQKEDEVANLRQQTFKLTLPDLVTFPDFLVKRSRYEGAIQRKWTCRDKCKVWWRNKGEEDGRWWEGGILAVKPKSTHFLDSPWERFPVPLSLEVIRSRIENNYYRSMEALRHDVSVMLSNAETFFDLNKCVGVAVKISDLSQWFDRTLSSL

SEQ ID NO: 70586 - DNA, 1704 bp, Arabidopsis thaliana
  misc_feature (1)..(1704): Ceres Seq. ID no. 2712856
  misc_feature: MA Experiment ID: 20000173 Result: Down-regulated in Transcription
  misc_feature: MA Experiment 20000173 PARAMETER Experiment Name: At_42deg_Heat_P Parameter: Age (day) Value: 14
  misc_feature: MA Experiment 20000173 PARAMETER Experiment Name: At_42deg_Heat_P Parameter: Organism Value: A. thaliana
  misc_feature: MA Experiment 20000173 PARAMETER Experiment Name: At_42deg_Heat_P Parameter: Plant Line Value: WS
  misc_feature: MA Experiment 20000173 PARAMETER Experiment Name: At_42deg_Heat_P Parameter: Temperature (deg C) Value: 42 vs. 22
  misc_feature: MA Experiment 20000173 PARAMETER Experiment Name: At_42deg_Heat_P Parameter: Timepoint (hr) Value: 6
  misc_feature: MA Experiment 20000173 PARAMETER Experiment Name: At_42deg_Heat_P Parameter: Tissue Value: Aerial
  misc_feature: MA Experiment ID: 20000234 Result: Up-regulated in Transcription
  misc_feature: MA Experiment 20000234 PARAMETER Experiment Name: At_Siliques_P Parameter: Age (day) Value: 21
  misc_feature: MA Experiment 20000234 PARAMETER Experiment Name: At_Siliques_P Parameter: Organism Value: A. thaliana
  misc_feature: MA Experiment 20000234 PARAMETER Experiment Name: At_Siliques_P Parameter: Plant Line Value: WS
  misc_feature: MA Experiment 20000234 PARAMETER Experiment Name: At_Siliques_P Parameter: Tissue Value: Less Than 5mm Siliques vs. Whole Plant
  misc_feature: MA Experiment ID: 20000235 Result: Up-regulated in Transcription
  misc_feature: MA Experiment 20000235 PARAMETER Experiment Name: At_Siliques_P Parameter: Age (day) Value: 21
  misc_feature: MA Experiment 20000235 PARAMETER Experiment Name: At_Siliques_P Parameter: Organism Value: A. thaliana
  misc_feature: MA Experiment 20000235 PARAMETER Experiment Name: At_Siliques_P Parameter: Plant Line Value: WS
  misc_feature: MA Experiment 20000235 PARAMETER Experiment Name: At_Siliques_P Parameter: Tissue Value: 5-10mm Siliques vs. Whole Plant
  misc_feature: MA Experiment ID: 20000264 Result: Up-regulated in Transcription
  misc_feature: MA Experiment 20000264 PARAMETER Experiment Name: At_Open_Flower_P Parameter: Age (day) Value: 21
  misc_feature: MA Experiment 20000264 PARAMETER Experiment Name: At_Open_Flower_P Parameter: Plant Line Value: WS
  misc_feature: MA Experiment 20000264 PARAMETER Experiment Name: At_Open_Flower_P Parameter: Tissue Value: Open Flower vs. Whole Plant
  misc_feature: MA Experiment ID: 20000265 Result: Up-regulated in Transcription
  misc_feature: MA Experiment 20000265 PARAMETER Experiment Name: At_Open_Flower_P Parameter: Age (day) Value: 21
  misc_feature: MA Experiment 20000265 PARAMETER Experiment Name: At_Open_Flower_P Parameter: Plant Line Value: WS
  misc_feature: MA Experiment 20000265 PARAMETER Experiment Name: At_Open_Flower_P Parameter: Tissue Value: Closed Flower vs. Whole Plant
  misc_feature: MA Experiment ID: 20000286 Result: Up-regulated in Transcription
  misc_feature: MA Experiment 20000286 PARAMETER Experiment Name: At_Open_Flower_P Parameter: Age (day) Value: 21
  misc_feature: MA Experiment 20000286 PARAMETER Experiment Name: At_Open_Flower_P Parameter: Plant Line Value: WS
  misc_feature: MA Experiment 20000286 PARAMETER Experiment Name: At_Open_Flower_P Parameter: Tissue Value: Half Open vs. Whole Plant
  misc_feature: MA Experiment ID: 20000437 Result: Down-regulated in Transcription
  misc_feature: MA Experiment 20000437 PARAMETER Experiment Name: At_Drought_P Parameter: Age (day) Value: 8
  misc_feature: MA Experiment 20000437 PARAMETER Experiment Name: At_Drought_P Parameter: Organism Value: A. thaliana
  misc_feature: MA Experiment 20000437 PARAMETER Experiment Name: At_Drought_P Parameter: Plant Line Value: WS
  misc_feature: MA Experiment 20000437 PARAMETER Experiment Name: At_Drought_P Parameter: Timepoint (hr) Value: 24
  misc_feature: MA Experiment 20000437 PARAMETER Experiment Name: At_Drought_P Parameter: Tissue Value: Whole Plant
  misc_feature: MA Experiment 20000437 PARAMETER Experiment Name: At_Drought_P Parameter: Treatment Value: Drought vs. No Drought
  misc_feature: MA Experiment ID: 20001557 Result: Down-regulated in Transcription
  misc_feature: MA Experiment 20001557 PARAMETER Experiment Name: At_Drought_Soil_Dry_P Parameter: Age (day) Value: 27
  misc_feature: MA Experiment 20001557 PARAMETER Experiment Name: At_Drought_Soil_Dry_P Parameter: Organism Value: A. thaliana
  misc_feature: MA Experiment 20001557 PARAMETER Experiment Name: At_Drought_Soil_Dry_P Parameter: Plant Line Value: WS
  misc_feature: MA Experiment 20001557 PARAMETER Experiment Name: At_Drought_Soil_Dry_P Parameter: Post Timepoint (hr) Value: 3
  misc_feature: MA Experiment 20001557 PARAMETER Experiment Name: At_Drought_Soil_Dry_P Parameter: Post-Treatment Value: Re-Water vs. No Drought
  misc_feature: MA Experiment 20001557 PARAMETER Experiment Name: At_Drought_Soil_Dry_P Parameter: Timepoint (day) Value: 13
  misc_feature: MA Experiment 20001557 PARAMETER Experiment Name: At_Drought_Soil_Dry_P Parameter: Treatment Value: Drought vs. No Drought
  misc_feature: MA Experiment ID: 20001911 Result: Down-regulated in Transcription
  misc_feature: MA Experiment 20001911 PARAMETER Experiment Name: At_Drought_Reproduction_P Parameter: Age (day) Value: 40
  misc_feature: MA Experiment 20001911 PARAMETER Experiment Name: At_Drought_Reproduction_P Parameter: Organism Value: A. thaliana
  misc_feature: MA Experiment 20001911 PARAMETER Experiment Name: At_Drought_Reproduction_P Parameter: Plant Line Value: WS
  misc_feature: MA Experiment 20001911 PARAMETER Experiment Name: At_Drought_Reproduction_P Parameter: Timepoint (day) Value: 10
  misc_feature: MA Experiment 20001911 PARAMETER Experiment Name: At_Drought_Reproduction_P Parameter: Tissue Value: Flowers
  misc_feature: MA Experiment 20001911 PARAMETER Experiment Name: At_Drought_Reproduction_P Parameter: Treatment Value: Drought vs. No Drought
  misc_feature: Pfam Name: Pkinase Pfam Description: Protein kinase domain
atgatcaccatttactccgcccagattgctgaagggattaaatcctttttttctccaggtgaggcgcttttgagttttagaaatggagttttggcttctgatggtgttattggtctgtggagaccagaggatcctgatccatgtaactggaaaggagtgacctgtgatgcaaaaacaaaaagagttatagccttgagtcttacttatcacaaattaaggggacctttaccccctgagcttggaaagctggatcagttaaggcttttaatgcttcacaacaatgcgttatatcaatcaatacctgcctcattgggaaattgcacggcattagagggaatatacttgcagaataattacatcactgggacaatcccaagtgaaataggaaacctgtccgggctgaaaaacctggacctctcaaacaacaatctcaatggagctatccctgcttcacttgggcagttgaaaaggcttactaaattcaatgtctcaaacaatttcctggtgggaaaaataccttctgacggcctactcgctagactctcgagggactccttcaacggaaatcgtaacttgtgtggaaaacaaatcgatattgtgtgcaatgacagtggaaattctacagcttctgggtctccaacaggccaaggaggtaataaccctaaaaggctgcttataagtgcttcagctactgtgggtgggctgctcctagtggcgctcatgtgtttctggggatgctttctctataaaaagcttggtagagttgagagtaaaagccttgtgatagatgtcggtggagatttgccctacgcttccaaagacattatcaagaaactggaatctcttaatgaagagcacataataggctgtggaggctttggcacagtgtacaagctgtctatggacgatggcaatgtttttgcgctgaaaagaattgttaagttaaatgaaggttttgatcggttttttgaaagggagcttgagattcttgggagcatcaaacatcgttaccttgtgaatctacgtggatactgcaattcacccacatcaaagcttctgctatatgattaccttcctggtggtagccttgatgaagctctacataagagaggcgagcagctggattgggattcgcgagttaatatcataataggagcggcaaaagggttggcatacttgcatcatgattgttctcctaggattatacaccgtgatataaaatcaagcaacatcttactggatggaaatctggaggctcgggtatcagactttgggcttgccaagttgttagaggacgaagaatctcatattacaaccattgttgcaggcacattcggttacttggctccagagtatatgcaaagcggtagagcgactgagaaaaccgatgtttacagcttcggggttttggttcttgaagtcttgagtggtaaacttcccacggatgcctcattcatcgagaaaggctttaacattgttggttggctaaacttcttaatcagcgaaaaccgggcaaaggagattgttgatctaagctgtgaaggagtggagagagagagtctcgacgcacttctatcaatagcaacaaagtgtgtgtcgtcaagtccagatgagcggccaacaatgcacagagtcgtccagttacttgaatccgaagttatgactccttgccccagcgacttctacgactccagctccgattga

SEQ ID NO: 70587 - protein, 567 aa, Arabidopsis thaliana
  peptide (1)..(567): Ceres Seq. ID no. 2712857
  misc_feature: Pfam Name: Pkinase Pfam Description: Protein kinase domain
  misc_feature (1)..(567): Homolog of NCBI NO: 15227455 NR Description: putative receptor-like protein kinase; protein id:
  misc_feature (18)..(567): Homolog of NCBI NO: 25403114 NR Description: probable protein kinase [imported] - Arabidopsis >gi|12322537|gb|AAG51266.1|AC027135_7 protein kinase, putative
  misc_feature (18)..(567): Homolog of NCBI NO: 30692520 NR Description: leucine-rich repeat transmembrane protein kinase,
  misc_feature (58)..(567): Homolog of NCBI NO: 10177448 NR Description: receptor-like protein kinase [Arabidopsis
  misc_feature (58)..(567): Homolog of NCBI NO: 30697726 NR Description: leucine rich repeat protein family [Arabidopsis >gi|26451750|dbj|BAC42970.1| putative receptor like protein
  misc_feature (20)..(552): Homolog of NCBI NO: 13897308 NR Description: SERK1 protein [Zea mays]
  misc_feature (274)..(550): Homolog of NCBI NO: 23304947 NR Description: extra sporogenous cells [Arabidopsis thaliana]
  misc_feature (62)..(210): Homolog of NCBI NO: 23304947 NR Description: extra sporogenous cells [Arabidopsis thaliana]
  misc_feature (274)..(550): Homolog of NCBI NO: 15240747 NR Description: receptor-like protein kinase-like protein;
  misc_feature (62)..(210): Homolog of NCBI NO: 15240747 NR Description: receptor-like protein kinase-like protein;
MITIYSAQIAEGIKSFFSPGEALLSFRNGVLASDGVIGLWRPEDPDPCNWKGVTCDAKTKRVIALSLTYHKLRGPLPPELGKLDQLRLLMLHNNALYQSIPASLGNCTALEGIYLQNNYITGTIPSEIGNLSGLKNLDLSNNNLNGAIPASLGQLKRLTKFNVSNNFLVGKIPSDGLLARLSRDSFNGNRNLCGKQIDIVCNDSGNSTASGSPTGQGGNNPKRLLISASATVGGLLLVALMCFWGCFLYKKLGRVESKSLVIDVGGDLPYASKDIIKKLESLNEEHIIGCGGFGTVYKLSMDDGNVFALKRIVKLNEGFDRFFERELEILGSIKHRYLVNLRGYCNSPTSKLLLYDYLPGGSLDEALHKRGEQLDWDSRVNIIIGAAKGLAYLHHDCSPRIIHRDIKSSNILLDGNLEARVSDFGLAKLLEDEESHITTIVAGTFGYLAPEYMQSGRATEKTDVYSFGVLVLEVLSGKLPTDASFIEKGFNIVGWLNFLISENRAKEIVDLSCEGVERESLDALLSIATKCVSSSPDERPTMHRVVQLLESEVMTPCPSDFYDSSSD

SEQ ID NO: 70588 - protein, 478 aa, Arabidopsis thaliana
  peptide (1)..(478): Ceres Seq. ID no. 2712858
  misc_feature: Pfam Name: Pkinase Pfam Description: Protein kinase domain
  misc_feature (1)..(478): Homolog of NCBI NO: 15227455 NR Description: putative receptor-like protein kinase; protein id:
  misc_feature (1)..(478): Homolog of NCBI NO: 25403114 NR Description: probable protein kinase [imported] - Arabidopsis >gi|12322537|gb|AAG51266.1|AC027135_7 protein kinase, putative
  misc_feature (1)..(478): Homolog of NCBI NO: 30692520 NR Description: leucine-rich repeat transmembrane protein kinase,
  misc_feature (1)..(478): Homolog of NCBI NO: 10177448 NR Description: receptor-like protein kinase [Arabidopsis
  misc_feature (1)..(478): Homolog of NCBI NO: 30697726 NR Description: leucine rich repeat protein family [Arabidopsis >gi|26451750|dbj|BAC42970.1| putative receptor like protein
  misc_feature (1)..(463): Homolog of NCBI NO: 13897308 NR Description: SERK1 protein [Zea mays]
  misc_feature (185)..(461): Homolog of NCBI NO: 23304947 NR Description: extra sporogenous cells [Arabidopsis thaliana]
  misc_feature (1)..(121): Homolog of NCBI NO: 23304947 NR Description: extra sporogenous cells [Arabidopsis thaliana]
  misc_feature (185)..(461): Homolog of NCBI NO: 15240747 NR Description: receptor-like protein kinase-like protein;
  misc_feature (1)..(121): Homolog of NCBI NO: 15240747 NR Description: receptor-like protein kinase-like protein;
MLHNNALYQSIPASLGNCTALEGIYLQNNYITGTIPSEIGNLSGLKNLDLSNNNLNGAIPASLGQLKRLTKFNVSNNFLVGKIPSDGLLARLSRDSFNGNRNLCGKQIDIVCNDSGNSTASGSPTGQGGNNPKRLLISASATVGGLLLVALMCFWGCFLYKKLGRVESKSLVIDVGGDLPYASKDIIKKLESLNEEHIIGCGGFGTVYKLSMDDGNVFALKRIVKLNEGFDRFFERELEILGSIKHRYLVNLRGYCNSPTSKLLLYDYLPGGSLDEALHKRGEQLDWDSRVNIIIGAAKGLAYLHHDCSPRIIHRDIKSSNILLDGNLEARVSDFGLAKLLEDEESHITTIVAGTFGYLAPEYMQSGRATEKTDVYSFGVLVLEVLSGKLPTDASFIEKGFNIVGWLNFLISENRAKEIVDLSCEGVERESLDALLSIATKCVSSSPDERPTMHRVVQLLESEVMTPCPSDFYDSSSD

SEQ ID NO: 70589 - protein, 327 aa, Arabidopsis thaliana
  peptide (1)..(327): Ceres Seq. ID no. 2712859
  misc_feature: Pfam Name: Pkinase Pfam Description: Protein kinase domain
  misc_feature (1)..(327): Homolog of NCBI NO: 15227455 NR Description: putative receptor-like protein kinase; protein id:
  misc_feature (1)..(327): Homolog of NCBI NO: 25403114 NR Description: probable protein kinase [imported] - Arabidopsis >gi|12322537|gb|AAG51266.1|AC027135_7 protein kinase, putative
  misc_feature (1)..(327): Homolog of NCBI NO: 30692520 NR Description: leucine-rich repeat transmembrane protein kinase,
  misc_feature (1)..(327): Homolog of NCBI NO: 10177448 NR Description: receptor-like protein kinase [Arabidopsis
  misc_feature (1)..(327): Homolog of NCBI NO: 30697726 NR Description: leucine rich repeat protein family [Arabidopsis >gi|26451750|dbj|BAC42970.1| putative receptor like protein
  misc_feature (1)..(312): Homolog of NCBI NO: 13897308 NR Description: SERK1 protein [Zea mays]
  misc_feature (34)..(310): Homolog of NCBI NO: 23304947 NR Description: extra sporogenous cells [Arabidopsis thaliana]
  misc_feature (34)..(310): Homolog of NCBI NO: 15240747 NR Description: receptor-like protein kinase-like protein;
  misc_feature (1)..(312): Homolog of NCBI NO: 40253600 NR Description: putative somatic embryogenesis receptor kinase 1
  misc_feature (1)..(309): Homolog of NCBI NO: 21743075 NR Description: OSJNBb0002J11.4 [Oryza sativa (japonica
MCFWGCFLYKKLGRVESKSLVIDVGGDLPYASKDIIKKLESLNEEHIIGCGGFGTVYKLSMDDGNVFALKRIVKLNEGFDRFFERELEILGSIKHRYLVNLRGYCNSPTSKLLLYDYLPGGSLDEALHKRGEQLDWDSRVNIIIGAAKGLAYLHHDCSPRIIHRDIKSSNILLDGNLEARVSDFGLAKLLEDEESHITTIVAGTFGYLAPEYMQSGRATEKTDVYSFGVLVLEVLSGKLPTDASFIEKGFNIVGWLNFLISENRAKEIVDLSCEGVERESLDALLSIATKCVSSSPDERPTMHRVVQLLESEVMTPCPSDFYDSSSD

SEQ ID NO: 70590 - DNA, 747 bp, Arabidopsis thaliana
  misc_feature (1)..(747): Ceres Seq. ID no. 2712953
  misc_feature: MA Experiment ID: 20000173 Result: Down-regulated in Transcription
  misc_feature: MA Experiment 20000173 PARAMETER Experiment Name: At_42deg_Heat_P Parameter: Age (day) Value: 14
  misc_feature: MA Experiment 20000173 PARAMETER Experiment Name: At_42deg_Heat_P Parameter: Organism Value: A. thaliana
  misc_feature: MA Experiment 20000173 PARAMETER Experiment Name: At_42deg_Heat_P Parameter: Plant Line Value: WS
  misc_feature: MA Experiment 20000173 PARAMETER Experiment Name: At_42deg_Heat_P Parameter: Temperature (deg C) Value: 42 vs. 22
  misc_feature: MA Experiment 20000173 PARAMETER Experiment Name: At_42deg_Heat_P Parameter: Timepoint (hr) Value: 6
  misc_feature: MA Experiment 20000173 PARAMETER Experiment Name: At_42deg_Heat_P Parameter: Tissue Value: Aerial
  misc_feature: MA Experiment ID: 20000436 Result: Down-regulated in Transcription
  misc_feature: MA Experiment 20000436 PARAMETER Experiment Name: At_Drought_P Parameter: Age (day) Value: 7
  misc_feature: MA Experiment 20000436 PARAMETER Experiment Name: At_Drought_P Parameter: Organism Value: A. thaliana
  misc_feature: MA Experiment 20000436 PARAMETER Experiment Name: At_Drought_P Parameter: Plant Line Value: WS
  misc_feature: MA Experiment 20000436 PARAMETER Experiment Name: At_Drought_P Parameter: Timepoint (hr) Value: 12
  misc_feature: MA Experiment 20000436 PARAMETER Experiment Name: At_Drought_P Parameter: Tissue Value: Whole Plant
  misc_feature: MA Experiment 20000436 PARAMETER Experiment Name: At_Drought_P Parameter: Treatment Value: Drought vs. No Drought
  misc_feature: MA Experiment ID: 20000437 Result: Down-regulated in Transcription
  misc_feature: MA Experiment 20000437 PARAMETER Experiment Name: At_Drought_P Parameter: Age (day) Value: 8
  misc_feature: MA Experiment 20000437 PARAMETER Experiment Name: At_Drought_P Parameter: Organism Value: A. thaliana
  misc_feature: MA Experiment 20000437 PARAMETER Experiment Name: At_Drought_P Parameter: Plant Line Value: WS
  misc_feature: MA Experiment 20000437 PARAMETER Experiment Name: At_Drought_P Parameter: Timepoint (hr) Value: 24
  misc_feature: MA Experiment 20000437 PARAMETER Experiment Name: At_Drought_P Parameter: Tissue Value: Whole Plant
  misc_feature: MA Experiment 20000437 PARAMETER Experiment Name: At_Drought_P Parameter: Treatment Value: Drought vs. No Drought
  misc_feature: MA Experiment ID: 20000451 Result: Down-regulated in Transcription
  misc_feature: MA Experiment 20000451 PARAMETER Experiment Name: At_CS6879_Shoots-Roots_P Parameter: Age (day) Value: 14
  misc_feature: MA Experiment 20000451 PARAMETER Experiment Name: At_CS6879_Shoots-Roots_P Parameter: Organism Value: A. thaliana
  misc_feature: MA Experiment 20000451 PARAMETER Experiment Name: At_CS6879_Shoots-Roots_P Parameter: Plant Line Value: CS6879 vs. WS
  misc_feature: MA Experiment 20000451 PARAMETER Experiment Name: At_CS6879_Shoots-Roots_P Parameter: Tissue Value: Roots
  misc_feature: MA Experiment ID: 20000453 Result: Down-regulated in Transcription
  misc_feature: MA Experiment 20000453 PARAMETER Experiment Name: At_100uM_ABA_P Parameter: Age (day) Value: 15
  misc_feature: MA Experiment 20000453 PARAMETER Experiment Name: At_100uM_ABA_P Parameter: Organism Value: A. thaliana
  misc_feature: MA Experiment 20000453 PARAMETER Experiment Name: At_100uM_ABA_P Parameter: Plant Line Value: WS
  misc_feature: MA Experiment 20000453 PARAMETER Experiment Name: At_100uM_ABA_P Parameter: Timepoint (hr) Value: 24
  misc_feature: MA Experiment 20000453 PARAMETER Experiment Name: At_100uM_ABA_P Parameter: Tissue Value: Aerial
  misc_feature: MA Experiment 20000453 PARAMETER Experiment Name: At_100uM_ABA_P Parameter: Treatment Value: 100uM ABA vs. No Treatment
  misc_feature: MA Experiment ID: 20000527 Result: Down-regulated in Transcription
  misc_feature: MA Experiment 20000527 PARAMETER Experiment Name: At_10percent_PEG_P Parameter: Age (day) Value: 20
  misc_feature: MA Experiment 20000527 PARAMETER Experiment Name: At_10percent_PEG_P Parameter: Organism Value: A. thaliana
  misc_feature: MA Experiment 20000527 PARAMETER Experiment Name: At_10percent_PEG_P Parameter: Plant Line Value: WS
  misc_feature: MA Experiment 20000527 PARAMETER Experiment Name: At_10percent_PEG_P Parameter: Timepoint (day) Value: 20
  misc_feature: MA Experiment 20000527 PARAMETER Experiment Name: At_10percent_PEG_P Parameter: Tissue Value: Whole Plant
  misc_feature: MA Experiment 20000527 PARAMETER Experiment Name: At_10percent_PEG_P Parameter: Treatment Value: 10percent PEG vs. No Treatment
  misc_feature: MA Experiment ID: 20000573 Result: Down-regulated in Transcription
  misc_feature: MA Experiment 20000573 PARAMETER Experiment Name: At_100uM_ABA_Mutants__P Parameter: Organism Value: A. thaliana
  misc_feature: MA Experiment 20000573 PARAMETER Experiment Name: At_100uM_ABA_Mutants__P Parameter: Plant Line Value: CS22 vs. Ler wt
  misc_feature: MA Experiment 20000573 PARAMETER Experiment Name: At_100uM_ABA_Mutants__P Parameter: Timepoint (hr) Value: N/A
  misc_feature: MA Experiment 20000573 PARAMETER Experiment Name: At_100uM_ABA_Mutants__P Parameter: Tissue Value: Whole Plant
  misc_feature: MA Experiment 20000573 PARAMETER Experiment Name: At_100uM_ABA_Mutants__P Parameter: Treatment Value: None
  misc_feature: MA Experiment ID: 20000574 Result: Down-regulated in Transcription
  misc_feature: MA Experiment 20000574 PARAMETER Experiment Name: At_100uM_ABA_Mutants__P Parameter: Organism Value: A. thaliana
  misc_feature: MA Experiment 20000574 PARAMETER Experiment Name: At_100uM_ABA_Mutants__P Parameter: Plant Line Value: CS23 vs. Ler wt
  misc_feature: MA Experiment 20000574 PARAMETER Experiment Name: At_100uM_ABA_Mutants__P Parameter: Timepoint (hr) Value: N/A
  misc_feature: MA Experiment 20000574 PARAMETER Experiment Name: At_100uM_ABA_Mutants__P Parameter: Tissue Value: Whole Plant
  misc_feature: MA Experiment 20000574 PARAMETER Experiment Name: At_100uM_ABA_Mutants__P Parameter: Treatment Value: None
  misc_feature: MA Experiment ID: 20000709 Result: Up-regulated in Transcription
  misc_feature: MA Experiment 20000709 PARAMETER Experiment Name: At_15mM_NH4NO3_L-to-H_P Parameter: Age (hr) Value: 14
  misc_feature: MA Experiment 20000709 PARAMETER Experiment Name: At_15mM_NH4NO3_L-to-H_P Parameter: Organism Value: A. thaliana
  misc_feature: MA Experiment 20000709 PARAMETER Experiment Name: At_15mM_NH4NO3_L-to-H_P Parameter: Plant Line Value: WS
  misc_feature: MA Experiment 20000709 PARAMETER Experiment Name: At_15mM_NH4NO3_L-to-H_P Parameter: Timepoint (hr) Value: 4
  misc_feature: MA Experiment 20000709 PARAMETER Experiment Name: At_15mM_NH4NO3_L-to-H_P Parameter: Tissue Value: Aerial
  misc_feature: MA Experiment 20000709 PARAMETER Experiment Name: At_15mM_NH4NO3_L-to-H_P Parameter: Treatment Value: 15mM NH4NO3 vs. 30mM Mannitol
  misc_feature: MA Experiment ID: 20001247 Result: Down-regulated in Transcription
  misc_feature: MA Experiment 20001247 PARAMETER Experiment Name: At_Far-red-induction_P Parameter: Age (day) Value: 7
  misc_feature: MA Experiment 20001247 PARAMETER Experiment Name: At_Far-red-induction_P Parameter: Light Value: Far-red vs. White
  misc_feature: MA Experiment 20001247 PARAMETER Experiment Name: At_Far-red-induction_P Parameter: Organism Value: A. thaliana
  misc_feature: MA Experiment 20001247 PARAMETER Experiment Name: At_Far-red-induction_P Parameter: Plant Line Value: Columbia
  misc_feature: MA Experiment 20001247 PARAMETER Experiment Name: At_Far-red-induction_P Parameter: Timepoint (hr) Value: 1
  misc_feature: MA Experiment 20001247 PARAMETER Experiment Name: At_Far-red-induction_P Parameter: Tissue Value: Whole Plant
  misc_feature: MA Experiment ID: 20001248 Result: Down-regulated in Transcription
  misc_feature: MA Experiment 20001248 PARAMETER Experiment Name: At_Far-red-induction_P Parameter: Age (day) Value: 7
  misc_feature: MA Experiment 20001248 PARAMETER Experiment Name: At_Far-red-induction_P Parameter: Light Value: Far-red vs. White
  misc_feature: MA Experiment 20001248 PARAMETER Experiment Name: At_Far-red-induction_P Parameter: Organism Value: A. thaliana
  misc_feature: MA Experiment 20001248 PARAMETER Experiment Name: At_Far-red-induction_P Parameter: Plant Line Value: Columbia
  misc_feature: MA Experiment 20001248 PARAMETER Experiment Name: At_Far-red-induction_P Parameter: Timepoint (hr) Value: 4
  misc_feature: MA Experiment 20001248 PARAMETER Experiment Name: At_Far-red-induction_P Parameter: Tissue Value: Whole Plant
  misc_feature: MA Experiment ID: 20001450 Result: Down-regulated in Transcription
  misc_feature: MA Experiment 20001450 PARAMETER Experiment Name: At_Far-red-induction_P Parameter: Age (day) Value: 7
  misc_feature: MA Experiment 20001450 PARAMETER Experiment Name: At_Far-red-induction_P Parameter: Light Value: Far-red vs. White
  misc_feature: MA Experiment 20001450 PARAMETER Experiment Name: At_Far-red-induction_P Parameter: Organism Value: A. thaliana
  misc_feature: MA Experiment 20001450 PARAMETER Experiment Name: At_Far-red-induction_P Parameter: Plant Line Value: Columbia
  misc_feature: MA Experiment 20001450 PARAMETER Experiment Name: At_Far-red-induction_P Parameter: Timepoint (hr) Value: 8
  misc_feature: MA Experiment 20001450 PARAMETER Experiment Name: At_Far-red-induction_P Parameter: Tissue Value: Whole Plant
  misc_feature: MA Experiment ID: 20001451 Result: Down-regulated in Transcription
  misc_feature: MA Experiment 20001451 PARAMETER Experiment Name: At_Far-red-induction_P Parameter: Age (day) Value: 7
  misc_feature: MA Experiment 20001451 PARAMETER Experiment Name: At_Far-red-induction_P Parameter: Light Value: Far-red vs. White
  misc_feature: MA Experiment 20001451 PARAMETER Experiment Name: At_Far-red-induction_P Parameter: Organism Value: A. thaliana
  misc_feature: MA Experiment 20001451 PARAMETER Experiment Name: At_Far-red-induction_P Parameter: Plant Line Value: Columbia
  misc_feature: MA Experiment 20001451 PARAMETER Experiment Name: At_Far-red-induction_P Parameter: Timepoint (hr) Value: 24
  misc_feature: MA Experiment 20001451 PARAMETER Experiment Name: At_Far-red-induction_P Parameter: Tissue Value: Whole Plant
  misc_feature: MA Experiment ID: 20001504 Result: Down-regulated in Transcription
  misc_feature: MA Experiment 20001504 PARAMETER Experiment Name: At_Far-red-enriched_P Parameter: Age (day) Value: 10
  misc_feature: MA Experiment 20001504 PARAMETER Experiment Name: At_Far-red-enriched_P Parameter: Light Value: Far-red enriched vs. White
  misc_feature: MA Experiment 20001504 PARAMETER Experiment Name: At_Far-red-enriched_P Parameter: Organism Value: A. thaliana
  misc_feature: MA Experiment 20001504 PARAMETER Experiment Name: At_Far-red-enriched_P Parameter: Plant Line Value: Columbia
  misc_feature: MA Experiment 20001504 PARAMETER Experiment Name: At_Far-red-enriched_P Parameter: Timepoint (day) Value: 6
  misc_feature: MA Experiment 20001504 PARAMETER Experiment Name: At_Far-red-enriched_P Parameter: Tissue Value: Whole Plant
  misc_feature: MA Experiment ID: 20001770 Result: Down-regulated in Transcription
  misc_feature: MA Experiment 20001770 PARAMETER Experiment Name: At_Far-red-enriched-adult_P Parameter: Age (day) Value: 28
  misc_feature: MA Experiment 20001770 PARAMETER Experiment Name: At_Far-red-enriched-adult_P Parameter: Light Value: Far-red enriched vs. White
  misc_feature: MA Experiment 20001770 PARAMETER Experiment Name: At_Far-red-enriched-adult_P Parameter: Organism Value: A. thaliana
  misc_feature: MA Experiment 20001770 PARAMETER Experiment Name: At_Far-red-enriched-adult_P Parameter: Plant Line Value: Columbia
  misc_feature: MA Experiment 20001770 PARAMETER Experiment Name: At_Far-red-enriched-adult_P Parameter: Timepoint (hr) Value: 8
  misc_feature: MA Experiment 20001770 PARAMETER Experiment Name: At_Far-red-enriched-adult_P Parameter: Tissue Value: Aerial
  misc_feature: MA Experiment ID: 20001771 Result: Down-regulated in Transcription
  misc_feature: MA Experiment 20001771 PARAMETER Experiment Name: At_Far-red-enriched-adult_P Parameter: Age (day) Value: 28
  misc_feature: MA Experiment 20001771 PARAMETER Experiment Name: At_Far-red-enriched-adult_P Parameter: Light Value: Far-red enriched vs. White
  misc_feature: MA Experiment 20001771 PARAMETER Experiment Name: At_Far-red-enriched-adult_P Parameter: Organism Value: A. thaliana
  misc_feature: MA Experiment 20001771 PARAMETER Experiment Name: At_Far-red-enriched-adult_P Parameter: Plant Line Value: Columbia
  misc_feature: MA Experiment 20001771 PARAMETER Experiment Name: At_Far-red-enriched-adult_P Parameter: Timepoint (hr) Value: 16
  misc_feature: MA Experiment 20001771 PARAMETER Experiment Name: At_Far-red-enriched-adult_P Parameter: Tissue Value: Aerial
atggatgaatatgtagaggatgaacacgaattcagctacgaatggaaccaagagaacgggccagcgaaatggggaaagctaagaccggaatggaaaatgtgcggaaaaggagaaatgcaatcgcctattgatcttatgaacaaaagagttagacttgttactcatcttaaaaagcttactagacactacaaaccttgtaacgccactctcaaaaatagaggccatgatatgatgctgaaatttggagaagaagggtcagggagtattacggtcaatggaactgagtataaactcttacagcttcattggcattctccctctgaacatactatgaatggaagaaggtttgctctcgagctacacatggttcacgaaaacattaacggaagtttggctgtagtcacagtcctctacaaaatcggaaggccagattcttttctcggattgctggaaaataaattgtcggcaattacagatcaaaatgaggcggagaaatatgtagatgtgattgacccaagggatattaagattgggagcagaaaattttatagatacattggatcacttactactcctccttgtacgcaaaatgttatttggaccgtcgttaaaaaggtaaggactgtgacgaaaaaccaagtgaagctactcagagtggcggttcacgataattcagacacaaatgcgagaccagttcaacctacaaataagcgcgtggtaaagttatacaaaccaaaatcactatga

SEQ ID NO: 70591 - protein, 248 aa, Arabidopsis thaliana
  peptide (1)..(248): Ceres Seq. ID no. 2712954
  misc_feature (15)..(244): Pfam Name: Eukaryotic-type carbonic anhydrase Pfam Description: Eukaryotic-type carbonic anhydrase
  misc_feature (1)..(248): Homolog of NCBI NO: 25291473 NR Description: probable carbonic anhydrase [imported] - thaliana >gi|4803960|gb|AAD29832.1| putative carbonic anhydrase
  misc_feature (1)..(208): Homolog of NCBI NO: 30683808 NR Description: carbonic anhydrase -related [Arabidopsis thaliana]
  misc_feature (5)..(245): Homolog of NCBI NO: 15223122 NR Description: storage protein, putative; protein id: [Arabidopsis thaliana] >gi|21689637|gb|AAM67440.1| putative
  misc_feature (5)..(245): Homolog of NCBI NO: 25407021 NR Description: protein T6D22.16 [imported] - Arabidopsis >gi|8778838|gb|AAF79837.1|AC026875_17 T6D22.16 [Arabidopsis
  misc_feature (5)..(245): Homolog of NCBI NO: 15223097 NR Description: carbonic anhydrase, putative; protein id:
  misc_feature (5)..(240): Homolog of NCBI NO: 29468280 NR Description: nectarin III [Nicotiana langsdorffii x Nicotiana
  misc_feature (5)..(245): Homolog of NCBI NO: 15233471 NR Description: carbonic anhydrase -like protein; protein id:
  misc_feature (5)..(126): Homolog of NCBI NO: 25407019 NR Description: protein T6D22.14 [imported] - Arabidopsis >gi|8778840|gb|AAF79839.1|AC026875_19 T6D22.14 [Arabidopsis
  misc_feature (154)..(245): Homolog of NCBI NO: 25407019 NR Description: protein T6D22.14 [imported] - Arabidopsis >gi|8778840|gb|AAF79839.1|AC026875_19 T6D22.14 [Arabidopsis
  misc_feature (5)..(177): Homolog of NCBI NO: 15241186 NR Description: putative protein; protein id: At5g56330.1 thaliana] >gi|10177831|dbj|BAB11260.1| contains similarity to
MDEYVEDEHEFSYEWNQENGPAKWGKLRPEWKMCGKGEMQSPIDLMNKRVRLVTHLKKLTRHYKPCNATLKNRGHDMMLKFGEEGSGSITVNGTEYKLLQLHWHSPSEHTMNGRRFALELHMVHENINGSLAVVTVLYKIGRPDSFLGLLENKLSAITDQNEAEKYVDVIDPRDIKIGSRKFYRYIGSLTTPPCTQNVIWTVVKKVRTVTKNQVKLLRVAVHDNSDTNARPVQPTNKRVVKLYKPKSL

SEQ ID NO: 70592 - protein, 216 aa, Arabidopsis thaliana
  peptide (1)..(216): Ceres Seq. ID no. 2712955
  misc_feature (1)..(212): Pfam Name: Eukaryotic-type carbonic anhydrase Pfam Description: Eukaryotic-type carbonic anhydrase
  misc_feature (1)..(145): Homolog of NCBI NO: 15241186 NR Description: putative protein; protein id: At5g56330.1 thaliana] >gi|10177831|dbj|BAB11260.1| contains similarity to
  misc_feature (1)..(216): Homolog of NCBI NO: 25291473 NR Description: probable carbonic anhydrase [imported] - thaliana >gi|4803960|gb|AAD29832.1| putative carbonic anhydrase
  misc_feature (1)..(176): Homolog of NCBI NO: 30683808 NR Description: carbonic anhydrase -related [Arabidopsis thaliana]
  misc_feature (1)..(213): Homolog of NCBI NO: 15223122 NR Description: storage protein, putative; protein id: [Arabidopsis thaliana] >gi|21689637|gb|AAM67440.1| putative
  misc_feature (1)..(213): Homolog of NCBI NO: 25407021 NR Description: protein T6D22.16 [imported] - Arabidopsis >gi|8778838|gb|AAF79837.1|AC026875_17 T6D22.16 [Arabidopsis
  misc_feature (1)..(213): Homolog of NCBI NO: 15223097 NR Description: carbonic anhydrase, putative; protein id:
  misc_feature (1)..(208): Homolog of NCBI NO: 29468280 NR Description: nectarin III [Nicotiana langsdorffii x Nicotiana
  misc_feature (1)..(213): Homolog of NCBI NO: 15233471 NR Description: carbonic anhydrase -like protein; protein id:
  misc_feature (1)..(94): Homolog of NCBI NO: 25407019 NR Description: protein T6D22.14 [imported] - Arabidopsis >gi|8778840|gb|AAF79839.1|AC026875_19 T6D22.14 [Arabidopsis
  misc_feature (122)..(213): Homolog of NCBI NO: 25407019 NR Description: protein T6D22.14 [imported] - Arabidopsis >gi|8778840|gb|AAF79839.1|AC026875_19 T6D22.14 [Arabidopsis
MCGKGEMQSPIDLMNKRVRLVTHLKKLTRHYKPCNATLKNRGHDMMLKFGEEGSGSITVNGTEYKLLQLHWHSPSEHTMNGRRFALELHMVHENINGSLAVVTVLYKIGRPDSFLGLLENKLSAITDQNEAEKYVDVIDPRDIKIGSRKFYRYIGSLTTPPCTQNVIWTVVKKVRTVTKNQVKLLRVAVHDNSDTNARPVQPTNKRVVKLYKPKSL

SEQ ID NO: 70593 - protein, 210 aa, Arabidopsis thaliana
  peptide (1)..(210): Ceres Seq. ID no. 2712956
  misc_feature (1)..(206): Pfam Name: Eukaryotic-type carbonic anhydrase Pfam Description: Eukaryotic-type carbonic anhydrase
  misc_feature (1)..(210): Homolog of NCBI NO: 25291473 NR Description: probable carbonic anhydrase [imported] - thaliana >gi|4803960|gb|AAD29832.1| putative carbonic anhydrase
  misc_feature (1)..(170): Homolog of NCBI NO: 30683808 NR Description: carbonic anhydrase -related [Arabidopsis thaliana]
  misc_feature (1)..(207): Homolog of NCBI NO: 15223122 NR Description: storage protein, putative; protein id: [Arabidopsis thaliana] >gi|21689637|gb|AAM67440.1| putative
  misc_feature (1)..(207): Homolog of NCBI NO: 25407021 NR Description: protein T6D22.16 [imported] - Arabidopsis >gi|8778838|gb|AAF79837.1|AC026875_17 T6D22.16 [Arabidopsis
  misc_feature (1)..(207): Homolog of NCBI NO: 15223097 NR Description: carbonic anhydrase, putative; protein id:
  misc_feature (1)..(202): Homolog of NCBI NO: 29468280 NR Description: nectarin III [Nicotiana langsdorffii x Nicotiana
  misc_feature (1)..(207): Homolog of NCBI NO: 15233471 NR Description: carbonic anhydrase -like protein; protein id:
  misc_feature (1)..(88): Homolog of NCBI NO: 25407019 NR Description: protein T6D22.14 [imported] - Arabidopsis >gi|8778840|gb|AAF79839.1|AC026875_19 T6D22.14 [Arabidopsis
  misc_feature (116)..(207): Homolog of NCBI NO: 25407019 NR Description: protein T6D22.14 [imported] - Arabidopsis >gi|8778840|gb|AAF79839.1|AC026875_19 T6D22.14 [Arabidopsis
  misc_feature (1)..(139): Homolog of NCBI NO: 15241186 NR Description: putative protein; protein id: At5g56330.1 thaliana] >gi|10177831|dbj|BAB11260.1| contains similarity to
MQSPIDLMNKRVRLVTHLKKLTRHYKPCNATLKNRGHDMMLKFGEEGSGSITVNGTEYKLLQLHWHSPSEHTMNGRRFALELHMVHENINGSLAVVTVLYKIGRPDSFLGLLENKLSAITDQNEAEKYVDVIDPRDIKIGSRKFYRYIGSLTTPPCTQNVIWTVVKKVRTVTKNQVKLLRVAVHDNSDTNARPVQPTNKRVVKLYKPKSL

SEQ ID NO: 70594 - DNA, 642 bp, Arabidopsis thaliana
  misc_feature (1)..(642): Ceres Seq. ID no. 2713101
  misc_feature: MA Experiment ID: 20000315 Result: Down-regulated in Transcription
  misc_feature: MA Experiment 20000315 PARAMETER Experiment Name: At_14day_Shoots-Roots_Sub_P Parameter: Age (day) Value: 14
  misc_feature: MA Experiment 20000315 PARAMETER Experiment Name: At_14day_Shoots-Roots_Sub_P Parameter: Organism Value: A. thaliana
  misc_feature: MA Experiment 20000315 PARAMETER Experiment Name: At_14day_Shoots-Roots_Sub_P Parameter: Plant Line Value: WS
  misc_feature: MA Experiment 20000315 PARAMETER Experiment Name: At_14day_Shoots-Roots_Sub_P Parameter: Tissue Value: Shoots vs. Whole Plant
  misc_feature: MA Experiment ID: 20000440 Result: Up-regulated in Transcription
  misc_feature: MA Experiment 20000440 PARAMETER Experiment Name: At_Closed-Flower__Sub_P Parameter: Tissue Value: Closed Flower vs. Whole Plant
atgggcgacgaacactctctcatcccaaagcaaattggtgttgtccctagtgctggattcttgaatgttgaagtgtttgagagaccttgtcctgagcctaacattcaaccttgggacattccttatgttcactatcctaaacctaagacctatagcagctcgaacggggagatcttttcggttaaagataggagggctaatgtgtcgaccatttttgagacgttggacaaagtatataatttagattggttgagtagtgcttctaagaacgagtgtacatctgctgttggtttgaaatggatgcttaatcaggctgagatattggcgcgctacaaaccattgatcaacacgagtcttttgatacctgatctgaagcaggttcaagagatgacttcaaaagcacttgcttactttaacaccacgcggcatatcttcctctactacgaagatgttgtcaagaaccgcaccaaactagacgatgtacaagagtttctgaaggtcccgaaactagatttaaagagtaggcaagtgaagattcatcatggtccgttgtcacaacacgtacaaaattgggaagaggtgcaaaagacactgaaagggaccggtttcgaaaactttctacttgaagattaccgcaggtga

SEQ ID NO: 70595 - protein, 213 aa, Arabidopsis thaliana
  peptide (1)..(213): Ceres Seq. ID no. 2713102
  misc_feature (1)..(213): Homolog of NCBI NO: 25411661 NR Description: hypothetical protein At2g15730 [imported] - thaliana >gi|4335739|gb|AAD17417.1| hypothetical protein
  misc_feature (6)..(213): Homolog of NCBI NO: 30679514 NR Description: expressed protein [Arabidopsis thaliana]
  misc_feature (104)..(213): Homolog of NCBI NO: 40823013 NR Description: At2g15730 [Arabidopsis thaliana]
  misc_feature (50)..(115): Homolog of NCBI NO: 40823013 NR Description: At2g15730 [Arabidopsis thaliana]
  misc_feature (6)..(75): Homolog of NCBI NO: 40823013 NR Description: At2g15730 [Arabidopsis thaliana]
  misc_feature (104)..(211): Homolog of NCBI NO: 22329158 NR Description: hypothetical protein; protein id: At4g34420.1
  misc_feature (50)..(115): Homolog of NCBI NO: 22329158 NR Description: hypothetical protein; protein id: At4g34420.1
  misc_feature (6)..(75): Homolog of NCBI NO: 22329158 NR Description: hypothetical protein; protein id: At4g34420.1
  misc_feature (104)..(212): Homolog of NCBI NO: 29824462 NR Description: unknown protein [Oryza sativa (japonica
  misc_feature (53)..(104): Homolog of NCBI NO: 29824462 NR Description: unknown protein [Oryza sativa (japonica
MGDEHSLIPKQIGVVPSAGFLNVEVFERPCPEPNIQPWDIPYVHYPKPKTYSSSNGEIFSVKDRRANVSTIFETLDKVYNLDWLSSASKNECTSAVGLKWMLNQAEILARYKPLINTSLLIPDLKQVQEMTSKALAYFNTTRHIFLYYEDVVKNRTKLDDVQEFLKVPKLDLKSRQVKIHHGPLSQHVQNWEEVQKTLKGTGFENFLLEDYRR

SEQ ID NO: 70596 - protein, 113 aa, Arabidopsis thaliana
  peptide (1)..(113): Ceres Seq. ID no. 2713103
  misc_feature (1)..(113): Homolog of NCBI NO: 25411661 NR Description: hypothetical protein At2g15730 [imported] - thaliana >gi|4335739|gb|AAD17417.1| hypothetical protein
  misc_feature (1)..(113): Homolog of NCBI NO: 30679514 NR Description: expressed protein [Arabidopsis thaliana]
  misc_feature (4)..(113): Homolog of NCBI NO: 40823013 NR Description: At2g15730 [Arabidopsis thaliana]
  misc_feature (1)..(15): Homolog of NCBI NO: 40823013 NR Description: At2g15730 [Arabidopsis thaliana]
  misc_feature (4)..(111): Homolog of NCBI NO: 22329158 NR Description: hypothetical protein; protein id: At4g34420.1
  misc_feature (1)..(15): Homolog of NCBI NO: 22329158 NR Description: hypothetical protein; protein id: At4g34420.1
  misc_feature (4)..(112): Homolog of NCBI NO: 29824462 NR Description: unknown protein [Oryza sativa (japonica
  misc_feature (4)..(113): Homolog of NCBI NO: 34904786 NR Description: contains ESTs to Arabidopsis thaliana chromosome3,At3g50620~unknown protein
  misc_feature (4)..(113): Homolog of NCBI NO: 33146729 NR Description: unknown protein [Oryza sativa (japonica
  misc_feature (1)..(69): Homolog of NCBI NO: 7485320 NR Description: hypothetical protein F10M10.190 - Arabidopsis >gi|4455187|emb|CAB36719.1| hypothetical protein [Arabidopsis >gi|7270392|emb|CAB80159.1| hypothetical protein [Arabidopsis
MLNQAEILARYKPLINTSLLIPDLKQVQEMTSKALAYFNTTRHIFLYYEDVVKNRTKLDDVQEFLKVPKLDLKSRQVKIHHGPLSQHVQNWEEVQKTLKGTGFENFLLEDYRR

SEQ ID NO: 70597 - DNA, 1215 bp, Arabidopsis thaliana
  misc_feature (1)..(1215): Ceres Seq. ID no. 2713290
  misc_feature: MA Experiment ID: 20000173 Result: Down-regulated in Transcription
  misc_feature: MA Experiment 20000173 PARAMETER Experiment Name: At_42deg_Heat_P Parameter: Age (day) Value: 14
  misc_feature: MA Experiment 20000173 PARAMETER Experiment Name: At_42deg_Heat_P Parameter: Organism Value: A. thaliana
  misc_feature: MA Experiment 20000173 PARAMETER Experiment Name: At_42deg_Heat_P Parameter: Plant Line Value: WS
  misc_feature: MA Experiment 20000173 PARAMETER Experiment Name: At_42deg_Heat_P Parameter: Temperature (deg C) Value: 42 vs. 22
  misc_feature: MA Experiment 20000173 PARAMETER Experiment Name: At_42deg_Heat_P Parameter: Timepoint (hr) Value: 6
  misc_feature: MA Experiment 20000173 PARAMETER Experiment Name: At_42deg_Heat_P Parameter: Tissue Value: Aerial
  misc_feature: MA Experiment ID: 20000180 Result: Up-regulated in Transcription
  misc_feature: MA Experiment 20000180 PARAMETER Experiment Name: At_Germinating_Seeds_P Parameter: Age (hr) Value: 24 vs. 0
  misc_feature: MA Experiment 20000180 PARAMETER Experiment Name: At_Germinating_Seeds_P Parameter: Tissue Value: Germinating Seeds
  misc_feature: MA Experiment ID: 20000437 Result: Down-regulated in Transcription
  misc_feature: MA Experiment 20000437 PARAMETER Experiment Name: At_Drought_P Parameter: Age (day) Value: 8
  misc_feature: MA Experiment 20000437 PARAMETER Experiment Name: At_Drought_P Parameter: Organism Value: A. thaliana
  misc_feature: MA Experiment 20000437 PARAMETER Experiment Name: At_Drought_P Parameter: Plant Line Value: WS
  misc_feature: MA Experiment 20000437 PARAMETER Experiment Name: At_Drought_P Parameter: Timepoint (hr) Value: 24
  misc_feature: MA Experiment 20000437 PARAMETER Experiment Name: At_Drought_P Parameter: Tissue Value: Whole Plant
  misc_feature: MA Experiment 20000437 PARAMETER Experiment Name: At_Drought_P Parameter: Treatment Value: Drought vs. No Drought
  misc_feature: MA Experiment ID: 20000794 Result: Down-regulated in Transcription
  misc_feature: MA Experiment 20000794 PARAMETER Experiment Name: At_Petals_P Parameter: Age (day) Value: 23-25 days
  misc_feature: MA Experiment 20000794 PARAMETER Experiment Name: At_Petals_P Parameter: Plant Line Value: WS
  misc_feature: MA Experiment 20000794 PARAMETER Experiment Name: At_Petals_P Parameter: Tissue Value: Petals vs. Whole plant
  misc_feature: MA Experiment ID: 20001911 Result: Down-regulated in Transcription
  misc_feature: MA Experiment 20001911 PARAMETER Experiment Name: At_Drought_Reproduction_P Parameter: Age (day) Value: 40
  misc_feature: MA Experiment 20001911 PARAMETER Experiment Name: At_Drought_Reproduction_P Parameter: Organism Value: A. thaliana
  misc_feature: MA Experiment 20001911 PARAMETER Experiment Name: At_Drought_Reproduction_P Parameter: Plant Line Value: WS
  misc_feature: MA Experiment 20001911 PARAMETER Experiment Name: At_Drought_Reproduction_P Parameter: Timepoint (day) Value: 10
  misc_feature: MA Experiment 20001911 PARAMETER Experiment Name: At_Drought_Reproduction_P Parameter: Tissue Value: Flowers
  misc_feature: MA Experiment 20001911 PARAMETER Experiment Name: At_Drought_Reproduction_P Parameter: Treatment Value: Drought vs. No Drought
  misc_feature: Pfam Name: TPX2 Pfam Description: Targeting protein for Xklp2 (TPX2)
atggactctgaaagcgtcgtagctgctgacggtgcggattgtgctattgcaaatggtgaagtgacaatggaaggagacagtagtaatggaaatggtggtacttcagagaatttggaatgttgttctactcagcatcctatggaggcatctgagggcacacagaatgaacaagtggatgattcaaaacagatgagaggacaaaaggtgcaaggaagggtcaagcatgagaagacctctggaggcaagaatattccatcagtcttggtgaagaagaaaaaagatgggaaagtggtggcatcaaatggttctgttgctccaaacgtaaagcctgtaaagtctcctaagagcaaatcgctcaatggtagagaggctcatgtcacgaagcatgggaaccatgactctctaccagctgaagggaccagggacaagccaaaactgagggaaacaaggaaacaagtcaatgatacatctgaagatgatacacagtatagtccaaaagaagatgatggcaaacctcgtcgagctagtgcacttccaaattatggattcagttttagatgtgaccaacgagctgaaaaaagaagagagttctattcaaagcttgaggaaaagatccatgcgaaagaagaagaaaagaataccgtacaagctaagtccaaggaaactcaagaagctgagcttaagatgctaaggaagagtctgaacttcaaagccacacctatgcctaccttctatcaagaacctcagctacctaaaacagagttaaagaagatagcgataacaagaccaaaatctccaaaactcgggcggaagaagaccaattctcgagcagattctgaagaagccattactattcaaacccctcgctttggtaggttgagcttagatgagaaaactcctaaagataacccggttgttgaaggaagtgtacccggtgagaccaagaagccaccagtgcgcaagtcacttcccaggttgccttcagaaaagacaaatctgtccaacgggaaggtggctccagcaaaagctgtaacagcctcaacaaaggcaaagtcggaaagaaagaaaccagataaagatgtggatgacctaagccagtcaagtcctgtagacgacaatgctgacccagaagattcacaagaacaagctccaagagtgaatgaagacagaaacgaatctcacatggtagtggaagtggttgcggttgagccttaa

SEQ ID NO: 70598 - protein, 404 aa, Arabidopsis thaliana
  peptide (1)..(404): Ceres Seq. ID no. 2713291
  misc_feature: Pfam Name: TPX2 Pfam Description: Targeting protein for Xklp2 (TPX2)
  misc_feature (1)..(404): Homolog of NCBI NO: 15224733 NR Description: unknown protein; protein id: At2g25480.1
  misc_feature (14)..(403): Homolog of NCBI NO: 18417986 NR Description: putative protein; protein id: At4g32330.1, by cDNA: gi_14334555, supported by cDNA: gi_21280970 [Arabidopsis >gi|14334556|gb|AAK59686.1| unknown protein [Arabidopsis
  misc_feature (50)..(266): Homolog of NCBI NO: 7485356 NR Description: hypothetical protein F10M6.40 - Arabidopsis >gi|2864611|emb|CAA16958.1| putative protein [Arabidopsis
  misc_feature (50)..(266): Homolog of NCBI NO: 7486636 NR Description: hypothetical protein F8B4.30 - Arabidopsis >gi|4049335|emb|CAA22560.1| putative protein [Arabidopsis >gi|7270137|emb|CAB79950.1| putative protein [Arabidopsis
  misc_feature (84)..(360): Homolog of NCBI NO: 18403980 NR Description: expressed protein; protein id: At2g35880.1, by cDNA: gi_16209719 [Arabidopsis thaliana] At2g35880/F11F19.21 [Arabidopsis thaliana]
  misc_feature (96)..(360): Homolog of NCBI NO: 25408425 NR Description: hypothetical protein At2g35880 [imported] -
  misc_feature (99)..(282): Homolog of NCBI NO: 6175167 NR Description: unknown protein [Arabidopsis thaliana]
  misc_feature (99)..(282): Homolog of NCBI NO: 21618286 NR Description: unknown [Arabidopsis thaliana]
  misc_feature (99)..(282): Homolog of NCBI NO: 18396961 NR Description: expressed protein; protein id: At3g04630.1,
  misc_feature (99)..(282): Homolog of NCBI NO: 30679219 NR Description: expressed protein [Arabidopsis thaliana]
MDSESVVAADGADCAIANGEVTMEGDSSNGNGGTSENLECCSTQHPMEASEGTQNEQVDDSKQMRGQKVQGRVKHEKTSGGKNIPSVLVKKKKDGKVVASNGSVAPNVKPVKSPKSKSLNGREAHVTKHGNHDSLPAEGTRDKPKLRETRKQVNDTSEDDTQYSPKEDDGKPRRASALPNYGFSFRCDQRAEKRREFYSKLEEKIHAKEEEKNTVQAKSKETQEAELKMLRKSLNFKATPMPTFYQEPQLPKTELKKIAITRPKSPKLGRKKTNSRADSEEAITIQTPRFGRLSLDEKTPKDNPVVEGSVPGETKKPPVRKSLPRLPSEKTNLSNGKVAPAKAVTASTKAKSERKKPDKDVDDLSQSSPVDDNADPEDSQEQAPRVNEDRNESHMVVEVVAVEP

SEQ ID NO: 70599 - protein, 382 aa, Arabidopsis thaliana
  peptide (1)..(382): Ceres Seq. ID no. 2713292
  misc_feature: Pfam Name: TPX2 Pfam Description: Targeting protein for Xklp2 (TPX2)
  misc_feature (1)..(382): Homolog of NCBI NO: 15224733 NR Description: unknown protein; protein id: At2g25480.1
  misc_feature (1)..(381): Homolog of NCBI NO: 18417986 NR Description: putative protein; protein id: At4g32330.1, by cDNA: gi_14334555, supported by cDNA: gi_21280970 [Arabidopsis >gi|14334556|gb|AAK59686.1| unknown protein [Arabidopsis
  misc_feature (28)..(244): Homolog of NCBI NO: 7485356 NR Description: hypothetical protein F10M6.40 - Arabidopsis >gi|2864611|emb|CAA16958.1| putative protein [Arabidopsis
  misc_feature (28)..(244): Homolog of NCBI NO: 7486636 NR Description: hypothetical protein F8B4.30 - Arabidopsis >gi|4049335|emb|CAA22560.1| putative protein [Arabidopsis >gi|7270137|emb|CAB79950.1| putative protein [Arabidopsis
  misc_feature (62)..(338): Homolog of NCBI NO: 18403980 NR Description: expressed protein; protein id: At2g35880.1, by cDNA: gi_16209719 [Arabidopsis thaliana] At2g35880/F11F19.21 [Arabidopsis thaliana]
  misc_feature (74)..(338): Homolog of NCBI NO: 25408425 NR Description: hypothetical protein At2g35880 [imported] -
  misc_feature (77)..(260): Homolog of NCBI NO: 6175167 NR Description: unknown protein [Arabidopsis thaliana]
  misc_feature (77)..(260): Homolog of NCBI NO: 18396961 NR Description: expressed protein; protein id: At3g04630.1,
  misc_feature (77)..(260): Homolog of NCBI NO: 21618286 NR Description: unknown [Arabidopsis thaliana]
  misc_feature (77)..(260): Homolog of NCBI NO: 30679219 NR Description: expressed protein [Arabidopsis thaliana]
MEGDSSNGNGGTSENLECCSTQHPMEASEGTQNEQVDDSKQMRGQKVQGRVKHEKTSGGKNIPSVLVKKKKDGKVVASNGSVAPNVKPVKSPKSKSLNGREAHVTKHGNHDSLPAEGTRDKPKLRETRKQVNDTSEDDTQYSPKEDDGKPRRASALPNYGFSFRCDQRAEKRREFYSKLEEKIHAKEEEKNTVQAKSKETQEAELKMLRKSLNFKATPMPTFYQEPQLPKTELKKIAITRPKSPKLGRKKTNSRADSEEAITIQTPRFGRLSLDEKTPKDNPVVEGSVPGETKKPPVRKSLPRLPSEKTNLSNGKVAPAKAVTASTKAKSERKKPDKDVDDLSQSSPVDDNADPEDSQEQAPRVNEDRNESHMVVEVVAVEP

SEQ ID NO: 70600 - protein, 358 aa, Arabidopsis thaliana
  peptide (1)..(358): Ceres Seq. ID no. 2713293
  misc_feature: Pfam Name: TPX2 Pfam Description: Targeting protein for Xklp2 (TPX2)
  misc_feature (1)..(358): Homolog of NCBI NO: 15224733 NR Description: unknown protein; protein id: At2g25480.1
  misc_feature (1)..(357): Homolog of NCBI NO: 18417986 NR Description: putative protein; protein id: At4g32330.1, by cDNA: gi_14334555, supported by cDNA: gi_21280970 [Arabidopsis >gi|14334556|gb|AAK59686.1| unknown protein [Arabidopsis
  misc_feature (4)..(220): Homolog of NCBI NO: 7485356 NR Description: hypothetical protein F10M6.40 - Arabidopsis >gi|2864611|emb|CAA16958.1| putative protein [Arabidopsis
  misc_feature (4)..(220): Homolog of NCBI NO: 7486636 NR Description: hypothetical protein F8B4.30 - Arabidopsis >gi|4049335|emb|CAA22560.1| putative protein [Arabidopsis >gi|7270137|emb|CAB79950.1| putative protein [Arabidopsis
  misc_feature (38)..(314): Homolog of NCBI NO: 18403980 NR Description: expressed protein; protein id: At2g35880.1, by cDNA: gi_16209719 [Arabidopsis thaliana] At2g35880/F11F19.21 [Arabidopsis thaliana]
  misc_feature (50)..(314): Homolog of NCBI NO: 25408425 NR Description: hypothetical protein At2g35880 [imported] -
  misc_feature (53)..(236): Homolog of NCBI NO: 6175167 NR Description: unknown protein [Arabidopsis thaliana]
  misc_feature (53)..(236): Homolog of NCBI NO: 21618286 NR Description: unknown [Arabidopsis thaliana]
  misc_feature (53)..(236): Homolog of NCBI NO: 18396961 NR Description: expressed protein; protein id: At3g04630.1,
  misc_feature (53)..(236): Homolog of NCBI NO: 30679219 NR Description: expressed protein [Arabidopsis thaliana]
MEASEGTQNEQVDDSKQMRGQKVQGRVKHEKTSGGKNIPSVLVKKKKDGKVVASNGSVAPNVKPVKSPKSKSLNGREAHVTKHGNHDSLPAEGTRDKPKLRETRKQVNDTSEDDTQYSPKEDDGKPRRASALPNYGFSFRCDQRAEKRREFYSKLEEKIHAKEEEKNTVQAKSKETQEAELKMLRKSLNFKATPMPTFYQEPQLPKTELKKIAITRPKSPKLGRKKTNSRADSEEAITIQTPRFGRLSLDEKTPKDNPVVEGSVPGETKKPPVRKSLPRLPSEKTNLSNGKVAPAKAVTASTKAKSERKKPDKDVDDLSQSSPVDDNADPEDSQEQAPRVNEDRNESHMVVEVVAVEP

SEQ ID NO: 70601 - DNA, 2451 bp, Arabidopsis thaliana
  misc_feature (1)..(2451): Ceres Seq. ID no. 2713369
  misc_feature: MA Experiment ID: 20000264 Result: Up-regulated in Transcription
  misc_feature: MA Experiment 20000264 PARAMETER Experiment Name: At_Open_Flower_P Parameter: Age (day) Value: 21
  misc_feature: MA Experiment 20000264 PARAMETER Experiment Name: At_Open_Flower_P Parameter: Plant Line Value: WS
  misc_feature: MA Experiment 20000264 PARAMETER Experiment Name: At_Open_Flower_P Parameter: Tissue Value: Open Flower vs. Whole Plant
  misc_feature: MA Experiment ID: 20000286 Result: Up-regulated in Transcription
  misc_feature: MA Experiment 20000286 PARAMETER Experiment Name: At_Open_Flower_P Parameter: Age (day) Value: 21
  misc_feature: MA Experiment 20000286 PARAMETER Experiment Name: At_Open_Flower_P Parameter: Plant Line Value: WS
  misc_feature: MA Experiment 20000286 PARAMETER Experiment Name: At_Open_Flower_P Parameter: Tissue Value: Half Open vs. Whole Plant
  misc_feature: MA Experiment ID: 20000794 Result: Up-regulated in Transcription
  misc_feature: MA Experiment 20000794 PARAMETER Experiment Name: At_Petals_P Parameter: Age (day) Value: 23-25 days
  misc_feature: MA Experiment 20000794 PARAMETER Experiment Name: At_Petals_P Parameter: Plant Line Value: WS
  misc_feature: MA Experiment 20000794 PARAMETER Experiment Name: At_Petals_P Parameter: Tissue Value: Petals vs. Whole plant
  misc_feature: MA Experiment ID: 20001910 Result: Up-regulated in Transcription
  misc_feature: MA Experiment 20001910 PARAMETER Experiment Name: At_Drought_Reproduction_P Parameter: Age (day) Value: 37
  misc_feature: MA Experiment 20001910 PARAMETER Experiment Name: At_Drought_Reproduction_P Parameter: Organism Value: A. thaliana
  misc_feature: MA Experiment 20001910 PARAMETER Experiment Name: At_Drought_Reproduction_P Parameter: Plant Line Value: WS
  misc_feature: MA Experiment 20001910 PARAMETER Experiment Name: At_Drought_Reproduction_P Parameter: Timepoint (day) Value: 7
  misc_feature: MA Experiment 20001910 PARAMETER Experiment Name: At_Drought_Reproduction_P Parameter: Tissue Value: Flowers
  misc_feature: MA Experiment 20001910 PARAMETER Experiment Name: At_Drought_Reproduction_P Parameter: Treatment Value: Drought vs. No Drought
atgtggatgccgaaaaacaataacgtgggagtcaaggaaggagggtctagcggagttgtagctgttgcaatagacaaagacaaaagcagccaacacgctcttaaatgggctgttgataatttgttgcagcgaggccaatccgtcattcttgtccacgtcaagcttcgaccttctccattgaataatagcgcttctcttcatgcttcctctgcaaagctgagccaagattcttcattggtatgcagagatccagaaggcatttccaaagaaatatttcttcctttccgttgcttctgcacacgcaaagacattcaatgccaagatgtgttgcttgaggagtccgatgttgccaaagcattggtcgaatacgtaaaccaagcggccattgaggttttagtagttggttcctccagcaaaggtggttttctcaggttcaacaaacctacagatattccaggcagcataacaaaaaacgctcctgatttctgcacggtttatatcatttccaaaggaaagattcaaacaatgagatcagcttctcgttctgcacccatgactgctcctctacgcagttcagttcaaccacctagcttaaagcctcctcaacctatgccttctacttccgctaacagtctgcgagccgatagacggtcttttgagtctaaccaacgaaggtctgtagaagatcaacaacgcaggtctatggaggatcaacaacgcaggtcaatagacgatcaatcagagtccttcagatctccttttacaagaagaggcaatggtagatcatacggagatttaactgttccagaatcagacatatcctttatcagttccggaagaccaagcattgaccgtatcttcccttctctatatgacaacaatgatccaagccgaactcctcctaggctttcaaatttctcagacatggactatagttctagccttgatcagtcttccaactatggaaggagatcagtggatatgaactcacccactgatttcgagagcgaaagattttcatccgcctctcaatcaatagatgatgtagaggctgagatgaggaggcttaaactggagttgaagcagactatggaaatgtatagtacagcttgcaaagaagcactcacagcaaaacaaaaggcgactgagcttcaacgttggaagttagaagaagagagaaaactagaagaagcgagaaatgcagaggaagcagcattagccattgcagagaaagagaaagcaaagtcaaaagcagctatggaggcagctgaagcagctcaaaggattgctgaattagaggctaagaagagagtcaacgcggaaatgaaagctttaaaagagtcagaggagaaaacaaaggctcttaccgctttagcaaactcagatgtcaggtataggaagtactccattgaagatattgagcttgcaacagagtttttcgctgagaaatataagattggagaaggtggttatggacctgtctacaaatgttatcttgatcatacaccagtggctgttaaagttcttcgtcccgatgcagctcaaggaagatcgcaatttcaacaagaggtcgaggtattgagctgcattaggcatccgaacatggttctacttcttggggcttgtccggaatgcggatgtttagtctacgagttcatggctaatgggagcttagaagatcgtcttttcagactaggaaacagtccacctctctcgtggcagatgagatttagaatcgctgcagagataggcactggattgttgttcttgcaccaagctaaacctgagcctcttgttcaccgtgatctcaaaccaggaaacatcttgctagaccgtaacttcgtcagcaagatatctgatgttggtttagctagattggtccctccaacagttgcagacacagtgacacaataccgcatgacttcaaccgctggcacattctgttatatcgacccagagtatcaacaaacaggaatgttgggtgtgaaatcagacatttactcacttggaattatgtttctacagttgataacagcaaaaccaccaatgggtctaactcattatgtcgagagagcactagagaaaggaactttggttgatttactcgatccagttgtttctgattggccaatggaagacactgaagagtttgctaaattagctcttaaatgtgcagagctaaggagaaaagatagacctgatcttgctaaagttattttgcctgagctaaatagattaagaacacttgctgatgaatcatcacattctgtagtagtcggcaatagccctctaccatctccaactggtagccaaagttctttgaaactggtgagaaccactaaaagcgaaaatcgaaactcgaatatattactatactcacctactgatttcttctttactaaccatttgcaggaacatatgagtggtgcttctatctcagtgcctcagtaa

SEQ ID NO: 70602 - protein, 816 aa, Arabidopsis thaliana
  peptide (1)..(816): Ceres Seq. ID no. 2713370
  misc_feature (16)..(169): Pfam Name: Universal stress protein family Pfam Description: Universal stress protein family
  misc_feature (1)..(774): Homolog of NCBI NO: 7487915 NR Description: hypothetical protein YUP8H12R.45 - Arabidopsis >gi|3152590|gb|AAC17071.1| Similar to protein serine/threonine
  misc_feature (1)..(776): Homolog of NCBI NO: 25518361 NR Description: hypothetical protein F17F16.3 [imported] - thaliana >gi|9954729|gb|AAG09082.1|AC026237_3 Similar to protein
  misc_feature (149)..(776): Homolog of NCBI NO: 15219360 NR Description: protein kinase, putative; protein id: At1g16760.1
  misc_feature (15)..(540): Homolog of NCBI NO: 15235878 NR Description: putative protein; protein id: At4g31230.1
  misc_feature (221)..(775): Homolog of NCBI NO: 10178101 NR Description: receptor-like protein kinase [Arabidopsis
  misc_feature (251)..(759): Homolog of NCBI NO: 15239834 NR Description: putative receptor - like kinase; protein id:
  misc_feature (22)..(58): Homolog of NCBI NO: 15239834 NR Description: putative receptor - like kinase; protein id:
  misc_feature (248)..(753): Homolog of NCBI NO: 14719286 NR Description: serine threonine kinase 1 [Zea mays]
  misc_feature (248)..(753): Homolog of NCBI NO: 18092335 NR Description: serine threonine kinase [Zea mays]
  misc_feature (74)..(774): Homolog of NCBI NO: 9293976 NR Description: Ser/Thr protein kinaseroteinase) [Arabidopsis
MWMPKNNNVGVKEGGSSGVVAVAIDKDKSSQHALKWAVDNLLQRGQSVILVHVKLRPSPLNNSASLHASSAKLSQDSSLVCRDPEGISKEIFLPFRCFCTRKDIQCQDVLLEESDVAKALVEYVNQAAIEVLVVGSSSKGGFLRFNKPTDIPGSITKNAPDFCTVYIISKGKIQTMRSASRSAPMTAPLRSSVQPPSLKPPQPMPSTSANSLRADRRSFESNQRRSVEDQQRRSMEDQQRRSIDDQSESFRSPFTRRGNGRSYGDLTVPESDISFISSGRPSIDRIFPSLYDNNDPSRTPPRLSNFSDMDYSSSLDQSSNYGRRSVDMNSPTDFESERFSSASQSIDDVEAEMRRLKLELKQTMEMYSTACKEALTAKQKATELQRWKLEEERKLEEARNAEEAALAIAEKEKAKSKAAMEAAEAAQRIAELEAKKRVNAEMKALKESEEKTKALTALANSDVRYRKYSIEDIELATEFFAEKYKIGEGGYGPVYKCYLDHTPVAVKVLRPDAAQGRSQFQQEVEVLSCIRHPNMVLLLGACPECGCLVYEFMANGSLEDRLFRLGNSPPLSWQMRFRIAAEIGTGLLFLHQAKPEPLVHRDLKPGNILLDRNFVSKISDVGLARLVPPTVADTVTQYRMTSTAGTFCYIDPEYQQTGMLGVKSDIYSLGIMFLQLITAKPPMGLTHYVERALEKGTLVDLLDPVVSDWPMEDTEEFAKLALKCAELRRKDRPDLAKVILPELNRLRTLADESSHSVVVGNSPLPSPTGSQSSLKLVRTTKSENRNSNILLYSPTDFFFTNHLQEHMSGASISVPQ

SEQ ID NO: 70603 - protein, 814 aa, Arabidopsis thaliana
  peptide (1)..(814): Ceres Seq. ID no. 2713371
  misc_feature (14)..(167): Pfam Name: Universal stress protein family Pfam Description: Universal stress protein family
  misc_feature (1)..(772): Homolog of NCBI NO: 7487915 NR Description: hypothetical protein YUP8H12R.45 - Arabidopsis >gi|3152590|gb|AAC17071.1| Similar to protein serine/threonine
  misc_feature (1)..(774): Homolog of NCBI NO: 25518361 NR Description: hypothetical protein F17F16.3 [imported] - thaliana >gi|9954729|gb|AAG09082.1|AC026237_3 Similar to protein
  misc_feature (147)..(774): Homolog of NCBI NO: 15219360 NR Description: protein kinase, putative; protein id: At1g16760.1
  misc_feature (13)..(538): Homolog of NCBI NO: 15235878 NR Description: putative protein; protein id: At4g31230.1
  misc_feature (219)..(773): Homolog of NCBI NO: 10178101 NR Description: receptor-like protein kinase [Arabidopsis
  misc_feature (249)..(757): Homolog of NCBI NO: 15239834 NR Description: putative receptor - like kinase; protein id:
  misc_feature (20)..(56): Homolog of NCBI NO: 15239834 NR Description: putative receptor - like kinase; protein id:
  misc_feature (246)..(751): Homolog of NCBI NO: 14719286 NR Description: serine threonine kinase 1 [Zea mays]
  misc_feature (246)..(751): Homolog of NCBI NO: 18092335 NR Description: serine threonine kinase [Zea mays]
  misc_feature (72)..(772): Homolog of NCBI NO: 9293976 NR Description: Ser/Thr protein kinaseroteinase) [Arabidopsis
MPKNNNVGVKEGGSSGVVAVAIDKDKSSQHALKWAVDNLLQRGQSVILVHVKLRPSPLNNSASLHASSAKLSQDSSLVCRDPEGISKEIFLPFRCFCTRKDIQCQDVLLEESDVAKALVEYVNQAAIEVLVVGSSSKGGFLRFNKPTDIPGSITKNAPDFCTVYIISKGKIQTMRSASRSAPMTAPLRSSVQPPSLKPPQPMPSTSANSLRADRRSFESNQRRSVEDQQRRSMEDQQRRSIDDQSESFRSPFTRRGNGRSYGDLTVPESDISFISSGRPSIDRIFPSLYDNNDPSRTPPRLSNFSDMDYSSSLDQSSNYGRRSVDMNSPTDFESERFSSASQSIDDVEAEMRRLKLELKQTMEMYSTACKEALTAKQKATELQRWKLEEERKLEEARNAEEAALAIAEKEKAKSKAAMEAAEAAQRIAELEAKKRVNAEMKALKESEEKTKALTALANSDVRYRKYSIEDIELATEFFAEKYKIGEGGYGPVYKCYLDHTPVAVKVLRPDAAQGRSQFQQEVEVLSCIRHPNMVLLLGACPECGCLVYEFMANGSLEDRLFRLGNSPPLSWQMRFRIAAEIGTGLLFLHQAKPEPLVHRDLKPGNILLDRNFVSKISDVGLARLVPPTVADTVTQYRMTSTAGTFCYIDPEYQQTGMLGVKSDIYSLGIMFLQLITAKPPMGLTHYVERALEKGTLVDLLDPVVSDWPMEDTEEFAKLALKCAELRRKDRPDLAKVILPELNRLRTLADESSHSVVVGNSPLPSPTGSQSSLKLVRTTKSENRNSNILLYSPTDFFFTNHLQEHMSGASISVPQ

SEQ ID NO: 70604 - protein, 641 aa, Arabidopsis thaliana
  peptide (1)..(641): Ceres Seq. ID no. 2713372
  misc_feature (1)..(599): Homolog of NCBI NO: 7487915 NR Description: hypothetical protein YUP8H12R.45 - Arabidopsis >gi|3152590|gb|AAC17071.1| Similar to protein serine/threonine
  misc_feature (1)..(601): Homolog of NCBI NO: 25518361 NR Description: hypothetical protein F17F16.3 [imported] - thaliana >gi|9954729|gb|AAG09082.1|AC026237_3 Similar to protein
  misc_feature (1)..(601): Homolog of NCBI NO: 15219360 NR Description: protein kinase, putative; protein id: At1g16760.1
  misc_feature (1)..(365): Homolog of NCBI NO: 15235878 NR Description: putative protein; protein id: At4g31230.1
  misc_feature (46)..(600): Homolog of NCBI NO: 10178101 NR Description: receptor-like protein kinase [Arabidopsis
  misc_feature (76)..(584): Homolog of NCBI NO: 15239834 NR Description: putative receptor - like kinase; protein id:
  misc_feature (73)..(578): Homolog of NCBI NO: 14719286 NR Description: serine threonine kinase 1 [Zea mays]
  misc_feature (73)..(578): Homolog of NCBI NO: 18092335 NR Description: serine threonine kinase [Zea mays]
  misc_feature (1)..(599): Homolog of NCBI NO: 9293976 NR Description: Ser/Thr protein kinaseroteinase) [Arabidopsis
  misc_feature (1)..(599): Homolog of NCBI NO: 30685668 NR Description: protein kinase family [Arabidopsis thaliana] putative protein kinase [Arabidopsis thaliana]
MRSASRSAPMTAPLRSSVQPPSLKPPQPMPSTSANSLRADRRSFESNQRRSVEDQQRRSMEDQQRRSIDDQSESFRSPFTRRGNGRSYGDLTVPESDISFISSGRPSIDRIFPSLYDNNDPSRTPPRLSNFSDMDYSSSLDQSSNYGRRSVDMNSPTDFESERFSSASQSIDDVEAEMRRLKLELKQTMEMYSTACKEALTAKQKATELQRWKLEEERKLEEARNAEEAALAIAEKEKAKSKAAMEAAEAAQRIAELEAKKRVNAEMKALKESEEKTKALTALANSDVRYRKYSIEDIELATEFFAEKYKIGEGGYGPVYKCYLDHTPVAVKVLRPDAAQGRSQFQQEVEVLSCIRHPNMVLLLGACPECGCLVYEFMANGSLEDRLFRLGNSPPLSWQMRFRIAAEIGTGLLFLHQAKPEPLVHRDLKPGNILLDRNFVSKISDVGLARLVPPTVADTVTQYRMTSTAGTFCYIDPEYQQTGMLGVKSDIYSLGIMFLQLITAKPPMGLTHYVERALEKGTLVDLLDPVVSDWPMEDTEEFAKLALKCAELRRKDRPDLAKVILPELNRLRTLADESSHSVVVGNSPLPSPTGSQSSLKLVRTTKSENRNSNILLYSPTDFFFTNHLQEHMSGASISVPQ

SEQ ID NO: 70605 - DNA, 951 bp, Arabidopsis thaliana
  misc_feature (1)..(951): Ceres Seq. ID no. 2713385
  misc_feature: MA Experiment ID: 20001910 Result: Up-regulated in Transcription
  misc_feature: MA Experiment 20001910 PARAMETER Experiment Name: At_Drought_Reproduction_P Parameter: Age (day) Value: 37
  misc_feature: MA Experiment 20001910 PARAMETER Experiment Name: At_Drought_Reproduction_P Parameter: Organism Value: A. thaliana
  misc_feature: MA Experiment 20001910 PARAMETER Experiment Name: At_Drought_Reproduction_P Parameter: Plant Line Value: WS
  misc_feature: MA Experiment 20001910 PARAMETER Experiment Name: At_Drought_Reproduction_P Parameter: Timepoint (day) Value: 7
  misc_feature: MA Experiment 20001910 PARAMETER Experiment Name: At_Drought_Reproduction_P Parameter: Tissue Value: Flowers
  misc_feature: MA Experiment 20001910 PARAMETER Experiment Name: At_Drought_Reproduction_P Parameter: Treatment Value: Drought vs. No Drought
  misc_feature: Pfam Name: Abhydrolase_2 Pfam Description: Phospholipase/Carboxylesterase
atgggtaatgtgacgtcaaacatggctgcaaagttcgctttcttcccaccgccaccaacatacgacgtgggtaaagacgaggagaccggaaagcttatgttcaccgggataacaccagaaaaaagcatggatgttcatcagcttaccaccaaatctggcaacaaggtcattgccacgttttggaaacaccctttctctagattcactcttctttattcacatggcaatgccgcggatctcggccaaatggttgatctcttcatcgagcttcgagctcatctccgcgtcaacattatgagctatgattattcaggctatggagcttcaacaggcaagccaactgagctcaatacgtactatgatatcgaggctgtgtacaattgcttgaggaccgagtacgggatcatgcaagaggaaatgattctatatggtcaatccgttggaagcggaccaacattgcacttagcatctcgagtaaagagactaagagggattgttcttcatagcgcaattctctccggcctcagagttctgtatcctgtcaaaatgacattctggttcgatatgtacaaagtaagcttgatctctcttgtctctggttattactatcgggtcagtctctcaaactctggaattttgcagaacattgacaagatacgccatgtaacatgccctgttcttgtcatacatggaacaaaagatgatattgtgaatatgtcacatgggaagcgattgtgggaactagcaaaggacaagtatgatccattgtgggtaaaaggaggagggcattgcaacttggaaacataccccgagtacatcaagcatatgcgaaagttcatgaacgccatggagaaactcgctctcaacaatccaccaaacaaacaacaaaacgacgagccaagcatcaaggaaactaaacaaaatcggtgcttgagattcagcaaaagatag

SEQ ID NO: 70606 - protein, 316 aa, Arabidopsis thaliana
  peptide (1)..(316): Ceres Seq. ID no. 2713386
  misc_feature: Pfam Name: Abhydrolase_2 Pfam Description: Phospholipase/Carboxylesterase
  misc_feature (1)..(316): Homolog of NCBI NO: 15224121 NR Description: hypothetical protein; protein id: At2g24320.1
  misc_feature (1)..(191): Homolog of NCBI NO: 28393521 NR Description: unknown protein [Arabidopsis thaliana]
  misc_feature (212)..(316): Homolog of NCBI NO: 28393521 NR Description: unknown protein [Arabidopsis thaliana]
  misc_feature (1)..(316): Homolog of NCBI NO: 30688887 NR Description: expressed protein [Arabidopsis thaliana]
  misc_feature (1)..(316): Homolog of NCBI NO: 25352163 NR Description: hypothetical protein AT4g31020 [imported] - thaliana >gi|2980764|emb|CAA18191.1| putative protein thaliana] >gi|7270004|emb|CAB79820.1| putative protein
  misc_feature (1)..(198): Homolog of NCBI NO: 15230760 NR Description: unknown protein; protein id: At3g30380.1 thaliana] >gi|9294341|dbj|BAB02238.1| contains similarity to
  misc_feature (212)..(292): Homolog of NCBI NO: 15230760 NR Description: unknown protein; protein id: At3g30380.1 thaliana] >gi|9294341|dbj|BAB02238.1| contains similarity to
  misc_feature (1)..(191): Homolog of NCBI NO: 15232168 NR Description: unknown protein; protein id: At3g01690.1 thaliana] >gi|6016726|gb|AAF01552.1|AC009325_22 unknown protein thaliana] >gi|6091713|gb|AAF03425.1|AC010797_1 unknown protein
  misc_feature (212)..(300): Homolog of NCBI NO: 15232168 NR Description: unknown protein; protein id: At3g01690.1 thaliana] >gi|6016726|gb|AAF01552.1|AC009325_22 unknown protein thaliana] >gi|6091713|gb|AAF03425.1|AC010797_1 unknown protein
  misc_feature (30)..(199): Homolog of NCBI NO: 34911338 NR Description: P0519D04.38 [Oryza sativa (japonica
MGNVTSNMAAKFAFFPPPPTYDVGKDEETGKLMFTGITPEKSMDVHQLTTKSGNKVIATFWKHPFSRFTLLYSHGNAADLGQMVDLFIELRAHLRVNIMSYDYSGYGASTGKPTELNTYYDIEAVYNCLRTEYGIMQEEMILYGQSVGSGPTLHLASRVKRLRGIVLHSAILSGLRVLYPVKMTFWFDMYKVSLISLVSGYYYRVSLSNSGILQNIDKIRHVTCPVLVIHGTKDDIVNMSHGKRLWELAKDKYDPLWVKGGGHCNLETYPEYIKHMRKFMNAMEKLALNNPPNKQQNDEPSIKETKQNRCLRFSKR

SEQ ID NO: 70607 - protein, 309 aa, Arabidopsis thaliana
  peptide (1)..(309): Ceres Seq. ID no. 2713387
  misc_feature: Pfam Name: Abhydrolase_2 Pfam Description: Phospholipase/Carboxylesterase
  misc_feature (1)..(191): Homolog of NCBI NO: 15230760 NR Description: unknown protein; protein id: At3g30380.1 thaliana] >gi|9294341|dbj|BAB02238.1| contains similarity to
  misc_feature (205)..(285): Homolog of NCBI NO: 15230760 NR Description: unknown protein; protein id: At3g30380.1 thaliana] >gi|9294341|dbj|BAB02238.1| contains similarity to
  misc_feature (1)..(184): Homolog of NCBI NO: 15232168 NR Description: unknown protein; protein id: At3g01690.1 thaliana] >gi|6016726|gb|AAF01552.1|AC009325_22 unknown protein thaliana] >gi|6091713|gb|AAF03425.1|AC010797_1 unknown protein
  misc_feature (205)..(293): Homolog of NCBI NO: 15232168 NR Description: unknown protein; protein id: At3g01690.1 thaliana] >gi|6016726|gb|AAF01552.1|AC009325_22 unknown protein thaliana] >gi|6091713|gb|AAF03425.1|AC010797_1 unknown protein
  misc_feature (23)..(192): Homolog of NCBI NO: 34911338 NR Description: P0519D04.38 [Oryza sativa (japonica
  misc_feature (1)..(309): Homolog of NCBI NO: 15224121 NR Description: hypothetical protein; protein id: At2g24320.1
  misc_feature (1)..(184): Homolog of NCBI NO: 28393521 NR Description: unknown protein [Arabidopsis thaliana]
  misc_feature (205)..(309): Homolog of NCBI NO: 28393521 NR Description: unknown protein [Arabidopsis thaliana]
  misc_feature (1)..(309): Homolog of NCBI NO: 30688887 NR Description: expressed protein [Arabidopsis thaliana]
  misc_feature (1)..(309): Homolog of NCBI NO: 25352163 NR Description: hypothetical protein AT4g31020 [imported] - thaliana >gi|2980764|emb|CAA18191.1| putative protein thaliana] >gi|7270004|emb|CAB79820.1| putative protein
MAAKFAFFPPPPTYDVGKDEETGKLMFTGITPEKSMDVHQLTTKSGNKVIATFWKHPFSRFTLLYSHGNAADLGQMVDLFIELRAHLRVNIMSYDYSGYGASTGKPTELNTYYDIEAVYNCLRTEYGIMQEEMILYGQSVGSGPTLHLASRVKRLRGIVLHSAILSGLRVLYPVKMTFWFDMYKVSLISLVSGYYYRVSLSNSGILQNIDKIRHVTCPVLVIHGTKDDIVNMSHGKRLWELAKDKYDPLWVKGGGHCNLETYPEYIKHMRKFMNAMEKLALNNPPNKQQNDEPSIKETKQNRCLRFSKR

SEQ ID NO: 70608 - protein, 284 aa, Arabidopsis thaliana
  peptide (1)..(284): Ceres Seq. ID no. 2713388
  misc_feature: Pfam Name: Abhydrolase_2 Pfam Description: Phospholipase/Carboxylesterase
  misc_feature (1)..(284): Homolog of NCBI NO: 15224121 NR Description: hypothetical protein; protein id: At2g24320.1
  misc_feature (1)..(159): Homolog of NCBI NO: 28393521 NR Description: unknown protein [Arabidopsis thaliana]
  misc_feature (180)..(284): Homolog of NCBI NO: 28393521 NR Description: unknown protein [Arabidopsis thaliana]
  misc_feature (1)..(284): Homolog of NCBI NO: 30688887 NR Description: expressed protein [Arabidopsis thaliana]
  misc_feature (1)..(284): Homolog of NCBI NO: 25352163 NR Description: hypothetical protein AT4g31020 [imported] - thaliana >gi|2980764|emb|CAA18191.1| putative protein thaliana] >gi|7270004|emb|CAB79820.1| putative protein
  misc_feature (1)..(166): Homolog of NCBI NO: 15230760 NR Description: unknown protein; protein id: At3g30380.1 thaliana] >gi|9294341|dbj|BAB02238.1| contains similarity to
  misc_feature (180)..(260): Homolog of NCBI NO: 15230760 NR Description: unknown protein; protein id: At3g30380.1 thaliana] >gi|9294341|dbj|BAB02238.1| contains similarity to
  misc_feature (1)..(159): Homolog of NCBI NO: 15232168 NR Description: unknown protein; protein id: At3g01690.1 thaliana] >gi|6016726|gb|AAF01552.1|AC009325_22 unknown protein thaliana] >gi|6091713|gb|AAF03425.1|AC010797_1 unknown protein
  misc_feature (180)..(268): Homolog of NCBI NO: 15232168 NR Description: unknown protein; protein id: At3g01690.1 thaliana] >gi|6016726|gb|AAF01552.1|AC009325_22 unknown protein thaliana] >gi|6091713|gb|AAF03425.1|AC010797_1 unknown protein
  misc_feature (1)..(167): Homolog of NCBI NO: 34911338 NR Description: P0519D04.38 [Oryza sativa (japonica
MFTGITPEKSMDVHQLTTKSGNKVIATFWKHPFSRFTLLYSHGNAADLGQMVDLFIELRAHLRVNIMSYDYSGYGASTGKPTELNTYYDIEAVYNCLRTEYGIMQEEMILYGQSVGSGPTLHLASRVKRLRGIVLHSAILSGLRVLYPVKMTFWFDMYKVSLISLVSGYYYRVSLSNSGILQNIDKIRHVTCPVLVIHGTKDDIVNMSHGKRLWELAKDKYDPLWVKGGGHCNLETYPEYIKHMRKFMNAMEKLALNNPPNKQQNDEPSIKETKQNRCLRFSKR

SEQ ID NO: 70609 - DNA, 720 bp, Arabidopsis thaliana
  misc_feature (1)..(720): Ceres Seq. ID no. 2714342
  misc_feature: MA Experiment ID: 20000171 Result: Down-regulated in Transcription
  misc_feature: MA Experiment 20000171 PARAMETER Experiment Name: At_42deg_Heat_P Parameter: Age (day) Value: 14
  misc_feature: MA Experiment 20000171 PARAMETER Experiment Name: At_42deg_Heat_P Parameter: Organism Value: A. thaliana
  misc_feature: MA Experiment 20000171 PARAMETER Experiment Name: At_42deg_Heat_P Parameter: Plant Line Value: WS
  misc_feature: MA Experiment 20000171 PARAMETER Experiment Name: At_42deg_Heat_P Parameter: Temperature (deg C) Value: 42 vs. 22
  misc_feature: MA Experiment 20000171 PARAMETER Experiment Name: At_42deg_Heat_P Parameter: Timepoint (hr) Value: 1
  misc_feature: MA Experiment 20000171 PARAMETER Experiment Name: At_42deg_Heat_P Parameter: Tissue Value: Aerial
  misc_feature: MA Experiment ID: 20000173 Result: Down-regulated in Transcription
  misc_feature: MA Experiment 20000173 PARAMETER Experiment Name: At_42deg_Heat_P Parameter: Age (day) Value: 14
  misc_feature: MA Experiment 20000173 PARAMETER Experiment Name: At_42deg_Heat_P Parameter: Organism Value: A. thaliana
  misc_feature: MA Experiment 20000173 PARAMETER Experiment Name: At_42deg_Heat_P Parameter: Plant Line Value: WS
  misc_feature: MA Experiment 20000173 PARAMETER Experiment Name: At_42deg_Heat_P Parameter: Temperature (deg C) Value: 42 vs. 22
  misc_feature: MA Experiment 20000173 PARAMETER Experiment Name: At_42deg_Heat_P Parameter: Timepoint (hr) Value: 6
  misc_feature: MA Experiment 20000173 PARAMETER Experiment Name: At_42deg_Heat_P Parameter: Tissue Value: Aerial
  misc_feature: MA Experiment ID: 20000182 Result: Up-regulated in Transcription
  misc_feature: MA Experiment 20000182 PARAMETER Experiment Name: At_2mM_SA_P Parameter: Age (day) Value: 14
  misc_feature: MA Experiment 20000182 PARAMETER Experiment Name: At_2mM_SA_P Parameter: Organism Value: A. thaliana
  misc_feature: MA Experiment 20000182 PARAMETER Experiment Name: At_2mM_SA_P Parameter: Plant Line Value: WS
  misc_feature: MA Experiment 20000182 PARAMETER Experiment Name: At_2mM_SA_P Parameter: Timepoint (hr) Value: 6
  misc_feature: MA Experiment 20000182 PARAMETER Experiment Name: At_2mM_SA_P Parameter: Tissue Value: Aerial
  misc_feature: MA Experiment 20000182 PARAMETER Experiment Name: At_2mM_SA_P Parameter: Treatment Value: 2mM SA vs. No Treatment
  misc_feature: MA Experiment ID: 20000184 Result: Down-regulated in Transcription
  misc_feature: MA Experiment 20000184 PARAMETER Experiment Name: At_Shoots__P Parameter: Age (day) Value: 7
  misc_feature: MA Experiment 20000184 PARAMETER Experiment Name: At_Shoots__P Parameter: Tissue Value: Shoots vs. Whole Plant
  misc_feature: MA Experiment ID: 20001560 Result: Down-regulated in Transcription
  misc_feature: MA Experiment 20001560 PARAMETER Experiment Name: At_Drought_Soil_Dry_P Parameter: Age (day) Value: 28
  misc_feature: MA Experiment 20001560 PARAMETER Experiment Name: At_Drought_Soil_Dry_P Parameter: Organism Value: A. thaliana
  misc_feature: MA Experiment 20001560 PARAMETER Experiment Name: At_Drought_Soil_Dry_P Parameter: Plant Line Value: WS
  misc_feature: MA Experiment 20001560 PARAMETER Experiment Name: At_Drought_Soil_Dry_P Parameter: Post Timepoint (hr) Value: None
  misc_feature: MA Experiment 20001560 PARAMETER Experiment Name: At_Drought_Soil_Dry_P Parameter: Post-Treatment Value: None
  misc_feature: MA Experiment 20001560 PARAMETER Experiment Name: At_Drought_Soil_Dry_P Parameter: Timepoint (day) Value: 14
  misc_feature: MA Experiment 20001560 PARAMETER Experiment Name: At_Drought_Soil_Dry_P Parameter: Treatment Value: Drought vs. No Drought
atgggaaggggcaagatcgcgattaagaggatcaataactctacgagccgtcaggttacgttctcgaagcgaaggaatggattgttgaagaaagctaaggagcttgcgattctctgcgatgctgaggttggtgtcatcatcttctccagcaccggtaggctctacgatttctccagctccagcatgaaatcggtcatagagagatacagcgatgccaaaggagaaaccagttcagaaaatgatcccgcttcagaaattcaggaaatgtatatagtaactctggaaaagtatgcatattcagaagagcttgtacttgacaggcaaatgatgggggaggagctctctggactaagtgtagaagctttacagaatttggaaaatcagcttgaattgagccttcgtggcgttcgaatgaaaaaggatcaaatgttaatcgaagaaatacaagtacttaaccgagaggggaatctcgttcaccaagagaatttagacctccacaagaaagtaaacctaatgcaccaacagaacatggaactacatgaaaaggtttcagaggtcgagggtgtgaaaatcgcaaacaagaattctcttctcacaaatggtctagacatgagagatacctcgaacgaacatgtccatcttcagctcagccaaccgcagcatgatcatgagacgcattcaaaagctatccaactcaactatttttccttcattgcataa

SEQ ID NO: 70610 - protein, 239 aa, Arabidopsis thaliana
  peptide (1)..(239): Ceres Seq. ID no. 2714343
  misc_feature (73)..(171): Pfam Name: K-box region Pfam Description: K-box region
  misc_feature (1)..(239): Homolog of NCBI NO: 11278951 NR Description: MADS-box transcription factor-like protein -
  misc_feature (1)..(239): Homolog of NCBI NO: 30694601 NR Description: MADS-box protein [Arabidopsis thaliana]
  misc_feature (24)..(239): Homolog of NCBI NO: 11545539 NR Description: MADS-box protein AGL16 [Arabidopsis thaliana]
  misc_feature (1)..(232): Homolog of NCBI NO: 30313677 NR Description: transcription factor MADS27 [Oryza sativa
  misc_feature (1)..(229): Homolog of NCBI NO: 15235748 NR Description: MADS-box protein; protein id: At4g37940.1, by cDNA: gi_18478602 [Arabidopsis thaliana]
  misc_feature (1)..(232): Homolog of NCBI NO: 29611976 NR Description: MADS-box transcription factor MADS2 [Zea mays]
  misc_feature (1)..(232): Homolog of NCBI NO: 9964296 NR Description: MADS box protein 2 [Zea mays]
  misc_feature (1)..(224): Homolog of NCBI NO: 38344968 NR Description: OSJNBa0072F16.13 [Oryza sativa (japonica
  misc_feature (1)..(144): Homolog of NCBI NO: 32402382 NR Description: MADS-box protein AGL16-II [Arabidopsis thaliana]
  misc_feature (1)..(229): Homolog of NCBI NO: 7489303 NR Description: MADS-box transcription factor DEFH125 - garden
MGRGKIAIKRINNSTSRQVTFSKRRNGLLKKAKELAILCDAEVGVIIFSSTGRLYDFSSSSMKSVIERYSDAKGETSSENDPASEIQEMYIVTLEKYAYSEELVLDRQMMGEELSGLSVEALQNLENQLELSLRGVRMKKDQMLIEEIQVLNREGNLVHQENLDLHKKVNLMHQQNMELHEKVSEVEGVKIANKNSLLTNGLDMRDTSNEHVHLQLSQPQHDHETHSKAIQLNYFSFIA

SEQ ID NO: 70611 - protein, 178 aa, Arabidopsis thaliana
  peptide (1)..(178): Ceres Seq. ID no. 2714344
  misc_feature (12)..(110): Pfam Name: K-box region Pfam Description: K-box region
  misc_feature (1)..(178): Homolog of NCBI NO: 11278951 NR Description: MADS-box transcription factor-like protein -
  misc_feature (1)..(178): Homolog of NCBI NO: 30694601 NR Description: MADS-box protein [Arabidopsis thaliana]
  misc_feature (1)..(178): Homolog of NCBI NO: 11545539 NR Description: MADS-box protein AGL16 [Arabidopsis thaliana]
  misc_feature (1)..(171): Homolog of NCBI NO: 30313677 NR Description: transcription factor MADS27 [Oryza sativa
  misc_feature (1)..(168): Homolog of NCBI NO: 15235748 NR Description: MADS-box protein; protein id: At4g37940.1, by cDNA: gi_18478602 [Arabidopsis thaliana]
  misc_feature (1)..(171): Homolog of NCBI NO: 29611976 NR Description: MADS-box transcription factor MADS2 [Zea mays]
  misc_feature (1)..(171): Homolog of NCBI NO: 9964296 NR Description: MADS box protein 2 [Zea mays]
  misc_feature (1)..(163): Homolog of NCBI NO: 38344968 NR Description: OSJNBa0072F16.13 [Oryza sativa (japonica
  misc_feature (1)..(83): Homolog of NCBI NO: 32402382 NR Description: MADS-box protein AGL16-II [Arabidopsis thaliana]
  misc_feature (1)..(168): Homolog of NCBI NO: 7489303 NR Description: MADS-box transcription factor DEFH125 - garden
MKSVIERYSDAKGETSSENDPASEIQEMYIVTLEKYAYSEELVLDRQMMGEELSGLSVEALQNLENQLELSLRGVRMKKDQMLIEEIQVLNREGNLVHQENLDLHKKVNLMHQQNMELHEKVSEVEGVKIANKNSLLTNGLDMRDTSNEHVHLQLSQPQHDHETHSKAIQLNYFSFIA

SEQ ID NO: 70612 - protein, 151 aa, Arabidopsis thaliana
  peptide (1)..(151): Ceres Seq. ID no. 2714345
  misc_feature (1)..(83): Pfam Name: K-box region Pfam Description: K-box region
  misc_feature (1)..(151): Homolog of NCBI NO: 11278951 NR Description: MADS-box transcription factor-like protein -
  misc_feature (1)..(151): Homolog of NCBI NO: 30694601 NR Description: MADS-box protein [Arabidopsis thaliana]
  misc_feature (1)..(151): Homolog of NCBI NO: 11545539 NR Description: MADS-box protein AGL16 [Arabidopsis thaliana]
  misc_feature (1)..(144): Homolog of NCBI NO: 30313677 NR Description: transcription factor MADS27 [Oryza sativa
  misc_feature (1)..(141): Homolog of NCBI NO: 15235748 NR Description: MADS-box protein; protein id: At4g37940.1, by cDNA: gi_18478602 [Arabidopsis thaliana]
  misc_feature (1)..(144): Homolog of NCBI NO: 29611976 NR Description: MADS-box transcription factor MADS2 [Zea mays]
  misc_feature (1)..(144): Homolog of NCBI NO: 9964296 NR Description: MADS box protein 2 [Zea mays]
  misc_feature (1)..(136): Homolog of NCBI NO: 38344968 NR Description: OSJNBa0072F16.13 [Oryza sativa (japonica
  misc_feature (1)..(56): Homolog of NCBI NO: 32402382 NR Description: MADS-box protein AGL16-II [Arabidopsis thaliana]
  misc_feature (1)..(141): Homolog of NCBI NO: 7489303 NR Description: MADS-box transcription factor DEFH125 - garden
MYIVTLEKYAYSEELVLDRQMMGEELSGLSVEALQNLENQLELSLRGVRMKKDQMLIEEIQVLNREGNLVHQENLDLHKKVNLMHQQNMELHEKVSEVEGVKIANKNSLLTNGLDMRDTSNEHVHLQLSQPQHDHETHSKAIQLNYFSFIA

SEQ ID NO: 70613 - DNA, 1914 bp, Arabidopsis thaliana
  misc_feature (1)..(1914): Ceres Seq. ID no. 2714503
  misc_feature: MA Experiment ID: 20000224 Result: Up-regulated in Transcription
atggtgcttccgctcttccggcgcgctgcgatcgcccggacttcctcgcttctcagagctcgtcttttcgctcctgcctccgaattccattctcgcttttctaatggactataccacttggacgacaaaattagtagcagtaatggtgtgaggtctgcctctatagacttgattacaagaatggatgatagttctccaaagcccattctgcgatttggcgtgcaaaacttttcatctacaggacccatatcacagacggttcttgcaatgccagccttgtctcctactatgagtcatggaaatgttgtaaaatggatgaagaaagaaggtgacaaggtagaggtgggtgatgtactatgtgagatagagacagacaaagccactgtagaatttgagagtcaagaggaaggatttctggccaagattttagtcactgaaggatcaaaggatatccctgttaatgaaccgattgcaataatggttgaggaggaagacgacattaaaaacgttcctgctaccatagagggtggacgagatggtaaagaggaaacatcagctcatcaagtgatgaaacctgacgaaagcacacaacaaaaaagttccattcagcccgatgcatcagatcttcccccacatgtcgtcttagaaatgccagcactttctcctacaatgaaccaaggtaatattgccaaatggtggaaaaaagagggtgacaagattgaagtgggtgatgtcataggtgagatcgagactgacaaagccactctggaatttgaaagccttgaagaggggtacttagctaagattctaattcctgaaggttccaaggatgtggcggtgggaaagccgattgccctaatagttgaagatgctgaaagtattgaagccatcaagtcttcttccgcaggtagttctgaggttgatacagttaaagaagtccctgacagtgttgtagataaacctacagagaggaaagcaggcttcacaaagatcagtcctgctgcaaagctattgattttagaacatggattggaggcatcatcaattgaggcatcgggtccctatggtacattattgaaatcagacgttgtggccgcaattgcttctggaaaagcttctaaatcatctgcgtctacgaagaagaagcaaccatcaaaggagaccccgtctaaatcctcctccacatcgaagccttctgtgacacagtcagataataattatgaagattttccaaatagtcaaattcgcaagattatagcaaaacgtttattggaatcaaaacagaagataccccatttgtatttacaatcagatgttgtattggatcctcttcttgcatttagaaaagaacttcaagaaaaccatggcgttaaagtgtctgtcaatgacatagttattaaagcagtggcagtcgcactgaggaatgtacgacaagctaatgctttctgggatgctgagaaaggagatatcgttatgtgtgacagtgttgacatatcaattgcagttgcaactgagaagggcttaatgactccaattatcaagaatgcagaccagaaatctatttctgctatttccttagaggttaaggagctggcacaaaaggctcgatctggaaagcttgctcctcatgagtttcaaggagggacattcagcatatcaaatctaggaatgtatcctgtggataatttctgcgcaatcattaacccccctcaggctgggattctagcagttggtagaggaaacaaagtggttgagccagttattggactagatggaattgagaagccttctgttgtgacaaaaatgaatgtaacgttatccgctgatcatcggatctttgatggacaagttggagcttcgtttatgtctgaattgcgttcaaactttgaggatgttcgaagacttcttctgtga

SEQ ID NO: 70614 - protein, 637 aa, Arabidopsis thaliana; identical to SEQ ID NO: 39890
  peptide (1)..(637): Ceres Seq. ID no. 2714504
  misc_feature (404)..(637): Pfam Name: 2-oxoacid dehydrogenases acyltransferase Pfam Description: 2-oxoacid dehydrogenases acyltransferase
  misc_feature (28)..(637): Homolog of NCBI NO: 1076318 NR Description: dihydrolipoamide S-acetyltransferase (EC
  misc_feature (82)..(637): Homolog of NCBI NO: 20071885 NR Description: dihydrolipoamide S-acetyltransferase (E2
  misc_feature (82)..(637): Homolog of NCBI NO: 21594641 NR Description: Unknown (protein for MGC:27747) [Mus musculus]
  misc_feature (82)..(637): Homolog of NCBI NO: 27762280 NR Description: dihydrolipoamide S-acetyltransferase [Danio rerio]
  misc_feature (82)..(637): Homolog of NCBI NO: 31542559 NR Description: dihydrolipoamide S-acetyltransferase (E2
  misc_feature (82)..(637): Homolog of NCBI NO: 20805283 NR Description: dihydrolipoamide acetyltransferase precursor
  misc_feature (82)..(637): Homolog of NCBI NO: 34863356 NR Description: dihydrolipoamide acetyltransferase [Rattus
  misc_feature (82)..(637): Homolog of NCBI NO: 266685 NR Description: DIHYDROLIPOAMIDE ACETYLTRANSFERASE COMPONENT OF
  misc_feature (82)..(637): Homolog of NCBI NO: 16580128 NR Description: dihydrolipoamide S-acetyltransferase precursor
  misc_feature (82)..(637): Homolog of NCBI NO: 14587786 NR Description: dihydrolipoamide acetyltransferase [Sus scrofa]

SEQ ID NO: 70615 - protein, 577 aa, Arabidopsis thaliana; identical to SEQ ID NO: 39891
  peptide (1)..(577): Ceres Seq. ID no. 2714505
  misc_feature (344)..(577): Pfam Name: 2-oxoacid dehydrogenases acyltransferase Pfam Description: 2-oxoacid dehydrogenases acyltransferase
  misc_feature (1)..(577): Homolog of NCBI NO: 1076318 NR Description: dihydrolipoamide S-acetyltransferase (EC
  misc_feature (22)..(577): Homolog of NCBI NO: 20071885 NR Description: dihydrolipoamide S-acetyltransferase (E2
  misc_feature (22)..(577): Homolog of NCBI NO: 21594641 NR Description: Unknown (protein for MGC:27747) [Mus musculus]
  misc_feature (22)..(577): Homolog of NCBI NO: 27762280 NR Description: dihydrolipoamide S-acetyltransferase [Danio rerio]
  misc_feature (22)..(577): Homolog of NCBI NO: 31542559 NR Description: dihydrolipoamide S-acetyltransferase (E2
  misc_feature (22)..(577): Homolog of NCBI NO: 20805283 NR Description: dihydrolipoamide acetyltransferase precursor
  misc_feature (22)..(577): Homolog of NCBI NO: 34863356 NR Description: dihydrolipoamide acetyltransferase [Rattus
  misc_feature (22)..(577): Homolog of NCBI NO: 266685 NR Description: DIHYDROLIPOAMIDE ACETYLTRANSFERASE COMPONENT OF
  misc_feature (22)..(577): Homolog of NCBI NO: 16580128 NR Description: dihydrolipoamide S-acetyltransferase precursor
  misc_feature (22)..(577): Homolog of NCBI NO: 14587786 NR Description: dihydrolipoamide acetyltransferase [Sus scrofa]

SEQ ID NO: 70616 - protein, 548 aa, Arabidopsis thaliana
  peptide (1)..(548): Ceres Seq. ID no. 2714506
  misc_feature (315)..(548): Pfam Name: 2-oxoacid dehydrogenases acyltransferase Pfam Description: 2-oxoacid dehydrogenases acyltransferase
  misc_feature (1)..(548): Homolog of NCBI NO: 1076318 NR Description: dihydrolipoamide S-acetyltransferase (EC
  misc_feature (1)..(548): Homolog of NCBI NO: 20071885 NR Description: dihydrolipoamide S-acetyltransferase (E2
  misc_feature (1)..(548): Homolog of NCBI NO: 21594641 NR Description: Unknown (protein for MGC:27747) [Mus musculus]
  misc_feature (1)..(548): Homolog of NCBI NO: 27762280 NR Description: dihydrolipoamide S-acetyltransferase [Danio rerio]
  misc_feature (1)..(548): Homolog of NCBI NO: 31542559 NR Description: dihydrolipoamide S-acetyltransferase (E2
  misc_feature (1)..(548): Homolog of NCBI NO: 20805283 NR Description: dihydrolipoamide acetyltransferase precursor
  misc_feature (1)..(548): Homolog of NCBI NO: 34863356 NR Description: dihydrolipoamide acetyltransferase [Rattus
  misc_feature (1)..(548): Homolog of NCBI NO: 266685 NR Description: DIHYDROLIPOAMIDE ACETYLTRANSFERASE COMPONENT OF
  misc_feature (1)..(548): Homolog of NCBI NO: 16580128 NR Description: dihydrolipoamide S-acetyltransferase precursor
  misc_feature (1)..(548): Homolog of NCBI NO: 14587786 NR Description: dihydrolipoamide acetyltransferase [Sus scrofa]
MPALSPTMSHGNVVKWMKKEGDKVEVGDVLCEIETDKATVEFESQEEGFLAKILVTEGSKDIPVNEPIAIMVEEEDDIKNVPATIEGGRDGKEETSAHQVMKPDESTQQKSSIQPDASDLPPHVVLEMPALSPTMNQGNIAKWWKKEGDKIEVGDVIGEIETDKATLEFESLEEGYLAKILIPEGSKDVAVGKPIALIVEDAESIEAIKSSSAGSSEVDTVKEVPDSVVDKPTERKAGFTKISPAAKLLILEHGLEASSIEASGPYGTLLKSDVVAAIASGKASKSSASTKKKQPSKETPSKSSSTSKPSVTQSDNNYEDFPNSQIRKIIAKRLLESKQKIPHLYLQSDVVLDPLLAFRKELQENHGVKVSVNDIVIKAVAVALRNVRQANAFWDAEKGDIVMCDSVDISIAVATEKGLMTPIIKNADQKSISAISLEVKELAQKARSGKLAPHEFQGGTFSISNLGMYPVDNFCAIINPPQAGILAVGRGNKVVEPVIGLDGIEKPSVVTKMNVTLSADHRIFDGQVGASFMSELRSNFEDVRRLLL

SEQ ID NO: 70617 - DNA, 1344 bp, Arabidopsis thaliana
  misc_feature (1)..(1344): Ceres Seq. ID no. 2715781
  misc_feature: MA Experiment ID: 20000173 Result: Down-regulated in Transcription
  misc_feature: MA Experiment 20000173 PARAMETER Experiment Name: At_42deg_Heat_P Parameter: Age (day) Value: 14
  misc_feature: MA Experiment 20000173 PARAMETER Experiment Name: At_42deg_Heat_P Parameter: Organism Value: A. thaliana
  misc_feature: MA Experiment 20000173 PARAMETER Experiment Name: At_42deg_Heat_P Parameter: Plant Line Value: WS
  misc_feature: MA Experiment 20000173 PARAMETER Experiment Name: At_42deg_Heat_P Parameter: Temperature (deg C) Value: 42 vs. 22
  misc_feature: MA Experiment 20000173 PARAMETER Experiment Name: At_42deg_Heat_P Parameter: Timepoint (hr) Value: 6
  misc_feature: MA Experiment 20000173 PARAMETER Experiment Name: At_42deg_Heat_P Parameter: Tissue Value: Aerial
  misc_feature: MA Experiment ID: 20000495 Result: Down-regulated in Transcription
  misc_feature: MA Experiment 20000495 PARAMETER Experiment Name: At_Guard_Cells_P Parameter: Harvest Date Value: 8/2/2002
  misc_feature: MA Experiment 20000495 PARAMETER Experiment Name: At_Guard_Cells_P Parameter: Organism Value: A. thaliana
  misc_feature: MA Experiment 20000495 PARAMETER Experiment Name: At_Guard_Cells_P Parameter: Tissue Value: Guard Cells vs. Leaves
  misc_feature: MA Experiment ID: 20000794 Result: Up-regulated in Transcription
  misc_feature: MA Experiment 20000794 PARAMETER Experiment Name: At_Petals_P Parameter: Age (day) Value: 23-25 days
  misc_feature: MA Experiment 20000794 PARAMETER Experiment Name: At_Petals_P Parameter: Plant Line Value: WS
  misc_feature: MA Experiment 20000794 PARAMETER Experiment Name: At_Petals_P Parameter: Tissue Value: Petals vs. Whole plant
atggatgagatttgggaaagagctgtagaagcggctctagatggtcaaacagataggttagctacacgaacgctaacacttgatggtgctgtgaaatgcgttcagggacgtttaccaccacctagtgttctcgagaagtttcagaatcttcagcatctttctgtagctaacatcggtgtttcttctctggaacagtttcctagacttggtaatttacagaagctaatcttatctgataatcggatcactgttggtttagagtttcttgttgaagctgggcttgattcgttctgtgatttggatttatctaataaccggatccagtttgttgaggatctagctcctttggcggagttgaagcttgtgtctcttgatctgtatgagtgtcctgtgactaggcttaaggattatcgatctagggtttttgggttgattaaaactttgaagtatttagataagactgatgctgaagggaatgagaggcctgagtctgatgatgaagatgatgaggaagatgaagaggatgaagaagaagaagaggaaggtgatgaggaggatcctggaagtggggagattgatggagatgaaagagcagaggctcctcggatgagtaatggccatagtgaaagggtagatggtgttgttgatgttgatgaggatgaagagagtgatgctgaggatgatgagtcagagcaggctactggagtgaacgggacgagttatcgggctaatggattccgtcttgaagctgttaatggggaagaagtaagggaagatgatggggatgatagtgagtctggtgaggaggaagtaggggaagataatgatgtggttgaggttcatgagattgaagatagtgagaatgaggaagatggggttgatgatgaagaagatgatgaagaggatgaggaggaagaggaagttgataatgctgatcgtggtcttggtgggtcagggagcacaagcaggttgatgaacgcaggagagattgatgggcatgaacaaggagatgacgatgaagatggtgatggcgagactggggaagatgaccaaggggttgaggatgatggagagtttgcggatgaagatgatgatgttgaagaggaggatgaagaatctggtgaagggtaccttgttcagccagtttctcaagtggaagatcatgatgctgtgggtaatgacatcgagccgatcaatgaggacaatgatccagatgaagaagaagaagtcgaagatgacctgccaattcctgaccagtccttggcttcatcatctcgcccaaagagaaaacgagatgacgatgatgacggtgaggatgatgacgatgatgatgaggaacgttga

SEQ ID NO: 70618 - protein, 447 aa, Arabidopsis thaliana
  peptide (1)..(447): Ceres Seq. ID no. 2715782
  misc_feature (215)..(397): Pfam Name: Chromadorea ALT protein Pfam Description: Chromadorea ALT protein
  misc_feature (1)..(447): Homolog of NCBI NO: 15229830 NR Description: putative protein; protein id: At3g50690.1
  misc_feature (1)..(446): Homolog of NCBI NO: 34395133 NR Description: acidic nuclear phosphoprotein-like protein [Oryza
  misc_feature (145)..(446): Homolog of NCBI NO: 34395133 NR Description: acidic nuclear phosphoprotein-like protein [Oryza
  misc_feature (2)..(240): Homolog of NCBI NO: 31126736 NR Description: putative acidic nuclear phosphoprotein [Oryza
  misc_feature (47)..(265): Homolog of NCBI NO: 32306846 NR Description: lectin associated matrix protein [Gallus gallus]
  misc_feature (25)..(269): Homolog of NCBI NO: 30580338 NR Description: Acidic leucine-rich nuclear phosphoprotein 32
  misc_feature (25)..(269): Homolog of NCBI NO: 31542131 NR Description: acidic (leucine-rich) nuclear phosphoprotein 32 member E; cerebellar postnatal development protein 1 [Mus >gi|26340390|dbj|BAC33858.1| unnamed protein product [Mus
  misc_feature (25)..(270): Homolog of NCBI NO: 18476478 NR Description: lecuine-rich acidic protein-like protein [Homo
  misc_feature (25)..(270): Homolog of NCBI NO: 13569879 NR Description: leucine-rich acidic nuclear protein like [Homo >gi|13097240|gb|AAH03380.1|AAH03380 Similar to RIKEN cDNA gene [Homo sapiens] >gi|21751321|dbj|BAC03942.1| unnamed protein
  misc_feature (6)..(238): Homolog of NCBI NO: 1552326 NR Description: APRIL [Homo sapiens]
MDEIWERAVEAALDGQTDRLATRTLTLDGAVKCVQGRLPPPSVLEKFQNLQHLSVANIGVSSLEQFPRLGNLQKLILSDNRITVGLEFLVEAGLDSFCDLDLSNNRIQFVEDLAPLAELKLVSLDLYECPVTRLKDYRSRVFGLIKTLKYLDKTDAEGNERPESDDEDDEEDEEDEEEEEEGDEEDPGSGEIDGDERAEAPRMSNGHSERVDGVVDVDEDEESDAEDDESEQATGVNGTSYRANGFRLEAVNGEEVREDDGDDSESGEEEVGEDNDVVEVHEIEDSENEEDGVDDEEDDEEDEEEEEVDNADRGLGGSGSTSRLMNAGEIDGHEQGDDDEDGDGETGEDDQGVEDDGEFADEDDDVEEEDEESGEGYLVQPVSQVEDHDAVGNDIEPINEDNDPDEEEEVEDDLPIPDQSLASSSRPKRKRDDDDDGEDDDDDDEER

SEQ ID NO: 70619 - protein, 245 aa, Arabidopsis thaliana
  peptide (1)..(245): Ceres Seq. ID no. 2715783
  misc_feature (13)..(195): Pfam Name: Chromadorea ALT protein Pfam Description: Chromadorea ALT protein
  misc_feature (1)..(245): Homolog of NCBI NO: 15229830 NR Description: putative protein; protein id: At3g50690.1
  misc_feature (1)..(244): Homolog of NCBI NO: 34395133 NR Description: acidic nuclear phosphoprotein-like protein [Oryza
  misc_feature (1)..(244): Homolog of NCBI NO: 34395133 NR Description: acidic nuclear phosphoprotein-like protein [Oryza
  misc_feature (1)..(38): Homolog of NCBI NO: 31126736 NR Description: putative acidic nuclear phosphoprotein [Oryza
  misc_feature (1)..(63): Homolog of NCBI NO: 32306846 NR Description: lectin associated matrix protein [Gallus gallus]
  misc_feature (1)..(67): Homolog of NCBI NO: 30580338 NR Description: Acidic leucine-rich nuclear phosphoprotein 32
  misc_feature (1)..(67): Homolog of NCBI NO: 31542131 NR Description: acidic (leucine-rich) nuclear phosphoprotein 32 member E; cerebellar postnatal development protein 1 [Mus >gi|26340390|dbj|BAC33858.1| unnamed protein product [Mus
  misc_feature (1)..(68): Homolog of NCBI NO: 18476478 NR Description: lecuine-rich acidic protein-like protein [Homo
  misc_feature (1)..(68): Homolog of NCBI NO: 13569879 NR Description: leucine-rich acidic nuclear protein like [Homo >gi|13097240|gb|AAH03380.1|AAH03380 Similar to RIKEN cDNA gene [Homo sapiens] >gi|21751321|dbj|BAC03942.1| unnamed protein
  misc_feature (1)..(36): Homolog of NCBI NO: 1552326 NR Description: APRIL [Homo sapiens]
MSNGHSERVDGVVDVDEDEESDAEDDESEQATGVNGTSYRANGFRLEAVNGEEVREDDGDDSESGEEEVGEDNDVVEVHEIEDSENEEDGVDDEEDDEEDEEEEEVDNADRGLGGSGSTSRLMNAGEIDGHEQGDDDEDGDGETGEDDQGVEDDGEFADEDDDVEEEDEESGEGYLVQPVSQVEDHDAVGNDIEPINEDNDPDEEEEVEDDLPIPDQSLASSSRPKRKRDDDDDGEDDDDDDEER

SEQ ID NO: 70620 - DNA, 990 bp, Arabidopsis thaliana
  misc_feature (1)..(990): Ceres Seq. ID no. 2715797
  misc_feature: MA Experiment ID: 20001451 Result: Up-regulated in Transcription
  misc_feature: MA Experiment 20001451 PARAMETER Experiment Name: At_Far-red-induction_P Parameter: Age (day) Value: 7
  misc_feature: MA Experiment 20001451 PARAMETER Experiment Name: At_Far-red-induction_P Parameter: Light Value: Far-red vs. White
  misc_feature: MA Experiment 20001451 PARAMETER Experiment Name: At_Far-red-induction_P Parameter: Organism Value: A. thaliana
  misc_feature: MA Experiment 20001451 PARAMETER Experiment Name: At_Far-red-induction_P Parameter: Plant Line Value: Columbia
  misc_feature: MA Experiment 20001451 PARAMETER Experiment Name: At_Far-red-induction_P Parameter: Timepoint (hr) Value: 24
  misc_feature: MA Experiment 20001451 PARAMETER Experiment Name: At_Far-red-induction_P Parameter: Tissue Value: Whole Plant
  misc_feature: Pfam Name: DUF6 Pfam Description: Integral membrane protein DUF6
atggtggtggttcaaatagctacggcagggttaaacatatttttcaagctagcaatggaagatggtatgaacccaagtgtactcgtggcctatcgtctcttgtttgctacacttttcatgattcctatatgcttcatctttcaaagtgtggtgataccaagtatcctaaccattacgggtctagctctaacgtcagcaacattcacctctgctgctggcgttctcactccattggtcactttcatcttcgctgcacttcttaggatggagagtgtacggcttggatcgagcgtagggctggctaaggtttttggaacattgtttggtgttggtggagctcttgtctttatattctatagaggaatagagatccgactatggtcaactcacgttaacctagtgaaccaaccacgtgactcctcacgtgatgctaccactcaccatatttccatccttggggctcttctagtttttgggggaaacatttccatctcactttggtttttattgcaggttaagataagcaaacaatttggagggccttattggaacgcgactctaatgaacatgatgggaggcgtagtggctatgcttgtcgctctttgctgggaacacgatttagatgaatggagattaggatggaatatcagactattaaccattgcttatgcggcaattctgatttccgggatggtggtagcagtcaacgcatggtgcattgagtctagaggaccgttatttgtatcggtatttagccctgtaggacttgtgatcgtagctcttgttggatcatttttgctagatgaaacacttcatttggggagcataattggtacagtgattatcgttggagcattatacattgtgctatgggctaaaaacaaggaaatgaagagtatgcttacgacatcggatcataatgaaacaaataagactagcaaagatatcacagtcaacaatctcccaacattaagtacaaatgtcccttga

SEQ ID NO: 70621 - protein, 329 aa, Arabidopsis thaliana
  peptide (1)..(329): Ceres Seq. ID no. 2715798
  misc_feature: Pfam Name: DUF6 Pfam Description: Integral membrane protein DUF6
  misc_feature (1)..(329): Homolog of NCBI NO: 15221295 NR Description: MtN21-like protein; protein id: At1g68170.1
  misc_feature (1)..(329): Homolog of NCBI NO: 15222541 NR Description: MtN21 nodulin protein, putative; protein id: [Arabidopsis thaliana] >gi|11761475|gb|AAG40088.1|AC079374_4
  misc_feature (1)..(289): Homolog of NCBI NO: 25518509 NR Description: hypothetical protein F4F7.12 [imported] -
  misc_feature (1)..(296): Homolog of NCBI NO: 5777632 NR Description: CAA303720.1 protein [Oryza sativa]
  misc_feature (1)..(297): Homolog of NCBI NO: 34894436 NR Description: putative CAA303720.1 protein [Oryza sativa
  misc_feature (33)..(317): Homolog of NCBI NO: 38605909 NR Description: OSJNBb0088C09.3 [Oryza sativa (japonica
  misc_feature (1)..(46): Homolog of NCBI NO: 38605909 NR Description: OSJNBb0088C09.3 [Oryza sativa (japonica
  misc_feature (55)..(326): Homolog of NCBI NO: 15217505 NR Description: putative nodulin protein, N21; protein id: supported by cDNA: 39581. [Arabidopsis thaliana] putative nodulin protein N21 [Arabidopsis thaliana]
  misc_feature (1)..(73): Homolog of NCBI NO: 15217505 NR Description: putative nodulin protein, N21; protein id: supported by cDNA: 39581. [Arabidopsis thaliana] putative nodulin protein N21 [Arabidopsis thaliana]
  misc_feature (55)..(326): Homolog of NCBI NO: 21593499 NR Description: putative nodulin protein, N21 [Arabidopsis
MVVVQIATAGLNIFFKLAMEDGMNPSVLVAYRLLFATLFMIPICFIFQSVVIPSILTITGLALTSATFTSAAGVLTPLVTFIFAALLRMESVRLGSSVGLAKVFGTLFGVGGALVFIFYRGIEIRLWSTHVNLVNQPRDSSRDATTHHISILGALLVFGGNISISLWFLLQVKISKQFGGPYWNATLMNMMGGVVAMLVALCWEHDLDEWRLGWNIRLLTIAYAAILISGMVVAVNAWCIESRGPLFVSVFSPVGLVIVALVGSFLLDETLHLGSIIGTVIIVGALYIVLWAKNKEMKSMLTTSDHNETNKTSKDITVNNLPTLSTNVP

SEQ ID NO: 70622 - protein, 311 aa, Arabidopsis thaliana
  peptide (1)..(311): Ceres Seq. ID no. 2715799
  misc_feature: Pfam Name: DUF6 Pfam Description: Integral membrane protein DUF6
  misc_feature (1)..(311): Homolog of NCBI NO: 15221295 NR Description: MtN21-like protein; protein id: At1g68170.1
  misc_feature (1)..(311): Homolog of NCBI NO: 15222541 NR Description: MtN21 nodulin protein, putative; protein id: [Arabidopsis thaliana] >gi|11761475|gb|AAG40088.1|AC079374_4
  misc_feature (1)..(271): Homolog of NCBI NO: 25518509 NR Description: hypothetical protein F4F7.12 [imported] -
  misc_feature (1)..(278): Homolog of NCBI NO: 5777632 NR Description: CAA303720.1 protein [Oryza sativa]
  misc_feature (1)..(279): Homolog of NCBI NO: 34894436 NR Description: putative CAA303720.1 protein [Oryza sativa
  misc_feature (15)..(299): Homolog of NCBI NO: 38605909 NR Description: OSJNBb0088C09.3 [Oryza sativa (japonica
  misc_feature (1)..(28): Homolog of NCBI NO: 38605909 NR Description: OSJNBb0088C09.3 [Oryza sativa (japonica
  misc_feature (37)..(308): Homolog of NCBI NO: 15217505 NR Description: putative nodulin protein, N21; protein id: supported by cDNA: 39581. [Arabidopsis thaliana] putative nodulin protein N21 [Arabidopsis thaliana]
  misc_feature (1)..(55): Homolog of NCBI NO: 15217505 NR Description: putative nodulin protein, N21; protein id: supported by cDNA: 39581. [Arabidopsis thaliana] putative nodulin protein N21 [Arabidopsis thaliana]
  misc_feature (37)..(308): Homolog of NCBI NO: 21593499 NR Description: putative nodulin protein, N21 [Arabidopsis
MEDGMNPSVLVAYRLLFATLFMIPICFIFQSVVIPSILTITGLALTSATFTSAAGVLTPLVTFIFAALLRMESVRLGSSVGLAKVFGTLFGVGGALVFIFYRGIEIRLWSTHVNLVNQPRDSSRDATTHHISILGALLVFGGNISISLWFLLQVKISKQFGGPYWNATLMNMMGGVVAMLVALCWEHDLDEWRLGWNIRLLTIAYAAILISGMVVAVNAWCIESRGPLFVSVFSPVGLVIVALVGSFLLDETLHLGSIIGTVIIVGALYIVLWAKNKEMKSMLTTSDHNETNKTSKDITVNNLPTLSTNVP

SEQ ID NO: 70623 - protein, 307 aa, Arabidopsis thaliana
  peptide (1)..(307): Ceres Seq. ID no. 2715800
  misc_feature: Pfam Name: DUF6 Pfam Description: Integral membrane protein DUF6
  misc_feature (1)..(307): Homolog of NCBI NO: 15222541 NR Description: MtN21 nodulin protein, putative; protein id: [Arabidopsis thaliana] >gi|11761475|gb|AAG40088.1|AC079374_4
  misc_feature (1)..(267): Homolog of NCBI NO: 25518509 NR Description: hypothetical protein F4F7.12 [imported] -
  misc_feature (1)..(274): Homolog of NCBI NO: 5777632 NR Description: CAA303720.1 protein [Oryza sativa]
  misc_feature (1)..(275): Homolog of NCBI NO: 34894436 NR Description: putative CAA303720.1 protein [Oryza sativa
  misc_feature (11)..(295): Homolog of NCBI NO: 38605909 NR Description: OSJNBb0088C09.3 [Oryza sativa (japonica
  misc_feature (1)..(24): Homolog of NCBI NO: 38605909 NR Description: OSJNBb0088C09.3 [Oryza sativa (japonica
  misc_feature (33)..(304): Homolog of NCBI NO: 15217505 NR Description: putative nodulin protein, N21; protein id: supported by cDNA: 39581. [Arabidopsis thaliana] putative nodulin protein N21 [Arabidopsis thaliana]
  misc_feature (1)..(51): Homolog of NCBI NO: 15217505 NR Description: putative nodulin protein, N21; protein id: supported by cDNA: 39581. [Arabidopsis thaliana] putative nodulin protein N21 [Arabidopsis thaliana]
  misc_feature (33)..(304): Homolog of NCBI NO: 21593499 NR Description: putative nodulin protein, N21 [Arabidopsis
  misc_feature (1)..(307): Homolog of NCBI NO: 15221295 NR Description: MtN21-like protein; protein id: At1g68170.1
MNPSVLVAYRLLFATLFMIPICFIFQSVVIPSILTITGLALTSATFTSAAGVLTPLVTFIFAALLRMESVRLGSSVGLAKVFGTLFGVGGALVFIFYRGIEIRLWSTHVNLVNQPRDSSRDATTHHISILGALLVFGGNISISLWFLLQVKISKQFGGPYWNATLMNMMGGVVAMLVALCWEHDLDEWRLGWNIRLLTIAYAAILISGMVVAVNAWCIESRGPLFVSVFSPVGLVIVALVGSFLLDETLHLGSIIGTVIIVGALYIVLWAKNKEMKSMLTTSDHNETNKTSKDITVNNLPTLSTNVP

SEQ ID NO: 70624 - DNA, 1665 bp, Arabidopsis thaliana
  misc_feature (1)..(1665): Ceres Seq. ID no. 2715851
  misc_feature: MA Experiment ID: 20000307 Result: Up-regulated in Transcription
  misc_feature: MA Experiment 20000307 PARAMETER Experiment Name: At_Germinating_Seeds_Sub_P Parameter: Age (hr) Value: 24 vs. 0
  misc_feature: MA Experiment 20000307 PARAMETER Experiment Name: At_Germinating_Seeds_Sub_P Parameter: Organism Value: A. thaliana
  misc_feature: MA Experiment 20000307 PARAMETER Experiment Name: At_Germinating_Seeds_Sub_P Parameter: Plant Line Value: WS
  misc_feature: MA Experiment 20000307 PARAMETER Experiment Name: At_Germinating_Seeds_Sub_P Parameter: Tissue Value: Germinating Seeds
  misc_feature: MA Experiment ID: 20000315 Result: Down-regulated in Transcription
  misc_feature: MA Experiment 20000315 PARAMETER Experiment Name: At_14day_Shoots-Roots_Sub_P Parameter: Age (day) Value: 14
  misc_feature: MA Experiment 20000315 PARAMETER Experiment Name: At_14day_Shoots-Roots_Sub_P Parameter: Organism Value: A. thaliana
  misc_feature: MA Experiment 20000315 PARAMETER Experiment Name: At_14day_Shoots-Roots_Sub_P Parameter: Plant Line Value: WS
  misc_feature: MA Experiment 20000315 PARAMETER Experiment Name: At_14day_Shoots-Roots_Sub_P Parameter: Tissue Value: Shoots vs. Whole Plant
  misc_feature: MA Experiment ID: 20000327 Result: Down-regulated in Transcription
  misc_feature: MA Experiment 20000327 PARAMETER Experiment Name: At_42deg_Heat_Sub_P Parameter: Age (day) Value: 14
  misc_feature: MA Experiment 20000327 PARAMETER Experiment Name: At_42deg_Heat_Sub_P Parameter: Organism Value: A. thaliana
  misc_feature: MA Experiment 20000327 PARAMETER Experiment Name: At_42deg_Heat_Sub_P Parameter: Plant Line Value: WS
  misc_feature: MA Experiment 20000327 PARAMETER Experiment Name: At_42deg_Heat_Sub_P Parameter: Temperature (deg C) Value: 42 vs. 22
  misc_feature: MA Experiment 20000327 PARAMETER Experiment Name: At_42deg_Heat_Sub_P Parameter: Timepoint (hr) Value: 1
  misc_feature: MA Experiment 20000327 PARAMETER Experiment Name: At_42deg_Heat_Sub_P Parameter: Tissue Value: Aerial
  misc_feature: MA Experiment ID: 20000328 Result: Down-regulated in Transcription
  misc_feature: MA Experiment 20000328 PARAMETER Experiment Name: At_42deg_Heat_Sub_P Parameter: Age (day) Value: 14
  misc_feature: MA Experiment 20000328 PARAMETER Experiment Name: At_42deg_Heat_Sub_P Parameter: Organism Value: A. thaliana
  misc_feature: MA Experiment 20000328 PARAMETER Experiment Name: At_42deg_Heat_Sub_P Parameter: Plant Line Value: WS
  misc_feature: MA Experiment 20000328 PARAMETER Experiment Name: At_42deg_Heat_Sub_P Parameter: Temperature (deg C) Value: 42 vs. 22
  misc_feature: MA Experiment 20000328 PARAMETER Experiment Name: At_42deg_Heat_Sub_P Parameter: Timepoint (hr) Value: 6
  misc_feature: MA Experiment 20000328 PARAMETER Experiment Name: At_42deg_Heat_Sub_P Parameter: Tissue Value: Aerial
  misc_feature: MA Experiment ID: 20000347 Result: Up-regulated in Transcription
  misc_feature: MA Experiment 20000347 PARAMETER Experiment Name: At_2mM_SA_Sub_P Parameter: Age (day) Value: 14
  misc_feature: MA Experiment 20000347 PARAMETER Experiment Name: At_2mM_SA_Sub_P Parameter: Organism Value: A. thaliana
  misc_feature: MA Experiment 20000347 PARAMETER Experiment Name: At_2mM_SA_Sub_P Parameter: Plant Line Value: WS
  misc_feature: MA Experiment 20000347 PARAMETER Experiment Name: At_2mM_SA_Sub_P Parameter: Timepoint (hr) Value: 6
  misc_feature: MA Experiment 20000347 PARAMETER Experiment Name: At_2mM_SA_Sub_P Parameter: Tissue Value: Aerial
  misc_feature: MA Experiment 20000347 PARAMETER Experiment Name: At_2mM_SA_Sub_P Parameter: Treatment Value: 2mM SA vs. No Treatment
  misc_feature: MA Experiment ID: 20000355 Result: Down-regulated in Transcription
  misc_feature: MA Experiment 20000355 PARAMETER Experiment Name: At_Siliques_Sub_P Parameter: Age (day) Value: 21
  misc_feature: MA Experiment 20000355 PARAMETER Experiment Name: At_Siliques_Sub_P Parameter: Organism Value: A. thaliana
  misc_feature: MA Experiment 20000355 PARAMETER Experiment Name: At_Siliques_Sub_P Parameter: Plant Line Value: WS
  misc_feature: MA Experiment 20000355 PARAMETER Experiment Name: At_Siliques_Sub_P Parameter: Tissue Value: Less Than 5mm Siliques vs. Whole Plant
  misc_feature: MA Experiment ID: 20000440 Result: Down-regulated in Transcription
  misc_feature: MA Experiment 20000440 PARAMETER Experiment Name: At_Closed-Flower__Sub_P Parameter: Tissue Value: Closed Flower vs. Whole Plant
  misc_feature: Pfam Name: TBC Pfam Description: TBC domain
atgaaagctttgagacggattcaaacgacgtcttcgtcttctaatccttcatcgccattatcgtctcctccttcttcttcatcatcatcctcgtggatccaaatacgttctgctctcttcgttgttgcttcttcatctcctgcttcttgttctgatcggcctcgtcttaaatcaccatggtctcggaggaaaaggaaaaggccacttagacctcagcaatggaagaggttttttactcctgacggtagattgcggaatggaggagtggatttgttgaagaaagttcgaagtagaggtattgagccaagcattcggctagaggtgtggccattccttcttggattgtatggttttaatagttctaaagaagagagagttactataagaaaccggaggagctcttttttcgattctttagctcatcggttttgttacaaatgcagaaaggagtatgagagactacgtaggcagtgcaaacggcttcaaaaacacaataacgggactcgtaagttatacaacggcagtgaaactatccaagatgagtatgattggcctcgagttcaagacactgacagttcatgttctgatgaagttgttagtgcccgtgagtctctctctagtgacgaagacattactgaagatattgggtatatgagtgaggtttcatgtacagttgagagagacgacggtagtagttcaagacgaatcaccaatgctactatctctacacttaattccgagtcatcagattcagattcttcagatgagagtgaagtggtacaggtctttcaatcttctgctactccggatgtgaatagtacttatccagccagttcatctattccccggacagaagaggattttgtgacgtggcagcgtattatccgtctagacgccgtgcgtgctgactcagagtggacctcctattctccatcccaggcagttatatcggaggatagagcatgtcgtgccgctgaggcggttgggttgaaagattacaatcacctggaaccgtacaaaatctttcaagctgcacggctagttgctgttcttgaagcttatgctttgtatgaccctgacattggatattgccaaggaatgagtgatcttctctctcctatactctctgtaatccctgatgaccatgaagtcttttggtgtttcgtcgggttcatgaagaaagctcgtcacaatttcagacttgacgaggttggaatcagaagacaactcaacatagtctcaaagataatcaaatctaaagactctcagctttataggcaccttgagaaactccaagctgaagactgtttctttgtatacagaatggttgttgtgatgttcagacgagagctgacacttgatcagacattgtgtctatgggaagtaatgtgggcagatcaagccgcaatcagagccgggatgggaaaatccgcgtggagtaggataaggcaacgtgcacctcccactgatgatttggtgctctatgcaatagcggcctcggtgttgcaaagaaggaaacgtattatagaaaggtataacagcatggatgagattttaagggagtgccaaagtatggcagggcagttagatgtgtggaagctccttgatgatgcacatgacctcgttgttactctacacaccaagattgaacattcattctcataa

SEQ ID NO: 70625 - protein, 554 aa, Arabidopsis thaliana
  peptide (1)..(554): Ceres Seq. ID no. 2715852
  misc_feature: Pfam Name: TBC Pfam Description: TBC domain
  misc_feature (1)..(554): Homolog of NCBI NO: 15229125 NR Description: GTPase activating -like protein; protein id:
  misc_feature (194)..(550): Homolog of NCBI NO: 9759196 NR Description: GTPase activator protein of Rab-like small
  misc_feature (1)..(214): Homolog of NCBI NO: 9759196 NR Description: GTPase activator protein of Rab-like small
  misc_feature (148)..(552): Homolog of NCBI NO: 15238518 NR Description: GTPase activator-like protein of Rab-like small protein id: At5g24390.1 [Arabidopsis thaliana]
  misc_feature (194)..(550): Homolog of NCBI NO: 15238777 NR Description: GTPase activator protein of Rab-like small protein; protein id: At5g53570.1, supported by cDNA: gi_14517421, by cDNA: gi_20908079 [Arabidopsis thaliana]
  misc_feature (7)..(214): Homolog of NCBI NO: 15238777 NR Description: GTPase activator protein of Rab-like small protein; protein id: At5g53570.1, supported by cDNA: gi_14517421, by cDNA: gi_20908079 [Arabidopsis thaliana]
  misc_feature (1)..(30): Homolog of NCBI NO: 15238777 NR Description: GTPase activator protein of Rab-like small protein; protein id: At5g53570.1, supported by cDNA: gi_14517421, by cDNA: gi_20908079 [Arabidopsis thaliana]
  misc_feature (150)..(549): Homolog of NCBI NO: 15238237 NR Description: GTPase activator protein of Rab-like small
  misc_feature (188)..(550): Homolog of NCBI NO: 37536102 NR Description: putative GTPase activating protein [Oryza sativa
  misc_feature (1)..(250): Homolog of NCBI NO: 15238518 NR Description: GTPase activator-like protein of Rab-like small protein id: At5g24390.1 [Arabidopsis thaliana]
MKALRRIQTTSSSSNPSSPLSSPPSSSSSSSWIQIRSALFVVASSSPASCSDRPRLKSPWSRRKRKRPLRPQQWKRFFTPDGRLRNGGVDLLKKVRSRGIEPSIRLEVWPFLLGLYGFNSSKEERVTIRNRRSSFFDSLAHRFCYKCRKEYERLRRQCKRLQKHNNGTRKLYNGSETIQDEYDWPRVQDTDSSCSDEVVSARESLSSDEDITEDIGYMSEVSCTVERDDGSSSRRITNATISTLNSESSDSDSSDESEVVQVFQSSATPDVNSTYPASSSIPRTEEDFVTWQRIIRLDAVRADSEWTSYSPSQAVISEDRACRAAEAVGLKDYNHLEPYKIFQAARLVAVLEAYALYDPDIGYCQGMSDLLSPILSVIPDDHEVFWCFVGFMKKARHNFRLDEVGIRRQLNIVSKIIKSKDSQLYRHLEKLQAEDCFFVYRMVVVMFRRELTLDQTLCLWEVMWADQAAIRAGMGKSAWSRIRQRAPPTDDLVLYAIAASVLQRRKRIIERYNSMDEILRECQSMAGQLDVWKLLDDAHDLVVTLHTKIEHSFS

SEQ ID NO: 70626 - protein, 337 aa, Arabidopsis thaliana
  peptide (1)..(337): Ceres Seq. ID no. 2715853
  misc_feature: Pfam Name: TBC Pfam Description: TBC domain
  misc_feature (1)..(337): Homolog of NCBI NO: 15229125 NR Description: GTPase activating -like protein; protein id:
  misc_feature (1)..(333): Homolog of NCBI NO: 9759196 NR Description: GTPase activator protein of Rab-like small
  misc_feature (1)..(335): Homolog of NCBI NO: 15238518 NR Description: GTPase activator-like protein of Rab-like small protein id: At5g24390.1 [Arabidopsis thaliana]
  misc_feature (1)..(333): Homolog of NCBI NO: 15238777 NR Description: GTPase activator protein of Rab-like small protein; protein id: At5g53570.1, supported by cDNA: gi_14517421, by cDNA: gi_20908079 [Arabidopsis thaliana]
  misc_feature (1)..(332): Homolog of NCBI NO: 15238237 NR Description: GTPase activator protein of Rab-like small
  misc_feature (1)..(333): Homolog of NCBI NO: 37536102 NR Description: putative GTPase activating protein [Oryza sativa
  misc_feature (1)..(33): Homolog of NCBI NO: 15238518 NR Description: GTPase activator-like protein of Rab-like small protein id: At5g24390.1 [Arabidopsis thaliana]
  misc_feature (1)..(38): Homolog of NCBI NO: 34893986 NR Description: P0672D08.1 [Oryza sativa (japonica
  misc_feature (117)..(248): Homolog of NCBI NO: 34893986 NR Description: P0672D08.1 [Oryza sativa (japonica
  misc_feature (128)..(248): Homolog of NCBI NO: 30688016 NR Description: expressed protein [Arabidopsis thaliana]
MSEVSCTVERDDGSSSRRITNATISTLNSESSDSDSSDESEVVQVFQSSATPDVNSTYPASSSIPRTEEDFVTWQRIIRLDAVRADSEWTSYSPSQAVISEDRACRAAEAVGLKDYNHLEPYKIFQAARLVAVLEAYALYDPDIGYCQGMSDLLSPILSVIPDDHEVFWCFVGFMKKARHNFRLDEVGIRRQLNIVSKIIKSKDSQLYRHLEKLQAEDCFFVYRMVVVMFRRELTLDQTLCLWEVMWADQAAIRAGMGKSAWSRIRQRAPPTDDLVLYAIAASVLQRRKRIIERYNSMDEILRECQSMAGQLDVWKLLDDAHDLVVTLHTKIEHSFS

SEQ ID NO: 70627 - DNA, 1542 bp, Arabidopsis thaliana
  misc_feature (1)..(1542): Ceres Seq. ID no. 2716118
  misc_feature: MA Experiment ID: 20000180 Result: Up-regulated in Transcription
  misc_feature: MA Experiment 20000180 PARAMETER Experiment Name: At_Germinating_Seeds_P Parameter: Age (hr) Value: 24 vs. 0
  misc_feature: MA Experiment 20000180 PARAMETER Experiment Name: At_Germinating_Seeds_P Parameter: Tissue Value: Germinating Seeds
  misc_feature: MA Experiment ID: 20000227 Result: Up-regulated in Transcription
  misc_feature: MA Experiment 20000227 PARAMETER Experiment Name: At_Root-Tips-vs-Tops_P Parameter: Tissue Value: Root Tips vs. Root Tops
atgtttcaggatgggtcaagatcctcaggaagtggcagaggactgtcgacaacggctgtatcaaatggtggatggagaacccgtgggtttttgcgcggttggcagatccagaataccttatttaacaacatcaagttcatgattctctgctgcttcgtgaccattctcatcctacttggcacaatccgtgttgggaaccttggaagctccaacgccgactctgttaatcagagtttcatcaaggaaaccattccgattctcgcggagatcccctctgattcgcattcgacggacttggctgagcctcctaaagctgatgttagtcccaatgcaacgtatactctagagccaagaatcgcggagatcccatctgatgtgcattcaacggacttggttgagctgcctaaagctgatattagtcccaatgcaacgtatactctaggccccagaatcgcggagatcccatctgattcgcatttgacagacttgcttgagccgcctaaagctgatattagtcccaatgcgacatatactctagggcccaaaatcaccaactgggatagtcaacgcaaggtatggctgaatcagaaccctgagtttcctaatattgtcaatggcaaagctcgaatattgcttctcacagggtcttcccccggaccctgtgataaaccaattggaaactattatctattgaaagctgtgaagaacaagattgattactgtagactccacgggatagagattgtgtataacatggcgaatttggatgaggaactctcagggtattggacgaaattacctatgattaggacattaatgctgtctcatccagaagtagaatggatttggtggatggatagtgatgctttgttcactgatatactgtttgagatcccgttgcctcggtacgaaaatcataatctggtgatacacggttatccagacttgctgttcaaccaaaaatcatgggttgcattgaacacgggtatctttctgttgagaaattgtcagtggtcattggatttattagatgcttgggccccaatgggaccaaaagggaagatccgtgacgaaactgggaagatactgacagcttatctgaaaggcaggccagcatttgaggccgatgatcaatcggcgttgatatatctcttgctttcgcagaaggaaaaatggatagagaaggtttatgtggagaatcaatactacttgcacgggttttgggaaggtttggttgacaggtatgaagagatgatagagaagtatcatccaggattgggcgatgagagatggccctttgtgacacattttgtagggtgcaaaccgtgtggcagctatgctgattacgcagtcgatagatgcttcaagagcatggagagggcttttaattttgcagataatcaagtgctgaagctgtatgggtttagccacaggggactgttgagtcccaagattaaaaggatcagaaatgagacagtctctcctctggagtcagtagacaagtttgatattcgaagaatgcacatggaaaccaaaccatag

SEQ ID NO: 70628 - protein, 513 aa, Arabidopsis thaliana
  peptide (1)..(513): Ceres Seq. ID no. 2716119
  misc_feature (206)..(450): Pfam Name: galactosyl transferase GMA12/MNN10 family Pfam Description: galactosyl transferase GMA12/MNN10 family
  misc_feature (1)..(513): Homolog of NCBI NO: 25349326 NR Description: hypothetical protein F6A14.20 - Arabidopsis >gi|6730715|gb|AAF27110.1|AC011809_19 Similar to
  misc_feature (4)..(513): Homolog of NCBI NO: 15221850 NR Description: alpha galactosyltransferase, putative; protein
  misc_feature (151)..(513): Homolog of NCBI NO: 15221224 NR Description: putative alpha galactosyltransferase; protein id:
  misc_feature (1)..(121): Homolog of NCBI NO: 15221224 NR Description: putative alpha galactosyltransferase; protein id:
  misc_feature (151)..(506): Homolog of NCBI NO: 15240848 NR Description: alpha galactosyltransferase protein; protein id: [Arabidopsis thaliana] >gi|9716848|emb|CAC01676.1| putative golgi [Arabidopsis thaliana] >gi|9759594|dbj|BAB11451.1| alpha
  misc_feature (6)..(119): Homolog of NCBI NO: 15240848 NR Description: alpha galactosyltransferase protein; protein id: [Arabidopsis thaliana] >gi|9716848|emb|CAC01676.1| putative golgi [Arabidopsis thaliana] >gi|9759594|dbj|BAB11451.1| alpha
  misc_feature (119)..(153): Homolog of NCBI NO: 15221224 NR Description: putative alpha galactosyltransferase; protein id:
  misc_feature (105)..(151): Homolog of NCBI NO: 15240848 NR Description: alpha galactosyltransferase protein; protein id: [Arabidopsis thaliana] >gi|9716848|emb|CAC01676.1| putative golgi [Arabidopsis thaliana] >gi|9759594|dbj|BAB11451.1| alpha
  misc_feature (165)..(504): Homolog of NCBI NO: 18411962 NR Description: putative glycosyltransferase; protein id: supported by cDNA: gi_16209668 [Arabidopsis thaliana]
  misc_feature (165)..(504): Homolog of NCBI NO: 25349323 NR Description: probable glycosyltransferase [imported] - thaliana >gi|3892054|gb|AAC78266.1|AAC78266 putative [Arabidopsis thaliana] >gi|7269010|emb|CAB80743.1| putative
MFQDGSRSSGSGRGLSTTAVSNGGWRTRGFLRGWQIQNTLFNNIKFMILCCFVTILILLGTIRVGNLGSSNADSVNQSFIKETIPILAEIPSDSHSTDLAEPPKADVSPNATYTLEPRIAEIPSDVHSTDLVELPKADISPNATYTLGPRIAEIPSDSHLTDLLEPPKADISPNATYTLGPKITNWDSQRKVWLNQNPEFPNIVNGKARILLLTGSSPGPCDKPIGNYYLLKAVKNKIDYCRLHGIEIVYNMANLDEELSGYWTKLPMIRTLMLSHPEVEWIWWMDSDALFTDILFEIPLPRYENHNLVIHGYPDLLFNQKSWVALNTGIFLLRNCQWSLDLLDAWAPMGPKGKIRDETGKILTAYLKGRPAFEADDQSALIYLLLSQKEKWIEKVYVENQYYLHGFWEGLVDRYEEMIEKYHPGLGDERWPFVTHFVGCKPCGSYADYAVDRCFKSMERAFNFADNQVLKLYGFSHRGLLSPKIKRIRNETVSPLESVDKFDIRRMHMETKP

SEQ ID NO: 70629 - protein, 467 aa, Arabidopsis thaliana
  peptide (1)..(467): Ceres Seq. ID no. 2716120
  misc_feature (160)..(404): Pfam Name: galactosyl transferase GMA12/MNN10 family Pfam Description: galactosyl transferase GMA12/MNN10 family
  misc_feature (1)..(467): Homolog of NCBI NO: 25349326 NR Description: hypothetical protein F6A14.20 - Arabidopsis >gi|6730715|gb|AAF27110.1|AC011809_19 Similar to
  misc_feature (1)..(467): Homolog of NCBI NO: 15221850 NR Description: alpha galactosyltransferase, putative; protein
  misc_feature (105)..(467): Homolog of NCBI NO: 15221224 NR Description: putative alpha galactosyltransferase; protein id:
  misc_feature (1)..(75): Homolog of NCBI NO: 15221224 NR Description: putative alpha galactosyltransferase; protein id:
  misc_feature (105)..(460): Homolog of NCBI NO: 15240848 NR Description: alpha galactosyltransferase protein; protein id: [Arabidopsis thaliana] >gi|9716848|emb|CAC01676.1| putative golgi [Arabidopsis thaliana] >gi|9759594|dbj|BAB11451.1| alpha
  misc_feature (1)..(73): Homolog of NCBI NO: 15240848 NR Description: alpha galactosyltransferase protein; protein id: [Arabidopsis thaliana] >gi|9716848|emb|CAC01676.1| putative golgi [Arabidopsis thaliana] >gi|9759594|dbj|BAB11451.1| alpha
  misc_feature (73)..(107): Homolog of NCBI NO: 15221224 NR Description: putative alpha galactosyltransferase; protein id:
  misc_feature (59)..(105): Homolog of NCBI NO: 15240848 NR Description: alpha galactosyltransferase protein; protein id: [Arabidopsis thaliana] >gi|9716848|emb|CAC01676.1| putative golgi [Arabidopsis thaliana] >gi|9759594|dbj|BAB11451.1| alpha
  misc_feature (119)..(458): Homolog of NCBI NO: 18411962 NR Description: putative glycosyltransferase; protein id: supported by cDNA: gi_16209668 [Arabidopsis thaliana]
  misc_feature (119)..(458): Homolog of NCBI NO: 25349323 NR Description: probable glycosyltransferase [imported] - thaliana >gi|3892054|gb|AAC78266.1|AAC78266 putative [Arabidopsis thaliana] >gi|7269010|emb|CAB80743.1| putative
MILCCFVTILILLGTIRVGNLGSSNADSVNQSFIKETIPILAEIPSDSHSTDLAEPPKADVSPNATYTLEPRIAEIPSDVHSTDLVELPKADISPNATYTLGPRIAEIPSDSHLTDLLEPPKADISPNATYTLGPKITNWDSQRKVWLNQNPEFPNIVNGKARILLLTGSSPGPCDKPIGNYYLLKAVKNKIDYCRLHGIEIVYNMANLDEELSGYWTKLPMIRTLMLSHPEVEWIWWMDSDALFTDILFEIPLPRYENHNLVIHGYPDLLFNQKSWVALNTGIFLLRNCQWSLDLLDAWAPMGPKGKIRDETGKILTAYLKGRPAFEADDQSALIYLLLSQKEKWIEKVYVENQYYLHGFWEGLVDRYEEMIEKYHPGLGDERWPFVTHFVGCKPCGSYADYAVDRCFKSMERAFNFADNQVLKLYGFSHRGLLSPKIKRIRNETVSPLESVDKFDIRRMHMETKP

SEQ ID NO: 70630 - protein, 262 aa, Arabidopsis thaliana
  peptide (1)..(262): Ceres Seq. ID no. 2716121
  misc_feature (1)..(199): Pfam Name: galactosyl transferase GMA12/MNN10 family Pfam Description: galactosyl transferase GMA12/MNN10 family
  misc_feature (1)..(262): Homolog of NCBI NO: 25349326 NR Description: hypothetical protein F6A14.20 - Arabidopsis >gi|6730715|gb|AAF27110.1|AC011809_19 Similar to
  misc_feature (1)..(262): Homolog of NCBI NO: 15221850 NR Description: alpha galactosyltransferase, putative; protein
  misc_feature (1)..(262): Homolog of NCBI NO: 15221224 NR Description: putative alpha galactosyltransferase; protein id:
  misc_feature (1)..(255): Homolog of NCBI NO: 15240848 NR Description: alpha galactosyltransferase protein; protein id: [Arabidopsis thaliana] >gi|9716848|emb|CAC01676.1| putative golgi [Arabidopsis thaliana] >gi|9759594|dbj|BAB11451.1| alpha
  misc_feature (1)..(253): Homolog of NCBI NO: 18411962 NR Description: putative glycosyltransferase; protein id: supported by cDNA: gi_16209668 [Arabidopsis thaliana]
  misc_feature (1)..(253): Homolog of NCBI NO: 25349323 NR Description: probable glycosyltransferase [imported] - thaliana >gi|3892054|gb|AAC78266.1|AAC78266 putative [Arabidopsis thaliana] >gi|7269010|emb|CAB80743.1| putative
  misc_feature (1)..(253): Homolog of NCBI NO: 15228843 NR Description: alpha galactosyltransferase-like protein; protein At3g62720.1, supported by cDNA: gi_15983425 [Arabidopsis
  misc_feature (1)..(171): Homolog of NCBI NO: 32127690 NR Description: galactomannan galactosyltransferase [Lotus
  misc_feature (158)..(229): Homolog of NCBI NO: 32127690 NR Description: galactomannan galactosyltransferase [Lotus
  misc_feature (1)..(171): Homolog of NCBI NO: 18400116 NR Description: Expressed protein; protein id: At2g22900.1, by cDNA: gi_14334701, supported by cDNA: gi_16323413 [Arabidopsis >gi|25349319|pir||C84618 hypothetical protein At2g22900
MANLDEELSGYWTKLPMIRTLMLSHPEVEWIWWMDSDALFTDILFEIPLPRYENHNLVIHGYPDLLFNQKSWVALNTGIFLLRNCQWSLDLLDAWAPMGPKGKIRDETGKILTAYLKGRPAFEADDQSALIYLLLSQKEKWIEKVYVENQYYLHGFWEGLVDRYEEMIEKYHPGLGDERWPFVTHFVGCKPCGSYADYAVDRCFKSMERAFNFADNQVLKLYGFSHRGLLSPKIKRIRNETVSPLESVDKFDIRRMHMETKP

SEQ ID NO: 70631 - DNA, 1416 bp, Arabidopsis thaliana
  misc_feature (1)..(1416): Ceres Seq. ID no. 2716166
  misc_feature: MA Experiment ID: 20000185 Result: Up-regulated in Transcription
  misc_feature: MA Experiment 20000185 PARAMETER Experiment Name: At_Roots__P Parameter: Age (day) Value: 7 vs. 21
  misc_feature: MA Experiment 20000185 PARAMETER Experiment Name: At_Roots__P Parameter: Organism Value: A. thaliana
  misc_feature: MA Experiment 20000185 PARAMETER Experiment Name: At_Roots__P Parameter: Tissue Value: Roots vs. Whole Plant
  misc_feature: MA Experiment ID: 20000227 Result: Down-regulated in Transcription
  misc_feature: MA Experiment 20000227 PARAMETER Experiment Name: At_Root-Tips-vs-Tops_P Parameter: Tissue Value: Root Tips vs. Root Tops
  misc_feature: MA Experiment ID: 20000439 Result: Up-regulated in Transcription
  misc_feature: MA Experiment 20000439 PARAMETER Experiment Name: At_Roots__P Parameter: Age (day) Value: 14 vs. 21
  misc_feature: MA Experiment 20000439 PARAMETER Experiment Name: At_Roots__P Parameter: Organism Value: A. thaliana
  misc_feature: MA Experiment 20000439 PARAMETER Experiment Name: At_Roots__P Parameter: Tissue Value: Roots vs. Whole Plant
  misc_feature: MA Experiment ID: 20000496 Result: Up-regulated in Transcription
  misc_feature: MA Experiment 20000496 PARAMETER Experiment Name: At_Guard_Cells_P Parameter: Harvest Date Value: 7/19/2002
  misc_feature: MA Experiment 20000496 PARAMETER Experiment Name: At_Guard_Cells_P Parameter: Organism Value: Canola
  misc_feature: MA Experiment 20000496 PARAMETER Experiment Name: At_Guard_Cells_P Parameter: Tissue Value: Guard Cells vs. Leaves
  misc_feature: MA Experiment ID: 20000527 Result: Down-regulated in Transcription
  misc_feature: MA Experiment 20000527 PARAMETER Experiment Name: At_10percent_PEG_P Parameter: Age (day) Value: 20
  misc_feature: MA Experiment 20000527 PARAMETER Experiment Name: At_10percent_PEG_P Parameter: Organism Value: A. thaliana
  misc_feature: MA Experiment 20000527 PARAMETER Experiment Name: At_10percent_PEG_P Parameter: Plant Line Value: WS
  misc_feature: MA Experiment 20000527 PARAMETER Experiment Name: At_10percent_PEG_P Parameter: Timepoint (day) Value: 20
  misc_feature: MA Experiment 20000527 PARAMETER Experiment Name: At_10percent_PEG_P Parameter: Tissue Value: Whole Plant
  misc_feature: MA Experiment 20000527 PARAMETER Experiment Name: At_10percent_PEG_P Parameter: Treatment Value: 10percent PEG vs. No Treatment
  misc_feature: MA Experiment ID: 20000794 Result: Down-regulated in Transcription
  misc_feature: MA Experiment 20000794 PARAMETER Experiment Name: At_Petals_P Parameter: Age (day) Value: 23-25 days
  misc_feature: MA Experiment 20000794 PARAMETER Experiment Name: At_Petals_P Parameter: Plant Line Value: WS
  misc_feature: MA Experiment 20000794 PARAMETER Experiment Name: At_Petals_P Parameter: Tissue Value: Petals vs. Whole plant
atggatgaggctaaagaggaaaatcgaagactaaagtcatcattgagtaaaatcaagaaagattttgacatccttcaaacacaatacaaccaattaatggccaaacataacgaaccaaccaagttccaatcaaaagggcatcatcaagacaaaggcgaagatgaagacagagaaaaagttaacgaacgtgaagaacttgtctcgttgagcctaggcagacggttaaattcagaggttccaagtggttcgaataaagaagaaaaaaataaagatgttgaagaagcggaaggtgacagaaattatgatgataatgaaaaaagcagtattcaagggttgagtatggggattgaatacaaggctttgagtaatcctaatgagaagttagagattgatcataatcaagaaaccatgtcgttggagattagtaacaataataagatcagatcacaaaatagttttgggtttaagaatgatggagatgatcatgaagatgaagatgagattttgcctcaaaaccttgttaagaaaactagggtttcgatgaacgacggatgtcaatggaggaaatatggccagaaaatagctaaaggcaatccatgtccccgagcttactatcgttgcaccattgcagcttcttgtccagtaagaaaacaggtgcaaagatgttcagaagatatgtctatacttatctcaacgtacgaaggaacacataaccatccacttcccatgtcagcaactgccatggcctctgccacttccgctgccgcctccatgcttctctccggcgcctcctcctcctcatccgccgcagctgatcttcatggccttaacttctctctttccggcaacaacatcactccaaaacctaaaactcatttcctccaatccccttcttcttctggccatccgaccgtcactctcgacctcacaacctcctcctcgtcgcagcaaccgttcttatcaatgctcaatagattcagctctcctccaagtaatgtctcacgatctaatagttatccttcaaccaatctcaacttttcaaacaacaccaacacattgatgaattggggtggtggtggtaatcccagtgatcaataccgtgcagcttacggcaacattaacacccatcagcaatcaccttaccacaaaatcattcaaacccgaaccgccgggtcatctttcgatccgtttggaagatcatcttcatcacattctccacaaataaatcttgatcatatcggaatcaagaacatcatcagtcaccaagtgccatctttaccggctgaaacaatcaaggcaatcacgacagatccaagtttccaatcggctttggcgacagctctatcttccatcatgggcggcgatttaaagattgatcacaatgtgactagaaatgaagctgagaagagcccttaa

SEQ ID NO: 70632 - protein, 471 aa, Arabidopsis thaliana
  peptide (1)..(471): Ceres Seq. ID no. 2716167
  misc_feature (181)..(241): Pfam Name: WRKY DNA -binding domain Pfam Description: WRKY DNA -binding domain
  misc_feature (1)..(471): Homolog of NCBI NO: 25518561 NR Description: hypothetical protein F6A14.5 - Arabidopsis >gi|6730700|gb|AAF27095.1|AC011809_4 Hypothetical protein
  misc_feature (1)..(471): Homolog of NCBI NO: 30686070 NR Description: WRKY family transcription factor [Arabidopsis >gi|20978774|sp|Q8VWV6|WR61_ARATH Probable WRKY transcription
  misc_feature (1)..(384): Homolog of NCBI NO: 15242221 NR Description: WRKY family transcription factor; protein id:
  misc_feature (143)..(407): Homolog of NCBI NO: 30013667 NR Description: Avr9/Cf-9 rapidly elicited protein 126 [Nicotiana
  misc_feature (1)..(324): Homolog of NCBI NO: 18415833 NR Description: WRKY family transcription factor; protein id: supported by cDNA: gi_15990589 [Arabidopsis thaliana]
  misc_feature (1)..(347): Homolog of NCBI NO: 18409374 NR Description: WRKY family transcription factor; protein id: supported by cDNA: gi_15384220 [Arabidopsis thaliana]
  misc_feature (1)..(338): Homolog of NCBI NO: 15233516 NR Description: WRKY family transcription factor; protein id: supported by cDNA: gi_15990593 [Arabidopsis thaliana]
  misc_feature (156)..(369): Homolog of NCBI NO: 15234284 NR Description: WRKY family transcription factor; protein id: supported by cDNA: gi_19172391 [Arabidopsis thaliana]
  misc_feature (55)..(324): Homolog of NCBI NO: 11357339 NR Description: hypothetical protein AT4g22070 - Arabidopsis >gi|2961352|emb|CAA18110.1| putative protein [Arabidopsis >gi|7269052|emb|CAB79162.1| putative protein [Arabidopsis
  misc_feature (181)..(369): Homolog of NCBI NO: 7488096 NR Description: probable DNA-binding protein T15B16.12 -
MDEAKEENRRLKSSLSKIKKDFDILQTQYNQLMAKHNEPTKFQSKGHHQDKGEDEDREKVNEREELVSLSLGRRLNSEVPSGSNKEEKNKDVEEAEGDRNYDDNEKSSIQGLSMGIEYKALSNPNEKLEIDHNQETMSLEISNNNKIRSQNSFGFKNDGDDHEDEDEILPQNLVKKTRVSMNDGCQWRKYGQKIAKGNPCPRAYYRCTIAASCPVRKQVQRCSEDMSILISTYEGTHNHPLPMSATAMASATSAAASMLLSGASSSSSAAADLHGLNFSLSGNNITPKPKTHFLQSPSSSGHPTVTLDLTTSSSSQQPFLSMLNRFSSPPSNVSRSNSYPSTNLNFSNNTNTLMNWGGGGNPSDQYRAAYGNINTHQQSPYHKIIQTRTAGSSFDPFGRSSSSHSPQINLDHIGIKNIISHQVPSLPAETIKAITTDPSFQSALATALSSIMGGDLKIDHNVTRNEAEKSP

SEQ ID NO: 70633 - protein, 439 aa, Arabidopsis thaliana
  peptide (1)..(439): Ceres Seq. ID no. 2716168
  misc_feature (149)..(209): Pfam Name: WRKY DNA -binding domain Pfam Description: WRKY DNA -binding domain
  misc_feature (1)..(439): Homolog of NCBI NO: 25518561 NR Description: hypothetical protein F6A14.5 - Arabidopsis >gi|6730700|gb|AAF27095.1|AC011809_4 Hypothetical protein
  misc_feature (1)..(439): Homolog of NCBI NO: 30686070 NR Description: WRKY family transcription factor [Arabidopsis >gi|20978774|sp|Q8VWV6|WR61_ARATH Probable WRKY transcription
  misc_feature (1)..(352): Homolog of NCBI NO: 15242221 NR Description: WRKY family transcription factor; protein id:
  misc_feature (111)..(375): Homolog of NCBI NO: 30013667 NR Description: Avr9/Cf-9 rapidly elicited protein 126 [Nicotiana
  misc_feature (1)..(292): Homolog of NCBI NO: 18415833 NR Description: WRKY family transcription factor; protein id: supported by cDNA: gi_15990589 [Arabidopsis thaliana]
  misc_feature (1)..(315): Homolog of NCBI NO: 18409374 NR Description: WRKY family transcription factor; protein id: supported by cDNA: gi_15384220 [Arabidopsis thaliana]
  misc_feature (1)..(306): Homolog of NCBI NO: 15233516 NR Description: WRKY family transcription factor; protein id: supported by cDNA: gi_15990593 [Arabidopsis thaliana]
  misc_feature (124)..(337): Homolog of NCBI NO: 15234284 NR Description: WRKY family transcription factor; protein id: supported by cDNA: gi_19172391 [Arabidopsis thaliana]
  misc_feature (23)..(292): Homolog of NCBI NO: 11357339 NR Description: hypothetical protein AT4g22070 - Arabidopsis >gi|2961352|emb|CAA18110.1| putative protein [Arabidopsis >gi|7269052|emb|CAB79162.1| putative protein [Arabidopsis
  misc_feature (149)..(337): Homolog of NCBI NO: 7488096 NR Description: probable DNA-binding protein T15B16.12 -
MAKHNEPTKFQSKGHHQDKGEDEDREKVNEREELVSLSLGRRLNSEVPSGSNKEEKNKDVEEAEGDRNYDDNEKSSIQGLSMGIEYKALSNPNEKLEIDHNQETMSLEISNNNKIRSQNSFGFKNDGDDHEDEDEILPQNLVKKTRVSMNDGCQWRKYGQKIAKGNPCPRAYYRCTIAASCPVRKQVQRCSEDMSILISTYEGTHNHPLPMSATAMASATSAAASMLLSGASSSSSAAADLHGLNFSLSGNNITPKPKTHFLQSPSSSGHPTVTLDLTTSSSSQQPFLSMLNRFSSPPSNVSRSNSYPSTNLNFSNNTNTLMNWGGGGNPSDQYRAAYGNINTHQQSPYHKIIQTRTAGSSFDPFGRSSSSHSPQINLDHIGIKNIISHQVPSLPAETIKAITTDPSFQSALATALSSIMGGDLKIDHNVTRNEAEKSP

SEQ ID NO: 70634 - protein, 358 aa, Arabidopsis thaliana
  peptide (1)..(358): Ceres Seq. ID no. 2716169
  misc_feature (68)..(128): Pfam Name: WRKY DNA -binding domain Pfam Description: WRKY DNA -binding domain
  misc_feature (1)..(271): Homolog of NCBI NO: 15242221 NR Description: WRKY family transcription factor; protein id:
  misc_feature (30)..(294): Homolog of NCBI NO: 30013667 NR Description: Avr9/Cf-9 rapidly elicited protein 126 [Nicotiana
  misc_feature (1)..(211): Homolog of NCBI NO: 18415833 NR Description: WRKY family transcription factor; protein id: supported by cDNA: gi_15990589 [Arabidopsis thaliana]
  misc_feature (1)..(234): Homolog of NCBI NO: 18409374 NR Description: WRKY family transcription factor; protein id: supported by cDNA: gi_15384220 [Arabidopsis thaliana]
  misc_feature (1)..(358): Homolog of NCBI NO: 25518561 NR Description: hypothetical protein F6A14.5 - Arabidopsis >gi|6730700|gb|AAF27095.1|AC011809_4 Hypothetical protein
  misc_feature (1)..(358): Homolog of NCBI NO: 30686070 NR Description: WRKY family transcription factor [Arabidopsis >gi|20978774|sp|Q8VWV6|WR61_ARATH Probable WRKY transcription
  misc_feature (1)..(225): Homolog of NCBI NO: 15233516 NR Description: WRKY family transcription factor; protein id: supported by cDNA: gi_15990593 [Arabidopsis thaliana]
  misc_feature (43)..(256): Homolog of NCBI NO: 15234284 NR Description: WRKY family transcription factor; protein id: supported by cDNA: gi_19172391 [Arabidopsis thaliana]
  misc_feature (1)..(211): Homolog of NCBI NO: 11357339 NR Description: hypothetical protein AT4g22070 - Arabidopsis >gi|2961352|emb|CAA18110.1| putative protein [Arabidopsis >gi|7269052|emb|CAB79162.1| putative protein [Arabidopsis
  misc_feature (68)..(256): Homolog of NCBI NO: 7488096 NR Description: probable DNA-binding protein T15B16.12 -
MGIEYKALSNPNEKLEIDHNQETMSLEISNNNKIRSQNSFGFKNDGDDHEDEDEILPQNLVKKTRVSMNDGCQWRKYGQKIAKGNPCPRAYYRCTIAASCPVRKQVQRCSEDMSILISTYEGTHNHPLPMSATAMASATSAAASMLLSGASSSSSAAADLHGLNFSLSGNNITPKPKTHFLQSPSSSGHPTVTLDLTTSSSSQQPFLSMLNRFSSPPSNVSRSNSYPSTNLNFSNNTNTLMNWGGGGNPSDQYRAAYGNINTHQQSPYHKIIQTRTAGSSFDPFGRSSSSHSPQINLDHIGIKNIISHQVPSLPAETIKAITTDPSFQSALATALSSIMGGDLKIDHNVTRNEAEKSP

SEQ ID NO: 70635 - DNA, 1461 bp, Arabidopsis thaliana
  misc_feature (1)..(1461): Ceres Seq. ID no. 2716470
  misc_feature: MA Experiment ID: 20001558 Result: Up-regulated in Transcription
  misc_feature: MA Experiment 20001558 PARAMETER Experiment Name: At_Drought_Soil_Dry_P Parameter: Age (day) Value: 27
  misc_feature: MA Experiment 20001558 PARAMETER Experiment Name: At_Drought_Soil_Dry_P Parameter: Organism Value: A. thaliana
  misc_feature: MA Experiment 20001558 PARAMETER Experiment Name: At_Drought_Soil_Dry_P Parameter: Plant Line Value: WS
  misc_feature: MA Experiment 20001558 PARAMETER Experiment Name: At_Drought_Soil_Dry_P Parameter: Post Timepoint (hr) Value: 6
  misc_feature: MA Experiment 20001558 PARAMETER Experiment Name: At_Drought_Soil_Dry_P Parameter: Post-Treatment Value: Re-Water vs. No Drought
  misc_feature: MA Experiment 20001558 PARAMETER Experiment Name: At_Drought_Soil_Dry_P Parameter: Timepoint (day) Value: 13
  misc_feature: MA Experiment 20001558 PARAMETER Experiment Name: At_Drought_Soil_Dry_P Parameter: Treatment Value: Drought vs. No Drought
atggcgatttctgaatccaaccctgactcaaatcttagcattcaagctggagatgaatggcaaaagcttcctctattcgccaattcgtcacatccagattcatcgtccccggaacggtcttcttcgcgttttggtgattctagctacaccgtttcgatataccgcagcattggcaagctttactgcgcaaatcccgtctttaaggcttatttggtctcgtcttctccgaaacaagcgttggggttttacttcgatatactaagatttggttttgttcctgattcatacaccttcgtttcgttgattagttgtattgagaagacttgttgcgttgattctggtaaaatgtgtcatgggcaagccattaagcatggatgcgatcaagttttgcctgttcaaaattcgttaatgcatatgtatacttgttgtggtgctttggatcttgcaaagaagctgtttgttgaaattcctaagagagatattgtgtcctggaactctataatagctgggatggtgaggaatggtgatgttttggctgcacacaagttgttcgatgaaatgcctgacaaaaacattatttcttggaatatcatgattagtgcttatttgggtgcgaataatcctggagtttccattagtttgttccgtgagatggtcagagcagggttccaaggaaatgagagtacgttggttttgttgttgaatgcttgtggtagatcagctagattgaaggaagctcttattgacatgtatggaaagtgcaaggaagtaggtttagcacgtaggatattcgatagtctatctattagaaacaaagttacttggaatgtgatgatattggcacattgtcttcacgggcgtcctgaaggtgggctcgagttatttgaagccatgatcaatggtatgcttagacccgatgaagtgacatttgttggtgttctctgcggttgtgctagagctgggcttgtttctcaaggacaaagttactattctctgatggttgatgagttccagatcaaacccaactttggacaccaatggtgcatggctaatctttactccagcgccgggttccctgaagaagcagaggaagctctgaagaatctgccagatgaagatgtgacaccagaatctacaaagtgggcaaacttgctcagctcgtcgcgttttacaggaaacccgactctaggggagagcattgccaagtccctgatagagacagatcctttgaactacaagtattaccatttgctgatgaatatttacagtgttacgggacggtgggaggatgttaatagagtgagagagatggtgaaggagaggaaaataggacgaatacccgggtgtggccttgtggacttgaaggagatagtccatggccttagactaggatgcaaagaagcagaaaaggtgttcactgagactagtttagaaaaatgctacagtgattcaccgtcataa

SEQ ID NO: 70636 - protein, 486 aa, Arabidopsis thaliana
  peptide (1)..(486): Ceres Seq. ID no. 2716471
  misc_feature (273)..(307): Pfam Name: PPR repeat Pfam Description: PPR repeat
  misc_feature (1)..(486): Homolog of NCBI NO: 15230447 NR Description: putative protein; protein id: At3g51320.1
  misc_feature (64)..(466): Homolog of NCBI NO: 15223099 NR Description: unknown protein; protein id: At1g08070.1 thaliana] >gi|8778839|gb|AAF79838.1|AC026875_18 T6D22.15
  misc_feature (41)..(459): Homolog of NCBI NO: 8778758 NR Description: T30E16.32 [Arabidopsis thaliana]
  misc_feature (41)..(459): Homolog of NCBI NO: 15218900 NR Description: hypothetical protein; protein id: At1g59720.1
  misc_feature (41)..(459): Homolog of NCBI NO: 25346319 NR Description: hypothetical protein F23H11.3 [imported] - thaliana >gi|5080805|gb|AAD39314.1|AC007258_3 Hypothetical
  misc_feature (61)..(459): Homolog of NCBI NO: 29124127 NR Description: hypothetical protein [Oryza sativa (japonica
  misc_feature (66)..(459): Homolog of NCBI NO: 34897084 NR Description: hypothetical protein [Oryza sativa (japonica group)] >gi|12957718|gb|AAK09236.1| hypothetical protein [Oryza
  misc_feature (22)..(459): Homolog of NCBI NO: 15222513 NR Description: PPR-repeat protein, putative; protein id:
  misc_feature (59)..(486): Homolog of NCBI NO: 9279581 NR Description: emb|CAB66100.1~gene_id:MLN21.12~strong similarity
  misc_feature (59)..(486): Homolog of NCBI NO: 15231831 NR Description: hypothetical protein; protein id: At3g14330.1
MAISESNPDSNLSIQAGDEWQKLPLFANSSHPDSSSPERSSSRFGDSSYTVSIYRSIGKLYCANPVFKAYLVSSSPKQALGFYFDILRFGFVPDSYTFVSLISCIEKTCCVDSGKMCHGQAIKHGCDQVLPVQNSLMHMYTCCGALDLAKKLFVEIPKRDIVSWNSIIAGMVRNGDVLAAHKLFDEMPDKNIISWNIMISAYLGANNPGVSISLFREMVRAGFQGNESTLVLLLNACGRSARLKEALIDMYGKCKEVGLARRIFDSLSIRNKVTWNVMILAHCLHGRPEGGLELFEAMINGMLRPDEVTFVGVLCGCARAGLVSQGQSYYSLMVDEFQIKPNFGHQWCMANLYSSAGFPEEAEEALKNLPDEDVTPESTKWANLLSSSRFTGNPTLGESIAKSLIETDPLNYKYYHLLMNIYSVTGRWEDVNRVREMVKERKIGRIPGCGLVDLKEIVHGLRLGCKEAEKVFTETSLEKCYSDSPS

SEQ ID NO: 70637 - protein, 371 aa, Arabidopsis thaliana
  peptide (1)..(371): Ceres Seq. ID no. 2716472
  misc_feature (158)..(192): Pfam Name: PPR repeat Pfam Description: PPR repeat
  misc_feature (1)..(371): Homolog of NCBI NO: 15230447 NR Description: putative protein; protein id: At3g51320.1
  misc_feature (1)..(351): Homolog of NCBI NO: 15223099 NR Description: unknown protein; protein id: At1g08070.1 thaliana] >gi|8778839|gb|AAF79838.1|AC026875_18 T6D22.15
  misc_feature (1)..(344): Homolog of NCBI NO: 8778758 NR Description: T30E16.32 [Arabidopsis thaliana]
  misc_feature (1)..(344): Homolog of NCBI NO: 25346319 NR Description: hypothetical protein F23H11.3 [imported] - thaliana >gi|5080805|gb|AAD39314.1|AC007258_3 Hypothetical
  misc_feature (1)..(344): Homolog of NCBI NO: 15218900 NR Description: hypothetical protein; protein id: At1g59720.1
  misc_feature (1)..(344): Homolog of NCBI NO: 29124127 NR Description: hypothetical protein [Oryza sativa (japonica
  misc_feature (1)..(344): Homolog of NCBI NO: 34897084 NR Description: hypothetical protein [Oryza sativa (japonica group)] >gi|12957718|gb|AAK09236.1| hypothetical protein [Oryza
  misc_feature (1)..(344): Homolog of NCBI NO: 15222513 NR Description: PPR-repeat protein, putative; protein id:
  misc_feature (1)..(371): Homolog of NCBI NO: 9279581 NR Description: emb|CAB66100.1~gene_id:MLN21.12~strong similarity
  misc_feature (1)..(371): Homolog of NCBI NO: 15231831 NR Description: hypothetical protein; protein id: At3g14330.1
MCHGQAIKHGCDQVLPVQNSLMHMYTCCGALDLAKKLFVEIPKRDIVSWNSIIAGMVRNGDVLAAHKLFDEMPDKNIISWNIMISAYLGANNPGVSISLFREMVRAGFQGNESTLVLLLNACGRSARLKEALIDMYGKCKEVGLARRIFDSLSIRNKVTWNVMILAHCLHGRPEGGLELFEAMINGMLRPDEVTFVGVLCGCARAGLVSQGQSYYSLMVDEFQIKPNFGHQWCMANLYSSAGFPEEAEEALKNLPDEDVTPESTKWANLLSSSRFTGNPTLGESIAKSLIETDPLNYKYYHLLMNIYSVTGRWEDVNRVREMVKERKIGRIPGCGLVDLKEIVHGLRLGCKEAEKVFTETSLEKCYSDSPS

SEQ ID NO: 70638 - protein, 350 aa, Arabidopsis thaliana
  peptide (1)..(350): Ceres Seq. ID no. 2716473
  misc_feature (137)..(171): Pfam Name: PPR repeat Pfam Description: PPR repeat
  misc_feature (1)..(350): Homolog of NCBI NO: 15230447 NR Description: putative protein; protein id: At3g51320.1
  misc_feature (1)..(330): Homolog of NCBI NO: 15223099 NR Description: unknown protein; protein id: At1g08070.1 thaliana] >gi|8778839|gb|AAF79838.1|AC026875_18 T6D22.15
  misc_feature (1)..(323): Homolog of NCBI NO: 8778758 NR Description: T30E16.32 [Arabidopsis thaliana]
  misc_feature (1)..(323): Homolog of NCBI NO: 15218900 NR Description: hypothetical protein; protein id: At1g59720.1
  misc_feature (1)..(323): Homolog of NCBI NO: 25346319 NR Description: hypothetical protein F23H11.3 [imported] - thaliana >gi|5080805|gb|AAD39314.1|AC007258_3 Hypothetical
  misc_feature (1)..(323): Homolog of NCBI NO: 29124127 NR Description: hypothetical protein [Oryza sativa (japonica
  misc_feature (1)..(323): Homolog of NCBI NO: 34897084 NR Description: hypothetical protein [Oryza sativa (japonica group)] >gi|12957718|gb|AAK09236.1| hypothetical protein [Oryza
  misc_feature (1)..(323): Homolog of NCBI NO: 15222513 NR Description: PPR-repeat protein, putative; protein id:
  misc_feature (1)..(350): Homolog of NCBI NO: 9279581 NR Description: emb|CAB66100.1~gene_id:MLN21.12~strong similarity
  misc_feature (1)..(350): Homolog of NCBI NO: 15231831 NR Description: hypothetical protein; protein id: At3g14330.1
MHMYTCCGALDLAKKLFVEIPKRDIVSWNSIIAGMVRNGDVLAAHKLFDEMPDKNIISWNIMISAYLGANNPGVSISLFREMVRAGFQGNESTLVLLLNACGRSARLKEALIDMYGKCKEVGLARRIFDSLSIRNKVTWNVMILAHCLHGRPEGGLELFEAMINGMLRPDEVTFVGVLCGCARAGLVSQGQSYYSLMVDEFQIKPNFGHQWCMANLYSSAGFPEEAEEALKNLPDEDVTPESTKWANLLSSSRFTGNPTLGESIAKSLIETDPLNYKYYHLLMNIYSVTGRWEDVNRVREMVKERKIGRIPGCGLVDLKEIVHGLRLGCKEAEKVFTETSLEKCYSDSPS

SEQ ID NO: 70639 - DNA, 636 bp, Arabidopsis thaliana
  misc_feature (1)..(636): Ceres Seq. ID no. 2716663
  misc_feature: MA Experiment ID: 20000264 Result: Up-regulated in Transcription
  misc_feature: MA Experiment 20000264 PARAMETER Experiment Name: At_Open_Flower_P Parameter: Age (day) Value: 21
  misc_feature: MA Experiment 20000264 PARAMETER Experiment Name: At_Open_Flower_P Parameter: Plant Line Value: WS
  misc_feature: MA Experiment 20000264 PARAMETER Experiment Name: At_Open_Flower_P Parameter: Tissue Value: Open Flower vs. Whole Plant
  misc_feature: MA Experiment ID: 20000794 Result: Up-regulated in Transcription
  misc_feature: MA Experiment 20000794 PARAMETER Experiment Name: At_Petals_P Parameter: Age (day) Value: 23-25 days
  misc_feature: MA Experiment 20000794 PARAMETER Experiment Name: At_Petals_P Parameter: Plant Line Value: WS
  misc_feature: MA Experiment 20000794 PARAMETER Experiment Name: At_Petals_P Parameter: Tissue Value: Petals vs. Whole plant
  misc_feature: MA Experiment ID: 20001910 Result: Up-regulated in Transcription
  misc_feature: MA Experiment 20001910 PARAMETER Experiment Name: At_Drought_Reproduction_P Parameter: Age (day) Value: 37
  misc_feature: MA Experiment 20001910 PARAMETER Experiment Name: At_Drought_Reproduction_P Parameter: Organism Value: A. thaliana
  misc_feature: MA Experiment 20001910 PARAMETER Experiment Name: At_Drought_Reproduction_P Parameter: Plant Line Value: WS
  misc_feature: MA Experiment 20001910 PARAMETER Experiment Name: At_Drought_Reproduction_P Parameter: Timepoint (day) Value: 7
  misc_feature: MA Experiment 20001910 PARAMETER Experiment Name: At_Drought_Reproduction_P Parameter: Tissue Value: Flowers
  misc_feature: MA Experiment 20001910 PARAMETER Experiment Name: At_Drought_Reproduction_P Parameter: Treatment Value: Drought vs. No Drought
  misc_feature: MA Experiment ID: 20001911 Result: Up-regulated in Transcription
  misc_feature: MA Experiment 20001911 PARAMETER Experiment Name: At_Drought_Reproduction_P Parameter: Age (day) Value: 40
  misc_feature: MA Experiment 20001911 PARAMETER Experiment Name: At_Drought_Reproduction_P Parameter: Organism Value: A. thaliana
  misc_feature: MA Experiment 20001911 PARAMETER Experiment Name: At_Drought_Reproduction_P Parameter: Plant Line Value: WS
  misc_feature: MA Experiment 20001911 PARAMETER Experiment Name: At_Drought_Reproduction_P Parameter: Timepoint (day) Value: 10
  misc_feature: MA Experiment 20001911 PARAMETER Experiment Name: At_Drought_Reproduction_P Parameter: Tissue Value: Flowers
  misc_feature: MA Experiment 20001911 PARAMETER Experiment Name: At_Drought_Reproduction_P Parameter: Treatment Value: Drought vs. No Drought
atggcggcgtttacagggacaacagacaaatgcaaggcgtgtgacaagacggtatacgttatggacttgatgactttggaaggaatgccttatcacaagtcatgcttcaggtgcagccattgcaatggcactctcgtgatatgtaactactcatccatggatggagttttgtattgcaagacccattttgaacagctcttcaaagaatctggaaatttcagcaagaatttccaaacagctggaaagaccgagaaatcgaatgatgcggctccaaacaggttatcatccttctttagcggcacacaagacaaatgtgcagcttgtaagaaaacagtttatcctctagagaagatgacaatggaaggagaatcttaccacaagacttgcttcagatgtgcacatagtggttgtccattaacacattcttcatatgctgctctcgatggcgtcctttactgtaaggtccacttcagccagcttttccttgagaaaggtaattacaatcatgtcctccaagccgcggctaaccaccgtcgctcgacggctgaggaagacaaaaccgaacccaaagaagatgaagcaaaccctacagaagaagaaacttctgatgcagcagctgaagaacatgaatcctaa

SEQ ID NO: 70640 - protein, 211 aa, Arabidopsis thaliana
  peptide (1)..(211): Ceres Seq. ID no. 2716664
  misc_feature (11)..(68): Pfam Name: LIM domain Pfam Description: LIM domain
  misc_feature (1)..(211): Homolog of NCBI NO: 15233063 NR Description: LIM domain protein; protein id: At3g61230.1
  misc_feature (3)..(207): Homolog of NCBI NO: 15225897 NR Description: putative LIM-domain protein; protein id: [Arabidopsis thaliana] >gi|7488384|pir||T02467 probable
  misc_feature (3)..(200): Homolog of NCBI NO: 15223476 NR Description: LIM domain protein, putative; protein id:
  misc_feature (3)..(200): Homolog of NCBI NO: 25354704 NR Description: T1N6.19 protein - Arabidopsis thaliana Contains similarity to mRNA for transcription factor L2 from thaliana gb|X91398. It contains LIM domain containing proteins
  misc_feature (3)..(202): Homolog of NCBI NO: 8515104 NR Description: LIM domain protein PLIM-2 [Nicotiana tabacum]
  misc_feature (3)..(211): Homolog of NCBI NO: 4321401 NR Description: LIM domain protein PLIM-2 [Helianthus annuus]
  misc_feature (3)..(203): Homolog of NCBI NO: 32489824 NR Description: OSJNBb0039L24.7 [Oryza sativa (japonica
  misc_feature (4)..(210): Homolog of NCBI NO: 37535810 NR Description: putative LIM domain protein [Oryza sativa
  misc_feature (3)..(185): Homolog of NCBI NO: 7489184 NR Description: probable transcription factor SF3 - common tobacco
  misc_feature (3)..(182): Homolog of NCBI NO: 15225592 NR Description: putative LIM-domain protein; protein id: supported by cDNA: gi_20453155 [Arabidopsis thaliana]
MAAFTGTTDKCKACDKTVYVMDLMTLEGMPYHKSCFRCSHCNGTLVICNYSSMDGVLYCKTHFEQLFKESGNFSKNFQTAGKTEKSNDAAPNRLSSFFSGTQDKCAACKKTVYPLEKMTMEGESYHKTCFRCAHSGCPLTHSSYAALDGVLYCKVHFSQLFLEKGNYNHVLQAAANHRRSTAEEDKTEPKEDEANPTEEETSDAAAEEHES

SEQ ID NO: 70641 - protein, 191 aa, Arabidopsis thaliana
  peptide (1)..(191): Ceres Seq. ID no. 2716665
  misc_feature (1)..(48): Pfam Name: LIM domain Pfam Description: LIM domain
  misc_feature (1)..(191): Homolog of NCBI NO: 15233063 NR Description: LIM domain protein; protein id: At3g61230.1
  misc_feature (1)..(187): Homolog of NCBI NO: 15225897 NR Description: putative LIM-domain protein; protein id: [Arabidopsis thaliana] >gi|7488384|pir||T02467 probable
  misc_feature (1)..(180): Homolog of NCBI NO: 15223476 NR Description: LIM domain protein, putative; protein id:
  misc_feature (1)..(180): Homolog of NCBI NO: 25354704 NR Description: T1N6.19 protein - Arabidopsis thaliana Contains similarity to mRNA for transcription factor L2 from thaliana gb|X91398. It contains LIM domain containing proteins
  misc_feature (1)..(182): Homolog of NCBI NO: 8515104 NR Description: LIM domain protein PLIM-2 [Nicotiana tabacum]
  misc_feature (1)..(191): Homolog of NCBI NO: 4321401 NR Description: LIM domain protein PLIM-2 [Helianthus annuus]
  misc_feature (1)..(183): Homolog of NCBI NO: 32489824 NR Description: OSJNBb0039L24.7 [Oryza sativa (japonica
  misc_feature (1)..(190): Homolog of NCBI NO: 37535810 NR Description: putative LIM domain protein [Oryza sativa
  misc_feature (1)..(165): Homolog of NCBI NO: 7489184 NR Description: probable transcription factor SF3 - common tobacco
  misc_feature (1)..(162): Homolog of NCBI NO: 15225592 NR Description: putative LIM-domain protein; protein id: supported by cDNA: gi_20453155 [Arabidopsis thaliana]
MDLMTLEGMPYHKSCFRCSHCNGTLVICNYSSMDGVLYCKTHFEQLFKESGNFSKNFQTAGKTEKSNDAAPNRLSSFFSGTQDKCAACKKTVYPLEKMTMEGESYHKTCFRCAHSGCPLTHSSYAALDGVLYCKVHFSQLFLEKGNYNHVLQAAANHRRSTAEEDKTEPKEDEANPTEEETSDAAAEEHES

SEQ ID NO: 70642 - protein, 188 aa, Arabidopsis thaliana
  peptide (1)..(188): Ceres Seq. ID no. 2716666
  misc_feature (1)..(45): Pfam Name: LIM domain Pfam Description: LIM domain
  misc_feature (1)..(188): Homolog of NCBI NO: 15233063 NR Description: LIM domain protein; protein id: At3g61230.1
  misc_feature (1)..(184): Homolog of NCBI NO: 15225897 NR Description: putative LIM-domain protein; protein id: [Arabidopsis thaliana] >gi|7488384|pir||T02467 probable
  misc_feature (1)..(177): Homolog of NCBI NO: 15223476 NR Description: LIM domain protein, putative; protein id:
  misc_feature (1)..(177): Homolog of NCBI NO: 25354704 NR Description: T1N6.19 protein - Arabidopsis thaliana Contains similarity to mRNA for transcription factor L2 from thaliana gb|X91398. It contains LIM domain containing proteins
  misc_feature (1)..(179): Homolog of NCBI NO: 8515104 NR Description: LIM domain protein PLIM-2 [Nicotiana tabacum]
  misc_feature (1)..(188): Homolog of NCBI NO: 4321401 NR Description: LIM domain protein PLIM-2 [Helianthus annuus]
  misc_feature (1)..(180): Homolog of NCBI NO: 32489824 NR Description: OSJNBb0039L24.7 [Oryza sativa (japonica
  misc_feature (1)..(187): Homolog of NCBI NO: 37535810 NR Description: putative LIM domain protein [Oryza sativa
  misc_feature (1)..(162): Homolog of NCBI NO: 7489184 NR Description: probable transcription factor SF3 - common tobacco
  misc_feature (1)..(159): Homolog of NCBI NO: 15225592 NR Description: putative LIM-domain protein; protein id: supported by cDNA: gi_20453155 [Arabidopsis thaliana]
MTLEGMPYHKSCFRCSHCNGTLVICNYSSMDGVLYCKTHFEQLFKESGNFSKNFQTAGKTEKSNDAAPNRLSSFFSGTQDKCAACKKTVYPLEKMTMEGESYHKTCFRCAHSGCPLTHSSYAALDGVLYCKVHFSQLFLEKGNYNHVLQAAANHRRSTAEEDKTEPKEDEANPTEEETSDAAAEEHES

SEQ ID NO: 70643 - DNA, 1326 bp, Arabidopsis thaliana
  misc_feature (1)..(1326): Ceres Seq. ID no. 2716839
  misc_feature: MA Experiment ID: 20000328 Result: Down-regulated in Transcription
  misc_feature: MA Experiment 20000328 PARAMETER Experiment Name: At_42deg_Heat_Sub_P Parameter: Age (day) Value: 14
  misc_feature: MA Experiment 20000328 PARAMETER Experiment Name: At_42deg_Heat_Sub_P Parameter: Organism Value: A. thaliana
  misc_feature: MA Experiment 20000328 PARAMETER Experiment Name: At_42deg_Heat_Sub_P Parameter: Plant Line Value: WS
  misc_feature: MA Experiment 20000328 PARAMETER Experiment Name: At_42deg_Heat_Sub_P Parameter: Temperature (deg C) Value: 42 vs. 22
  misc_feature: MA Experiment 20000328 PARAMETER Experiment Name: At_42deg_Heat_Sub_P Parameter: Timepoint (hr) Value: 6
  misc_feature: MA Experiment 20000328 PARAMETER Experiment Name: At_42deg_Heat_Sub_P Parameter: Tissue Value: Aerial
  misc_feature: MA Experiment ID: 20000440 Result: Up-regulated in Transcription
  misc_feature: MA Experiment 20000440 PARAMETER Experiment Name: At_Closed-Flower__Sub_P Parameter: Tissue Value: Closed Flower vs. Whole Plant
atggcaaacaacaacgtttactctgttctgaagtcgctgcttctgcttcttcaccttgtattcttgagtaagcaacatgttgactctgcctcaatcgtcaaattccttcctggttttgaaggccctcttccctttgagctcgaaaccgggtatattggtgttggtgaggaagaggaggtgcaactgttctactacttcatcaagtctgagaggaacccaaaagaagaccctcttcttctctggctaactggaggacctggctgctctgccatctctggccttctttatcagaatgggcctctggctatgaagctcgatgtttacaatggaactctcccttctttggtctctactacatattcttggacaaagacttcgagcatgatattcttggaccagcccgttggaactggcttctcctattcaagaacgcaactttttaataaacctagtgatacaggagaagccaaacggatccatgagtttcttcaaaagtggctaggcaagcatcaagagttttcctccaaccctttctatgttggcggagattcctattccggtctggttgttccagctaccgttcaagaaatttcaaaaggaaattgtcaatgctgcaatcgtccaataaatcttcagggctatgtgctcggtaacccgttaacagactgtgtatatgattgtaactaccgcgttccatttgctcataaaatggcactgatctctgatgaactctacgagtcgttgaagagaacctgcagaggagaatatgtaaatgttcatccacatgacacagaatgcttgaaattcgttgaagaatttaacaagttaacaaacagagtatgcgaacgacatatattacattcatgttgcgaaactgaaactccaagttgctattcttataggtttatgctaactacctactgggccaatgacgaaaccgtacgcaaagctcttcaaatcaataaggagagtataggggaatggacacgatgttatcgcggtattccttacaatcatgacattaaaagtagcgtaccttaccatatgaataacagcatcgatggttatcgttctctcatctacagtggtgatcatgatatccaagtacctttccttgggactcaagcttggataagatcgctcaactattctatcattgatgactggaggccatggatgatcaaagatcaaatcgctggatacacaacgagttatgtcaataaaatgacatttgctactgtcacaggaggtgggcacacagcagagtttacaccaaaggaaacctttatgatgttccaaaggtggatcaatggccaacctctgtga

SEQ ID NO: 70644 - protein, 441 aa, Arabidopsis thaliana
  peptide (1)..(441): Ceres Seq. ID no. 2716840
  misc_feature (37)..(438): Pfam Name: Serine carboxypeptidase Pfam Description: Serine carboxypeptidase
  misc_feature (1)..(441): Homolog of NCBI NO: 15219435 NR Description: putative serine carboxypeptidase; protein id: [Arabidopsis thaliana] >gi|12324317|gb|AAG52126.1|AC010556_8
  misc_feature (1)..(275): Homolog of NCBI NO: 25289774 NR Description: probable serine carboxypeptidase T9L24.47 - Arabidopsis thaliana >gi|11120810|gb|AAG30990.1|AC012396_26
  misc_feature (299)..(441): Homolog of NCBI NO: 25289774 NR Description: probable serine carboxypeptidase T9L24.47 - Arabidopsis thaliana >gi|11120810|gb|AAG30990.1|AC012396_26
  misc_feature (1)..(441): Homolog of NCBI NO: 15219433 NR Description: putative serine carboxypeptidase; protein id: [Arabidopsis thaliana] >gi|25289779|pir||C96759 protein serine
  misc_feature (1)..(441): Homolog of NCBI NO: 15219429 NR Description: putative serine carboxypeptidase; protein id: [Arabidopsis thaliana] >gi|25289788|pir||A96759 protein serine
  misc_feature (1)..(441): Homolog of NCBI NO: 22327401 NR Description: serine carboxypeptidase; protein id: At5g36180.1, by cDNA: gi_20260289 [Arabidopsis thaliana] serine carboxypeptidase [Arabidopsis thaliana]
  misc_feature (1)..(441): Homolog of NCBI NO: 8777303 NR Description: serine carboxypeptidase [Arabidopsis thaliana]
  misc_feature (4)..(441): Homolog of NCBI NO: 15219431 NR Description: putative serine carboxypeptidase; protein id: [Arabidopsis thaliana] >gi|25289778|pir||B96759 protein serine
  misc_feature (1)..(441): Homolog of NCBI NO: 15219427 NR Description: putative serine carboxypeptidase; protein id: [Arabidopsis thaliana] >gi|25289777|pir||H96758 protein serine
  misc_feature (1)..(441): Homolog of NCBI NO: 15228300 NR Description: putative glucose acyltransferase; protein id: [Arabidopsis thaliana] >gi|8567775|gb|AAF76347.1| glucose putative [Arabidopsis thaliana]
MANNNVYSVLKSLLLLLHLVFLSKQHVDSASIVKFLPGFEGPLPFELETGYIGVGEEEEVQLFYYFIKSERNPKEDPLLLWLTGGPGCSAISGLLYQNGPLAMKLDVYNGTLPSLVSTTYSWTKTSSMIFLDQPVGTGFSYSRTQLFNKPSDTGEAKRIHEFLQKWLGKHQEFSSNPFYVGGDSYSGLVVPATVQEISKGNCQCCNRPINLQGYVLGNPLTDCVYDCNYRVPFAHKMALISDELYESLKRTCRGEYVNVHPHDTECLKFVEEFNKLTNRVCERHILHSCCETETPSCYSYRFMLTTYWANDETVRKALQINKESIGEWTRCYRGIPYNHDIKSSVPYHMNNSIDGYRSLIYSGDHDIQVPFLGTQAWIRSLNYSIIDDWRPWMIKDQIAGYTTSYVNKMTFATVTGGGHTAEFTPKETFMMFQRWINGQPL

SEQ ID NO: 70645 - protein, 339 aa, Arabidopsis thaliana
  peptide (1)..(339): Ceres Seq. ID no. 2716841
  misc_feature (1)..(336): Pfam Name: Serine carboxypeptidase Pfam Description: Serine carboxypeptidase
  misc_feature (1)..(339): Homolog of NCBI NO: 15219435 NR Description: putative serine carboxypeptidase; protein id: [Arabidopsis thaliana] >gi|12324317|gb|AAG52126.1|AC010556_8
  misc_feature (1)..(173): Homolog of NCBI NO: 25289774 NR Description: probable serine carboxypeptidase T9L24.47 - Arabidopsis thaliana >gi|11120810|gb|AAG30990.1|AC012396_26
  misc_feature (197)..(339): Homolog of NCBI NO: 25289774 NR Description: probable serine carboxypeptidase T9L24.47 - Arabidopsis thaliana >gi|11120810|gb|AAG30990.1|AC012396_26
  misc_feature (1)..(339): Homolog of NCBI NO: 15219433 NR Description: putative serine carboxypeptidase; protein id: [Arabidopsis thaliana] >gi|25289779|pir||C96759 protein serine
  misc_feature (1)..(339): Homolog of NCBI NO: 15219429 NR Description: putative serine carboxypeptidase; protein id: [Arabidopsis thaliana] >gi|25289788|pir||A96759 protein serine
  misc_feature (1)..(339): Homolog of NCBI NO: 22327401 NR Description: serine carboxypeptidase; protein id: At5g36180.1, by cDNA: gi_20260289 [Arabidopsis thaliana] serine carboxypeptidase [Arabidopsis thaliana]
  misc_feature (1)..(339): Homolog of NCBI NO: 8777303 NR Description: serine carboxypeptidase [Arabidopsis thaliana]
  misc_feature (1)..(339): Homolog of NCBI NO: 15219431 NR Description: putative serine carboxypeptidase; protein id: [Arabidopsis thaliana] >gi|25289778|pir||B96759 protein serine
  misc_feature (1)..(339): Homolog of NCBI NO: 15219427 NR Description: putative serine carboxypeptidase; protein id: [Arabidopsis thaliana] >gi|25289777|pir||H96758 protein serine
  misc_feature (1)..(339): Homolog of NCBI NO: 15228300 NR Description: putative glucose acyltransferase; protein id: [Arabidopsis thaliana] >gi|8567775|gb|AAF76347.1| glucose putative [Arabidopsis thaliana]
MKLDVYNGTLPSLVSTTYSWTKTSSMIFLDQPVGTGFSYSRTQLFNKPSDTGEAKRIHEFLQKWLGKHQEFSSNPFYVGGDSYSGLVVPATVQEISKGNCQCCNRPINLQGYVLGNPLTDCVYDCNYRVPFAHKMALISDELYESLKRTCRGEYVNVHPHDTECLKFVEEFNKLTNRVCERHILHSCCETETPSCYSYRFMLTTYWANDETVRKALQINKESIGEWTRCYRGIPYNHDIKSSVPYHMNNSIDGYRSLIYSGDHDIQVPFLGTQAWIRSLNYSIIDDWRPWMIKDQIAGYTTSYVNKMTFATVTGGGHTAEFTPKETFMMFQRWINGQPL

SEQ ID NO: 70646 - protein, 314 aa, Arabidopsis thaliana
  peptide (1)..(314): Ceres Seq. ID no. 2716842
  misc_feature (1)..(311): Pfam Name: Serine carboxypeptidase Pfam Description: Serine carboxypeptidase
  misc_feature (1)..(314): Homolog of NCBI NO: 15219427 NR Description: putative serine carboxypeptidase; protein id: [Arabidopsis thaliana] >gi|25289777|pir||H96758 protein serine
  misc_feature (1)..(314): Homolog of NCBI NO: 15219435 NR Description: putative serine carboxypeptidase; protein id: [Arabidopsis thaliana] >gi|12324317|gb|AAG52126.1|AC010556_8
  misc_feature (172)..(314): Homolog of NCBI NO: 25289774 NR Description: probable serine carboxypeptidase T9L24.47 - Arabidopsis thaliana >gi|11120810|gb|AAG30990.1|AC012396_26
  misc_feature (1)..(314): Homolog of NCBI NO: 15219429 NR Description: putative serine carboxypeptidase; protein id: [Arabidopsis thaliana] >gi|25289788|pir||A96759 protein serine
  misc_feature (1)..(314): Homolog of NCBI NO: 8777303 NR Description: serine carboxypeptidase [Arabidopsis thaliana]
  misc_feature (1)..(314): Homolog of NCBI NO: 15219431 NR Description: putative serine carboxypeptidase; protein id: [Arabidopsis thaliana] >gi|25289778|pir||B96759 protein serine
  misc_feature (1)..(314): Homolog of NCBI NO: 22327401 NR Description: serine carboxypeptidase; protein id: At5g36180.1, by cDNA: gi_20260289 [Arabidopsis thaliana] serine carboxypeptidase [Arabidopsis thaliana]
  misc_feature (1)..(314): Homolog of NCBI NO: 15219433 NR Description: putative serine carboxypeptidase; protein id: [Arabidopsis thaliana] >gi|25289779|pir||C96759 protein serine
  misc_feature (1)..(148): Homolog of NCBI NO: 25289774 NR Description: probable serine carboxypeptidase T9L24.47 - Arabidopsis thaliana >gi|11120810|gb|AAG30990.1|AC012396_26
  misc_feature (1)..(314): Homolog of NCBI NO: 15228300 NR Description: putative glucose acyltransferase; protein id: [Arabidopsis thaliana] >gi|8567775|gb|AAF76347.1| glucose putative [Arabidopsis thaliana]
MIFLDQPVGTGFSYSRTQLFNKPSDTGEAKRIHEFLQKWLGKHQEFSSNPFYVGGDSYSGLVVPATVQEISKGNCQCCNRPINLQGYVLGNPLTDCVYDCNYRVPFAHKMALISDELYESLKRTCRGEYVNVHPHDTECLKFVEEFNKLTNRVCERHILHSCCETETPSCYSYRFMLTTYWANDETVRKALQINKESIGEWTRCYRGIPYNHDIKSSVPYHMNNSIDGYRSLIYSGDHDIQVPFLGTQAWIRSLNYSIIDDWRPWMIKDQIAGYTTSYVNKMTFATVTGGGHTAEFTPKETFMMFQRWINGQPL

SEQ ID NO: 70647 - DNA, 1743 bp, Arabidopsis thaliana
  misc_feature (1)..(1743): Ceres Seq. ID no. 2716847
  misc_feature: MA Experiment ID: 20000185 Result: Up-regulated in Transcription
  misc_feature: MA Experiment 20000185 PARAMETER Experiment Name: At_Roots__P Parameter: Age (day) Value: 7 vs. 21
  misc_feature: MA Experiment 20000185 PARAMETER Experiment Name: At_Roots__P Parameter: Organism Value: A. thaliana
  misc_feature: MA Experiment 20000185 PARAMETER Experiment Name: At_Roots__P Parameter: Tissue Value: Roots vs. Whole Plant
  misc_feature: MA Experiment ID: 20000439 Result: Up-regulated in Transcription
  misc_feature: MA Experiment 20000439 PARAMETER Experiment Name: At_Roots__P Parameter: Age (day) Value: 14 vs. 21
  misc_feature: MA Experiment 20000439 PARAMETER Experiment Name: At_Roots__P Parameter: Organism Value: A. thaliana
  misc_feature: MA Experiment 20000439 PARAMETER Experiment Name: At_Roots__P Parameter: Tissue Value: Roots vs. Whole Plant
  misc_feature: MA Experiment ID: 20000451 Result: Down-regulated in Transcription
  misc_feature: MA Experiment 20000451 PARAMETER Experiment Name: At_CS6879_Shoots-Roots_P Parameter: Age (day) Value: 14
  misc_feature: MA Experiment 20000451 PARAMETER Experiment Name: At_CS6879_Shoots-Roots_P Parameter: Organism Value: A. thaliana
  misc_feature: MA Experiment 20000451 PARAMETER Experiment Name: At_CS6879_Shoots-Roots_P Parameter: Plant Line Value: CS6879 vs. WS
  misc_feature: MA Experiment 20000451 PARAMETER Experiment Name: At_CS6879_Shoots-Roots_P Parameter: Tissue Value: Roots
atgatcacaagaagcaggtgtcgaagatctttgttatggtttctagtgttccatggcggagctacagccaccggagctccctctggtgggaaagagctttctcagacgcctacttgggcagtcgccgtcgtctgcacctttctcatcctcatttcccatctccttgaaaagggtcttcaaagactcgccaacgtctgctttcttcttcttcttcttcttttcttacgagtgttcttgttcaaacattcattgtctgaaacatatgaatttgtttcttctcagtggctatggaagaagcataaaaactctctccttgaagccttagagaaaatcaaagctgagctgatgatccttggattcatttctttattactcacttttggagaaccatatattctcaagatctgtgttcctcgaaaagctgctctctctatgttaccttgtttatctgaagacacagtgcttttccagaaacttgctccatcatctcttagcaggcatcttttggctgctggtgatacatctattaattgcaaacaaggatctgagccactcataacattgaaaggcttgcaccaacttcacatcttgttgttcttcttggccatctttcatatcgtatatagtttaatcaccatgatgcttagcaggctcaagattcgtggatggaaaaagtgggagcaagagacattatctaatgactatgagttttctattgatcattcaagacttaggctcactcatgagacttcttttgtgagagaacatacaagtttctggacaacaactcctttcttcttttacgtcggatgcttctttaggcagttctttgtatctgttgaaagaaccgactacttgactctgcgccatggattcatctctgcccatttagctccaggaagaaagttcaacttccagagatatatcaaaagatctctcgaggatgatttcaagttggtagttggaataagtccagttctttgggcatcatttgtaatcttcttgctgttcaatgttaatggctggagaacattgttttgggcatcgatacctcctctactcataatcctagctgttggaacaaagcttcaagcaattatggcaacaatggcgctagaaatcgtagagacacatgcagtagttcaggggatgcctttagtgcaaggttcagatcgatacttttggttcgactgtcctcaactacttcttcatcttatccactttgccttgtttcagaatgctttccagataacacacttcttctggatatggtattcttttggattaaaatcatgcttccataaagatttcaatcttgtagtcagcaaactctttctatgcctaggagctttgatcttatgcagctacatcactctcccattgtacgccctcgttactcagatgatgaaatggtgtgtggagcagatgggttcacacatgaagaaagcagtgtttgatgagcaaatggcaaaggcattgaagaagtggcacaaagacatcaaattgaagaaaggtaaagcgaggaagctcccgagcaagacacttggtgtttcagagagtttcagcctctcttcctcttcctctgcaaccactcttcaccgttccaagaccactggtcactcttctaacatcatatactacaaacaagaagatgaagaagacgaaatgtctgatcttgaagctggagcagaggatgctattgacaggattcaacaacaggagatgcaattccacaactcttag

SEQ ID NO: 70648 - protein, 580 aa, Arabidopsis thaliana
  peptide (1)..(580): Ceres Seq. ID no. 2716848
  misc_feature (1)..(580): Homolog of NCBI NO: 30679982 NR Description: seven transmembrane MLO protein family (MLO7)
  misc_feature (167)..(580): Homolog of NCBI NO: 14091584 NR Description: membrane protein Mlo7 [Arabidopsis thaliana]
  misc_feature (56)..(561): Homolog of NCBI NO: 15239213 NR Description: Mlo protein-like; protein id: At5g65970.1, by cDNA: gi_14091589 [Arabidopsis thaliana]
  misc_feature (1)..(63): Homolog of NCBI NO: 15239213 NR Description: Mlo protein-like; protein id: At5g65970.1, by cDNA: gi_14091589 [Arabidopsis thaliana]
  misc_feature (96)..(564): Homolog of NCBI NO: 18398444 NR Description: similar to Mlo proteins from H. vulgare; protein At2g17480.1, supported by cDNA: gi_14091585 [Arabidopsis >gi|14091586|gb|AAK53801.1|AF369569_1 membrane protein Mlo8
  misc_feature (12)..(65): Homolog of NCBI NO: 18398444 NR Description: similar to Mlo proteins from H. vulgare; protein At2g17480.1, supported by cDNA: gi_14091585 [Arabidopsis >gi|14091586|gb|AAK53801.1|AF369569_1 membrane protein Mlo8
  misc_feature (96)..(341): Homolog of NCBI NO: 25346302 NR Description: similar to Mlo proteins from H. vulgare
  misc_feature (339)..(564): Homolog of NCBI NO: 25346302 NR Description: similar to Mlo proteins from H. vulgare
  misc_feature (12)..(65): Homolog of NCBI NO: 25346302 NR Description: similar to Mlo proteins from H. vulgare
  misc_feature (62)..(535): Homolog of NCBI NO: 14091580 NR Description: membrane protein Mlo5 [Arabidopsis thaliana]
MITRSRCRRSLLWFLVFHGGATATGAPSGGKELSQTPTWAVAVVCTFLILISHLLEKGLQRLANVCFLLLLLLFLRVFLFKHSLSETYEFVSSQWLWKKHKNSLLEALEKIKAELMILGFISLLLTFGEPYILKICVPRKAALSMLPCLSEDTVLFQKLAPSSLSRHLLAAGDTSINCKQGSEPLITLKGLHQLHILLFFLAIFHIVYSLITMMLSRLKIRGWKKWEQETLSNDYEFSIDHSRLRLTHETSFVREHTSFWTTTPFFFYVGCFFRQFFVSVERTDYLTLRHGFISAHLAPGRKFNFQRYIKRSLEDDFKLVVGISPVLWASFVIFLLFNVNGWRTLFWASIPPLLIILAVGTKLQAIMATMALEIVETHAVVQGMPLVQGSDRYFWFDCPQLLLHLIHFALFQNAFQITHFFWIWYSFGLKSCFHKDFNLVVSKLFLCLGALILCSYITLPLYALVTQMMKWCVEQMGSHMKKAVFDEQMAKALKKWHKDIKLKKGKARKLPSKTLGVSESFSLSSSSSATTLHRSKTTGHSSNIIYYKQEDEEDEMSDLEAGAEDAIDRIQQQEMQFHNS

SEQ ID NO: 70649 - protein, 465 aa, Arabidopsis thaliana
  peptide (1)..(465): Ceres Seq. ID no. 2716849
  misc_feature (1)..(465): Homolog of NCBI NO: 30679982 NR Description: seven transmembrane MLO protein family (MLO7)
  misc_feature (52)..(465): Homolog of NCBI NO: 14091584 NR Description: membrane protein Mlo7 [Arabidopsis thaliana]
  misc_feature (1)..(446): Homolog of NCBI NO: 15239213 NR Description: Mlo protein-like; protein id: At5g65970.1, by cDNA: gi_14091589 [Arabidopsis thaliana]
  misc_feature (1)..(449): Homolog of NCBI NO: 18398444 NR Description: similar to Mlo proteins from H. vulgare; protein At2g17480.1, supported by cDNA: gi_14091585 [Arabidopsis >gi|14091586|gb|AAK53801.1|AF369569_1 membrane protein Mlo8
  misc_feature (1)..(226): Homolog of NCBI NO: 25346302 NR Description: similar to Mlo proteins from H. vulgare
  misc_feature (224)..(449): Homolog of NCBI NO: 25346302 NR Description: similar to Mlo proteins from H. vulgare
  misc_feature (1)..(420): Homolog of NCBI NO: 14091580 NR Description: membrane protein Mlo5 [Arabidopsis thaliana]
  misc_feature (1)..(420): Homolog of NCBI NO: 15226140 NR Description: similar to Mlo proteins from H. vulgare; protein At2g33670.1, supported by cDNA: gi_14091579 [Arabidopsis
  misc_feature (1)..(421): Homolog of NCBI NO: 37536520 NR Description: putative Mlo (pathogen resistance) protein [Oryza
  misc_feature (1)..(388): Homolog of NCBI NO: 15217453 NR Description: Mlo-like protein; protein id: At1g42560.1
MILGFISLLLTFGEPYILKICVPRKAALSMLPCLSEDTVLFQKLAPSSLSRHLLAAGDTSINCKQGSEPLITLKGLHQLHILLFFLAIFHIVYSLITMMLSRLKIRGWKKWEQETLSNDYEFSIDHSRLRLTHETSFVREHTSFWTTTPFFFYVGCFFRQFFVSVERTDYLTLRHGFISAHLAPGRKFNFQRYIKRSLEDDFKLVVGISPVLWASFVIFLLFNVNGWRTLFWASIPPLLIILAVGTKLQAIMATMALEIVETHAVVQGMPLVQGSDRYFWFDCPQLLLHLIHFALFQNAFQITHFFWIWYSFGLKSCFHKDFNLVVSKLFLCLGALILCSYITLPLYALVTQMMKWCVEQMGSHMKKAVFDEQMAKALKKWHKDIKLKKGKARKLPSKTLGVSESFSLSSSSSATTLHRSKTTGHSSNIIYYKQEDEEDEMSDLEAGAEDAIDRIQQQEMQFHNS

SEQ ID NO: 70650 - protein, 436 aa, Arabidopsis thaliana
  peptide (1)..(436): Ceres Seq. ID no. 2716850
  misc_feature (1)..(436): Homolog of NCBI NO: 30679982 NR Description: seven transmembrane MLO protein family (MLO7)
  misc_feature (23)..(436): Homolog of NCBI NO: 14091584 NR Description: membrane protein Mlo7 [Arabidopsis thaliana]
  misc_feature (1)..(417): Homolog of NCBI NO: 15239213 NR Description: Mlo protein-like; protein id: At5g65970.1, by cDNA: gi_14091589 [Arabidopsis thaliana]
  misc_feature (1)..(420): Homolog of NCBI NO: 18398444 NR Description: similar to Mlo proteins from H. vulgare; protein At2g17480.1, supported by cDNA: gi_14091585 [Arabidopsis >gi|14091586|gb|AAK53801.1|AF369569_1 membrane protein Mlo8
  misc_feature (1)..(197): Homolog of NCBI NO: 25346302 NR Description: similar to Mlo proteins from H. vulgare
  misc_feature (195)..(420): Homolog of NCBI NO: 25346302 NR Description: similar to Mlo proteins from H. vulgare
  misc_feature (1)..(391): Homolog of NCBI NO: 14091580 NR Description: membrane protein Mlo5 [Arabidopsis thaliana]
  misc_feature (1)..(391): Homolog of NCBI NO: 15226140 NR Description: similar to Mlo proteins from H. vulgare; protein At2g33670.1, supported by cDNA: gi_14091579 [Arabidopsis
  misc_feature (1)..(392): Homolog of NCBI NO: 37536520 NR Description: putative Mlo (pathogen resistance) protein [Oryza
  misc_feature (1)..(359): Homolog of NCBI NO: 15217453 NR Description: Mlo-like protein; protein id: At1g42560.1
MLPCLSEDTVLFQKLAPSSLSRHLLAAGDTSINCKQGSEPLITLKGLHQLHILLFFLAIFHIVYSLITMMLSRLKIRGWKKWEQETLSNDYEFSIDHSRLRLTHETSFVREHTSFWTTTPFFFYVGCFFRQFFVSVERTDYLTLRHGFISAHLAPGRKFNFQRYIKRSLEDDFKLVVGISPVLWASFVIFLLFNVNGWRTLFWASIPPLLIILAVGTKLQAIMATMALEIVETHAVVQGMPLVQGSDRYFWFDCPQLLLHLIHFALFQNAFQITHFFWIWYSFGLKSCFHKDFNLVVSKLFLCLGALILCSYITLPLYALVTQMMKWCVEQMGSHMKKAVFDEQMAKALKKWHKDIKLKKGKARKLPSKTLGVSESFSLSSSSSATTLHRSKTTGHSSNIIYYKQEDEEDEMSDLEAGAEDAIDRIQQQEMQFHNS

SEQ ID NO: 70651 - DNA, 1077 bp, Arabidopsis thaliana
  misc_feature (1)..(1077): Ceres Seq. ID no. 2716859
  misc_feature: MA Experiment ID: 20000329 Result: Down-regulated in Transcription
  misc_feature: MA Experiment 20000329 PARAMETER Experiment Name: At_4deg_Cold_Sub_P Parameter: Age (day) Value: 14
  misc_feature: MA Experiment 20000329 PARAMETER Experiment Name: At_4deg_Cold_Sub_P Parameter: Organism Value: A. thaliana
  misc_feature: MA Experiment 20000329 PARAMETER Experiment Name: At_4deg_Cold_Sub_P Parameter: Plant Line Value: WS
  misc_feature: MA Experiment 20000329 PARAMETER Experiment Name: At_4deg_Cold_Sub_P Parameter: Temperature (deg C) Value: 4 vs. 22
  misc_feature: MA Experiment 20000329 PARAMETER Experiment Name: At_4deg_Cold_Sub_P Parameter: Timepoint (hr) Value: 6
  misc_feature: MA Experiment 20000329 PARAMETER Experiment Name: At_4deg_Cold_Sub_P Parameter: Tissue Value: Aerial
  misc_feature: MA Experiment ID: 20000440 Result: Up-regulated in Transcription
  misc_feature: MA Experiment 20000440 PARAMETER Experiment Name: At_Closed-Flower__Sub_P Parameter: Tissue Value: Closed Flower vs. Whole Plant
atgattccgtttcctctgttaccaacgccgattgaaaccaactacagagcttgcaccattccttatagattcccttccgataatctcaagaaagccactcctactgaaatctcctggatcaacgtcttcgccaattccattccttctttcaagaaacgtgcagagagcgataccagtgttccagatgctcctgctagagctaaaatttttgaacaaagatatgcgggatttcttgaaggctggaagaaagatccagagagtaatggtgggccaccagatggtgttattctcggccgagttcgtgagcatttactcagagagttaggatttagggacatattcaagaaagtcaaggatgaggagaatgcaaaggctatatcactatttcctgaagttgtcagtctgagtgatgctattgaagatgacggagaacggttagagaatttggtgagagggatatttgctggaaacatctttgatcttggttctgcacagttgtctctctttggtgctcccacaggaaaagcttgtcctaattacgcgctcttttcttttcgcattttgaagcttgctgaggttttctcaagggatggcatatctttcttggctacctctcaaaacttggttccacgaccatgggtcatcgatgacttgaacaagttccaagccaaatgggtcaagaagccttggaagaaggtcacttgtttacataattttgggtattttgcctttcgcaagagagttgctccgtcgaggaattcagacttaatctaccagttaaaggatggaaatggccaattgataggcgttgatacttcaaagcttctgattgcaaattcagggaacgatttagcggttattgatctctcaagagtatcgcacgagcttgcttacctttcatctgatgcagacttagtcatcctagaaggcatgggtcgcgggatcgagacaaacctttatgctcagttcaagtgtgattctctcaagatcggaatggtgaagcacgttgaagtagcacagtttctcggaggacgactttacgactgtgtctttaaattcaatgaagttcagagttaa

SEQ ID NO: 70652 - protein, 358 aa, Arabidopsis thaliana
  peptide (1)..(358): Ceres Seq. ID no. 2716860
  misc_feature (41)..(167): Pfam Name: Protein of unknown function DUF89 Pfam Description: Protein of unknown function DUF89
  misc_feature (1)..(358): Homolog of NCBI NO: 15227811 NR Description: unknown protein; protein id: At2g17320.1
  misc_feature (1)..(167): Homolog of NCBI NO: 18398388 NR Description: expressed protein; protein id: At2g17340.1, by cDNA: 2578., supported by cDNA: gi_15293086, supported by gi_20465694 [Arabidopsis thaliana] >gi|15293087|gb|AAK93654.1|
  misc_feature (254)..(358): Homolog of NCBI NO: 18398388 NR Description: expressed protein; protein id: At2g17340.1, by cDNA: 2578., supported by cDNA: gi_15293086, supported by gi_20465694 [Arabidopsis thaliana] >gi|15293087|gb|AAK93654.1|
  misc_feature (182)..(240): Homolog of NCBI NO: 18398388 NR Description: expressed protein; protein id: At2g17340.1, by cDNA: 2578., supported by cDNA: gi_15293086, supported by gi_20465694 [Arabidopsis thaliana] >gi|15293087|gb|AAK93654.1|
  misc_feature (1)..(167): Homolog of NCBI NO: 21554574 NR Description: unknown [Arabidopsis thaliana]
  misc_feature (254)..(358): Homolog of NCBI NO: 21554574 NR Description: unknown [Arabidopsis thaliana]
  misc_feature (182)..(240): Homolog of NCBI NO: 21554574 NR Description: unknown [Arabidopsis thaliana]
  misc_feature (1)..(167): Homolog of NCBI NO: 21554145 NR Description: unknown [Arabidopsis thaliana]
  misc_feature (254)..(357): Homolog of NCBI NO: 21554145 NR Description: unknown [Arabidopsis thaliana]
  misc_feature (182)..(240): Homolog of NCBI NO: 21554145 NR Description: unknown [Arabidopsis thaliana]
MIPFPLLPTPIETNYRACTIPYRFPSDNLKKATPTEISWINVFANSIPSFKKRAESDTSVPDAPARAKIFEQRYAGFLEGWKKDPESNGGPPDGVILGRVREHLLRELGFRDIFKKVKDEENAKAISLFPEVVSLSDAIEDDGERLENLVRGIFAGNIFDLGSAQLSLFGAPTGKACPNYALFSFRILKLAEVFSRDGISFLATSQNLVPRPWVIDDLNKFQAKWVKKPWKKVTCLHNFGYFAFRKRVAPSRNSDLIYQLKDGNGQLIGVDTSKLLIANSGNDLAVIDLSRVSHELAYLSSDADLVILEGMGRGIETNLYAQFKCDSLKIGMVKHVEVAQFLGGRLYDCVFKFNEVQS

SEQ ID NO: 70653 - DNA, 2238 bp, Arabidopsis thaliana
  misc_feature (1)..(2238): Ceres Seq. ID no. 2717036
  misc_feature: MA Experiment ID: 20000307 Result: Down-regulated in Transcription
  misc_feature: MA Experiment 20000307 PARAMETER Experiment Name: At_Germinating_Seeds_Sub_P Parameter: Age (hr) Value: 24 vs. 0
  misc_feature: MA Experiment 20000307 PARAMETER Experiment Name: At_Germinating_Seeds_Sub_P Parameter: Organism Value: A. thaliana
  misc_feature: MA Experiment 20000307 PARAMETER Experiment Name: At_Germinating_Seeds_Sub_P Parameter: Plant Line Value: WS
  misc_feature: MA Experiment 20000307 PARAMETER Experiment Name: At_Germinating_Seeds_Sub_P Parameter: Tissue Value: Germinating Seeds
atgattacaagcttatctcaaatctcttttgggacattgaggcgctttggctcttctgttttaccttctgcactgaaacgcgaatttgttgaaggattgcgtacgttagtaaggtctggtgatatccgtcgagctgtttccttattctattctgcgccggtcgagcttcagtctcaacaggcttacgcagctctgttccaagcatgtgcagagcaacgcaatctcctcgatggaatcaacttgcaccaccacatgctctcacatccctattgttattcacagaacgttatacttgctaatttcctcattaatatgtatgccaaatgtgggaatatcttatacgcacgacaggtgtttgatacaatgcctgagaggaatgttgtttcatggactgcattgatcacaggctatgtacaggctgggaatgagcaagagggattctgtcttttctcgtctatgttatcccattgtttccctaacgagtttacgctgtcaagcgtgttaacttcatgtcgatatgagcctggaaagcaggtacatggacttgctctgaaacttggtttacattgttcgatctatgtggcgaatgcagttatctctatgtacggtaggtgtcatgatggtgccgcagcatatgaagcttggactgtgtttgaagccataaagtttaagaatttggttacttggaactcaatgattgctgcttttcagtgctgcaatcttgggaaaaaggccattggcgtttttatgcggatgcatagtgatggagtgggatttgatcgtgccacgttgcttaatatatgttcttccttgtacaaaagctctgacttagttcctaatgaggtttcaaagtgttgtcttcaactgcattctctgactgtaaaatccgggttggtgactcagactgaagtggctactgcattgattaaagtttattcagaaatgttagaagactatactgactgctacaagctttttatggaaatgagtcactgcagggacattgttgcttggaatgggattataacagcgtttgcagtgtatgatccggagagagctattcatctctttggtcagttacgtcaggagaagctaagccctgactggtatactttctcaagtgtactaaaagcttgtgcaggacttgtcactgctcgccatgctttgtctatacacgctcaagtgatcaagggtggttttttggctgacacggtgctgaacaactcattaatccatgcgtatgccaagtgtggctctcttgacttgtgtatgcgtgtatttgacgatatggattcgcgggatgttgtttcctggaactcaatgctcaaggcttactcattacatggccaagtagactcaattctaccagtctttcagaaaatggacatcaaccccgattcagcgactttcatagcccttctctcggcttgcagccacgcaggacgagtagaagaaggattgagaatattcagatccatgtttgagaaacctgaaactcttcctcagctaaatcactacgcttgtgtgatcgatatgctaagccgagctgagcgttttgctgaggcagaagaggttatcaagcagatgccaatggacccagatgctgtagtttggattgcattattgggatcatgtagaaagcacggtaacacccggttgggtaagttagcggcagataaacttaaagagctagtcgaacccacaaactcaatgagttacatccagatgtcaaacatatacaacgcagaaggtagctttaacgaagccaatcttagcataaaggagatggaaacatggagagtacggaaagaaccagacttaagctggacagagataggaaacaaggttcacgaattcgcatcgggaggaagacaccgtccggacaaggaagccgtatacagagaattgaagagactgattagttggttaaaggagatgggttacgttccagaaatgaggtcagcttcacaagatatagaagacgaagaacaggaggaagataatttattacatcacagcgagaaacttgcgttagcgtttgcggttatggagggaagaaaatcgagtgattgtggtgtgaatttgatacagattatgaagaacacaaggatctgtattgattgccataacttcatgaaattagcttctaagcttttgggaaaagagattcttatgagagactcgaatcggtttcaccatttcaaagattcttcttgctcctgtaatgactactggtaa

SEQ ID NO: 70654 - protein, 745 aa, Arabidopsis thaliana
  peptide (1)..(745): Ceres Seq. ID no. 2717037
  misc_feature (60)..(94): Pfam Name: PPR repeat Pfam Description: PPR repeat
  misc_feature (30)..(745): Homolog of NCBI NO: 15242550 NR Description: selenium-binding protein-like; protein id:
  misc_feature (10)..(745): Homolog of NCBI NO: 30693150 NR Description: pentatricopeptide (PPR) repeat-containing protein
  misc_feature (96)..(745): Homolog of NCBI NO: 25354624 NR Description: protein F3O9.28 [imported] - Arabidopsis thaliana
  misc_feature (63)..(145): Homolog of NCBI NO: 25354624 NR Description: protein F3O9.28 [imported] - Arabidopsis thaliana
  misc_feature (62)..(745): Homolog of NCBI NO: 34915012 NR Description: P0458A05.10 [Oryza sativa (japonica
  misc_feature (62)..(745): Homolog of NCBI NO: 34912228 NR Description: P0415C01.16 [Oryza sativa (japonica
  misc_feature (95)..(745): Homolog of NCBI NO: 15229194 NR Description: putative protein; protein id: At3g49710.1
  misc_feature (65)..(139): Homolog of NCBI NO: 15229194 NR Description: putative protein; protein id: At3g49710.1
  misc_feature (228)..(745): Homolog of NCBI NO: 15227144 NR Description: hypothetical protein; protein id: At2g22070.1
  misc_feature (100)..(205): Homolog of NCBI NO: 15227144 NR Description: hypothetical protein; protein id: At2g22070.1
MITSLSQISFGTLRRFGSSVLPSALKREFVEGLRTLVRSGDIRRAVSLFYSAPVELQSQQAYAALFQACAEQRNLLDGINLHHHMLSHPYCYSQNVILANFLINMYAKCGNILYARQVFDTMPERNVVSWTALITGYVQAGNEQEGFCLFSSMLSHCFPNEFTLSSVLTSCRYEPGKQVHGLALKLGLHCSIYVANAVISMYGRCHDGAAAYEAWTVFEAIKFKNLVTWNSMIAAFQCCNLGKKAIGVFMRMHSDGVGFDRATLLNICSSLYKSSDLVPNEVSKCCLQLHSLTVKSGLVTQTEVATALIKVYSEMLEDYTDCYKLFMEMSHCRDIVAWNGIITAFAVYDPERAIHLFGQLRQEKLSPDWYTFSSVLKACAGLVTARHALSIHAQVIKGGFLADTVLNNSLIHAYAKCGSLDLCMRVFDDMDSRDVVSWNSMLKAYSLHGQVDSILPVFQKMDINPDSATFIALLSACSHAGRVEEGLRIFRSMFEKPETLPQLNHYACVIDMLSRAERFAEAEEVIKQMPMDPDAVVWIALLGSCRKHGNTRLGKLAADKLKELVEPTNSMSYIQMSNIYNAEGSFNEANLSIKEMETWRVRKEPDLSWTEIGNKVHEFASGGRHRPDKEAVYRELKRLISWLKEMGYVPEMRSASQDIEDEEQEEDNLLHHSEKLALAFAVMEGRKSSDCGVNLIQIMKNTRICIDCHNFMKLASKLLGKEILMRDSNRFHHFKDSSCSCNDYW

SEQ ID NO: 70655 - protein, 661 aa, Arabidopsis thaliana
  peptide (1)..(661): Ceres Seq. ID no. 2717038
  misc_feature (1)..(661): Homolog of NCBI NO: 15242550 NR Description: selenium-binding protein-like; protein id:
  misc_feature (1)..(661): Homolog of NCBI NO: 30693150 NR Description: pentatricopeptide (PPR) repeat-containing protein
  misc_feature (12)..(661): Homolog of NCBI NO: 25354624 NR Description: protein F3O9.28 [imported] - Arabidopsis thaliana
  misc_feature (1)..(61): Homolog of NCBI NO: 25354624 NR Description: protein F3O9.28 [imported] - Arabidopsis thaliana
  misc_feature (1)..(661): Homolog of NCBI NO: 34915012 NR Description: P0458A05.10 [Oryza sativa (japonica
  misc_feature (1)..(661): Homolog of NCBI NO: 34912228 NR Description: P0415C01.16 [Oryza sativa (japonica
  misc_feature (11)..(661): Homolog of NCBI NO: 15229194 NR Description: putative protein; protein id: At3g49710.1
  misc_feature (1)..(55): Homolog of NCBI NO: 15229194 NR Description: putative protein; protein id: At3g49710.1
  misc_feature (144)..(661): Homolog of NCBI NO: 15227144 NR Description: hypothetical protein; protein id: At2g22070.1
  misc_feature (16)..(121): Homolog of NCBI NO: 15227144 NR Description: hypothetical protein; protein id: At2g22070.1
MLSHPYCYSQNVILANFLINMYAKCGNILYARQVFDTMPERNVVSWTALITGYVQAGNEQEGFCLFSSMLSHCFPNEFTLSSVLTSCRYEPGKQVHGLALKLGLHCSIYVANAVISMYGRCHDGAAAYEAWTVFEAIKFKNLVTWNSMIAAFQCCNLGKKAIGVFMRMHSDGVGFDRATLLNICSSLYKSSDLVPNEVSKCCLQLHSLTVKSGLVTQTEVATALIKVYSEMLEDYTDCYKLFMEMSHCRDIVAWNGIITAFAVYDPERAIHLFGQLRQEKLSPDWYTFSSVLKACAGLVTARHALSIHAQVIKGGFLADTVLNNSLIHAYAKCGSLDLCMRVFDDMDSRDVVSWNSMLKAYSLHGQVDSILPVFQKMDINPDSATFIALLSACSHAGRVEEGLRIFRSMFEKPETLPQLNHYACVIDMLSRAERFAEAEEVIKQMPMDPDAVVWIALLGSCRKHGNTRLGKLAADKLKELVEPTNSMSYIQMSNIYNAEGSFNEANLSIKEMETWRVRKEPDLSWTEIGNKVHEFASGGRHRPDKEAVYRELKRLISWLKEMGYVPEMRSASQDIEDEEQEEDNLLHHSEKLALAFAVMEGRKSSDCGVNLIQIMKNTRICIDCHNFMKLASKLLGKEILMRDSNRFHHFKDSSCSCNDYW

SEQ ID NO: 70656 - protein, 641 aa, Arabidopsis thaliana
  peptide (1)..(641): Ceres Seq. ID no. 2717039
  misc_feature (1)..(641): Homolog of NCBI NO: 15242550 NR Description: selenium-binding protein-like; protein id:
  misc_feature (1)..(641): Homolog of NCBI NO: 30693150 NR Description: pentatricopeptide (PPR) repeat-containing protein
  misc_feature (1)..(641): Homolog of NCBI NO: 25354624 NR Description: protein F3O9.28 [imported] - Arabidopsis thaliana
  misc_feature (1)..(41): Homolog of NCBI NO: 25354624 NR Description: protein F3O9.28 [imported] - Arabidopsis thaliana
  misc_feature (1)..(641): Homolog of NCBI NO: 34915012 NR Description: P0458A05.10 [Oryza sativa (japonica
  misc_feature (1)..(641): Homolog of NCBI NO: 34912228 NR Description: P0415C01.16 [Oryza sativa (japonica
  misc_feature (1)..(641): Homolog of NCBI NO: 15229194 NR Description: putative protein; protein id: At3g49710.1
  misc_feature (1)..(35): Homolog of NCBI NO: 15229194 NR Description: putative protein; protein id: At3g49710.1
  misc_feature (124)..(641): Homolog of NCBI NO: 15227144 NR Description: hypothetical protein; protein id: At2g22070.1
  misc_feature (1)..(101): Homolog of NCBI NO: 15227144 NR Description: hypothetical protein; protein id: At2g22070.1
MYAKCGNILYARQVFDTMPERNVVSWTALITGYVQAGNEQEGFCLFSSMLSHCFPNEFTLSSVLTSCRYEPGKQVHGLALKLGLHCSIYVANAVISMYGRCHDGAAAYEAWTVFEAIKFKNLVTWNSMIAAFQCCNLGKKAIGVFMRMHSDGVGFDRATLLNICSSLYKSSDLVPNEVSKCCLQLHSLTVKSGLVTQTEVATALIKVYSEMLEDYTDCYKLFMEMSHCRDIVAWNGIITAFAVYDPERAIHLFGQLRQEKLSPDWYTFSSVLKACAGLVTARHALSIHAQVIKGGFLADTVLNNSLIHAYAKCGSLDLCMRVFDDMDSRDVVSWNSMLKAYSLHGQVDSILPVFQKMDINPDSATFIALLSACSHAGRVEEGLRIFRSMFEKPETLPQLNHYACVIDMLSRAERFAEAEEVIKQMPMDPDAVVWIALLGSCRKHGNTRLGKLAADKLKELVEPTNSMSYIQMSNIYNAEGSFNEANLSIKEMETWRVRKEPDLSWTEIGNKVHEFASGGRHRPDKEAVYRELKRLISWLKEMGYVPEMRSASQDIEDEEQEEDNLLHHSEKLALAFAVMEGRKSSDCGVNLIQIMKNTRICIDCHNFMKLASKLLGKEILMRDSNRFHHFKDSSCSCNDYW

SEQ ID NO: 70657 - DNA, 2046 bp, Arabidopsis thaliana
  misc_feature (1)..(2046): Ceres Seq. ID no. 2717056
  misc_feature: MA Experiment ID: 20000179 Result: Down-regulated in Transcription
  misc_feature: MA Experiment 20000179 PARAMETER Experiment Name: At_Germinating_Seeds_P Parameter: Age (hr) Value: 6 vs. 0
  misc_feature: MA Experiment 20000179 PARAMETER Experiment Name: At_Germinating_Seeds_P Parameter: Tissue Value: Germinating Seeds
atgctgagtgagagtcttttcaaatctcttggacatttggccagccacggtcatttgcacgacgctttcaaaacgttttctcttcttcgtcttcaatcttcttctgcagtttcagatgacctcgttttgcattccgcggcttcccttttatccgcttgcgttgatgttcgtgcatttttagcaggggtgcaagttcacgctcactgtatttcgtcgggtgtcgaatatcactctgtgttagtcccaaagctggttaccttttactctgctttcaatctccacaatgaagctcaatcgattattgagaactctgacattttgcatcccttaccttggaatgtgctcattgcttcgtatgccaagaacgagctttttgaggaggttattgctgcttacaagagaatggtgagcaagggaatccgacccgatgccttcacttatccgtctgttcttaaggcttgtggtgaaacacttgacgttgcctttggaagggtggttcatggttccatcgaggttagctcttacaagtccagcttgtatgtttgtaatgcattgatctctatgtataaaaggtttagaaatatgggtattgctcggaggttgtttgatcgaatgtttgaaagggatgctgtctcatggaatgcagtgataaactgttatgcttcggaaggcatgtggagtgaagcgtttgagcttttcgataaaatgtggttttcaggtgttgaggtcagtgtcataacttggaatattatttctggaggttgtttgcaaacaggaaattatgtaggagctttgggtttgatctctaggatgagaaattttcctacgagcttagatcctgtggctatgattattggtttgaaggcttgctctctcataggagcaatacgattgggaaaagagattcacggtcttgctattcacagttcttatgatgggattgacaatgttcgaaacacgttgatcacaatgtactcaaaatgcaaagaccttaggcacgccttaatagtgtttcgacagactgaagaaaatagtttgtgtacttggaactctatcatttccggttatgcgcagctgaacaaatcagaagaagcctctcacctgctgagggagatgttggttgctggctttcagccaaattccattacactagcaagcattctccctctttgtgctcggattgcaaacctgcaacatggaaaagagtttcattgctacatcctgaggcgcaagtgcttcaaggactatacaatgctgtggaactcccttgttgatgtttatgcaaaatcgggaaagattgtagctgcaaagcaagtatctgatttgatgagcaaaagagacgaagtaacatacacttccttgatagatggatacggaaatcaaggtgaagggggagtagccttggccctgttcaaggagatgaccagatctggtattaaacctgaccatgtaaccgtggttgcagttctatcagcctgcagtcattccaagttagtccatgaaggtgaaaggctgtttatgaagatgcagtgtgagtatggtatacgtccttgtcttcaacatttttcttgtatggttgatctctatggcagagcaggtttcctagcaaaagccaaagacataattcacaatatgccatataagccatccggtgccacgtgggctaccctactgaacgcgtgtcacatccatgggaacacacagattggtaaatgggcagcagaaaagctcctggagatgaagccagagaacccgggatactacgtgttaattgcaaatatgtatgcagctgctggttcttggagcaagcttgctgaagtgaggactataatgagggacttgggtgtgaaaaaggatcctggctgtgcttggatcgacacagattctggattttcactgttttcggtgggggacacatcaagccctgaagcatgtaatacttatcctctattagatggactgaatcagctgatgaaagacaatgctggttatgccatcaataaggtgcaaagttcagatgaagaacttcttcaagaaatgggatga

SEQ ID NO: 70658 - protein, 681 aa, Arabidopsis thaliana
  peptide (1)..(681): Ceres Seq. ID no. 2717057
  misc_feature (520)..(554): Pfam Name: PPR repeat Pfam Description: PPR repeat
  misc_feature (6)..(629): Homolog of NCBI NO: 15220977 NR Description: hypothetical protein; protein id: At1g22830.1
  misc_feature (5)..(660): Homolog of NCBI NO: 34904686 NR Description: P0446G09.7 [Oryza sativa (japonica
  misc_feature (6)..(393): Homolog of NCBI NO: 7487353 NR Description: hypothetical protein T22J18.1 - Arabidopsis
  misc_feature (206)..(674): Homolog of NCBI NO: 15218216 NR Description: hypothetical protein; protein id: At1g15510.1
  misc_feature (13)..(260): Homolog of NCBI NO: 15218216 NR Description: hypothetical protein; protein id: At1g15510.1
  misc_feature (13)..(679): Homolog of NCBI NO: 15237421 NR Description: putative protein; protein id: At5g16860.1
  misc_feature (33)..(680): Homolog of NCBI NO: 15223099 NR Description: unknown protein; protein id: At1g08070.1 thaliana] >gi|8778839|gb|AAF79838.1|AC026875_18 T6D22.15
  misc_feature (216)..(667): Homolog of NCBI NO: 34915012 NR Description: P0458A05.10 [Oryza sativa (japonica
  misc_feature (46)..(261): Homolog of NCBI NO: 34915012 NR Description: P0458A05.10 [Oryza sativa (japonica
  misc_feature (214)..(664): Homolog of NCBI NO: 15242550 NR Description: selenium-binding protein-like; protein id:
MLSESLFKSLGHLASHGHLHDAFKTFSLLRLQSSSAVSDDLVLHSAASLLSACVDVRAFLAGVQVHAHCISSGVEYHSVLVPKLVTFYSAFNLHNEAQSIIENSDILHPLPWNVLIASYAKNELFEEVIAAYKRMVSKGIRPDAFTYPSVLKACGETLDVAFGRVVHGSIEVSSYKSSLYVCNALISMYKRFRNMGIARRLFDRMFERDAVSWNAVINCYASEGMWSEAFELFDKMWFSGVEVSVITWNIISGGCLQTGNYVGALGLISRMRNFPTSLDPVAMIIGLKACSLIGAIRLGKEIHGLAIHSSYDGIDNVRNTLITMYSKCKDLRHALIVFRQTEENSLCTWNSIISGYAQLNKSEEASHLLREMLVAGFQPNSITLASILPLCARIANLQHGKEFHCYILRRKCFKDYTMLWNSLVDVYAKSGKIVAAKQVSDLMSKRDEVTYTSLIDGYGNQGEGGVALALFKEMTRSGIKPDHVTVVAVLSACSHSKLVHEGERLFMKMQCEYGIRPCLQHFSCMVDLYGRAGFLAKAKDIIHNMPYKPSGATWATLLNACHIHGNTQIGKWAAEKLLEMKPENPGYYVLIANMYAAAGSWSKLAEVRTIMRDLGVKKDPGCAWIDTDSGFSLFSVGDTSSPEACNTYPLLDGLNQLMKDNAGYAINKVQSSDEELLQEMG

SEQ ID NO: 70659 - protein, 547 aa, Arabidopsis thaliana
  peptide (1)..(547): Ceres Seq. ID no. 2717058
  misc_feature (386)..(420): Pfam Name: PPR repeat Pfam Description: PPR repeat
  misc_feature (1)..(495): Homolog of NCBI NO: 15220977 NR Description: hypothetical protein; protein id: At1g22830.1
  misc_feature (1)..(526): Homolog of NCBI NO: 34904686 NR Description: P0446G09.7 [Oryza sativa (japonica
  misc_feature (1)..(259): Homolog of NCBI NO: 7487353 NR Description: hypothetical protein T22J18.1 - Arabidopsis
  misc_feature (72)..(540): Homolog of NCBI NO: 15218216 NR Description: hypothetical protein; protein id: At1g15510.1
  misc_feature (1)..(126): Homolog of NCBI NO: 15218216 NR Description: hypothetical protein; protein id: At1g15510.1
  misc_feature (1)..(545): Homolog of NCBI NO: 15237421 NR Description: putative protein; protein id: At5g16860.1
  misc_feature (1)..(546): Homolog of NCBI NO: 15223099 NR Description: unknown protein; protein id: At1g08070.1 thaliana] >gi|8778839|gb|AAF79838.1|AC026875_18 T6D22.15
  misc_feature (82)..(533): Homolog of NCBI NO: 34915012 NR Description: P0458A05.10 [Oryza sativa (japonica
  misc_feature (1)..(127): Homolog of NCBI NO: 34915012 NR Description: P0458A05.10 [Oryza sativa (japonica
  misc_feature (80)..(530): Homolog of NCBI NO: 15242550 NR Description: selenium-binding protein-like; protein id:
MVSKGIRPDAFTYPSVLKACGETLDVAFGRVVHGSIEVSSYKSSLYVCNALISMYKRFRNMGIARRLFDRMFERDAVSWNAVINCYASEGMWSEAFELFDKMWFSGVEVSVITWNIISGGCLQTGNYVGALGLISRMRNFPTSLDPVAMIIGLKACSLIGAIRLGKEIHGLAIHSSYDGIDNVRNTLITMYSKCKDLRHALIVFRQTEENSLCTWNSIISGYAQLNKSEEASHLLREMLVAGFQPNSITLASILPLCARIANLQHGKEFHCYILRRKCFKDYTMLWNSLVDVYAKSGKIVAAKQVSDLMSKRDEVTYTSLIDGYGNQGEGGVALALFKEMTRSGIKPDHVTVVAVLSACSHSKLVHEGERLFMKMQCEYGIRPCLQHFSCMVDLYGRAGFLAKAKDIIHNMPYKPSGATWATLLNACHIHGNTQIGKWAAEKLLEMKPENPGYYVLIANMYAAAGSWSKLAEVRTIMRDLGVKKDPGCAWIDTDSGFSLFSVGDTSSPEACNTYPLLDGLNQLMKDNAGYAINKVQSSDEELLQEMG

SEQ ID NO: 70660 - protein, 494 aa, Arabidopsis thaliana
  peptide (1)..(494): Ceres Seq. ID no. 2717059
  misc_feature (333)..(367): Pfam Name: PPR repeat Pfam Description: PPR repeat
  misc_feature (1)..(442): Homolog of NCBI NO: 15220977 NR Description: hypothetical protein; protein id: At1g22830.1
  misc_feature (1)..(473): Homolog of NCBI NO: 34904686 NR Description: P0446G09.7 [Oryza sativa (japonica
  misc_feature (1)..(206): Homolog of NCBI NO: 7487353 NR Description: hypothetical protein T22J18.1 - Arabidopsis
  misc_feature (19)..(487): Homolog of NCBI NO: 15218216 NR Description: hypothetical protein; protein id: At1g15510.1
  misc_feature (1)..(73): Homolog of NCBI NO: 15218216 NR Description: hypothetical protein; protein id: At1g15510.1
  misc_feature (1)..(492): Homolog of NCBI NO: 15237421 NR Description: putative protein; protein id: At5g16860.1
  misc_feature (1)..(493): Homolog of NCBI NO: 15223099 NR Description: unknown protein; protein id: At1g08070.1 thaliana] >gi|8778839|gb|AAF79838.1|AC026875_18 T6D22.15
  misc_feature (29)..(480): Homolog of NCBI NO: 34915012 NR Description: P0458A05.10 [Oryza sativa (japonica
  misc_feature (1)..(74): Homolog of NCBI NO: 34915012 NR Description: P0458A05.10 [Oryza sativa (japonica
  misc_feature (27)..(477): Homolog of NCBI NO: 15242550 NR Description: selenium-binding protein-like; protein id:
MYKRFRNMGIARRLFDRMFERDAVSWNAVINCYASEGMWSEAFELFDKMWFSGVEVSVITWNIISGGCLQTGNYVGALGLISRMRNFPTSLDPVAMIIGLKACSLIGAIRLGKEIHGLAIHSSYDGIDNVRNTLITMYSKCKDLRHALIVFRQTEENSLCTWNSIISGYAQLNKSEEASHLLREMLVAGFQPNSITLASILPLCARIANLQHGKEFHCYILRRKCFKDYTMLWNSLVDVYAKSGKIVAAKQVSDLMSKRDEVTYTSLIDGYGNQGEGGVALALFKEMTRSGIKPDHVTVVAVLSACSHSKLVHEGERLFMKMQCEYGIRPCLQHFSCMVDLYGRAGFLAKAKDIIHNMPYKPSGATWATLLNACHIHGNTQIGKWAAEKLLEMKPENPGYYVLIANMYAAAGSWSKLAEVRTIMRDLGVKKDPGCAWIDTDSGFSLFSVGDTSSPEACNTYPLLDGLNQLMKDNAGYAINKVQSSDEELLQEMG

SEQ ID NO: 70661 - DNA, 1968 bp, Arabidopsis thaliana
  misc_feature (1)..(1968): Ceres Seq. ID no. 2717064
  misc_feature: MA Experiment ID: 20000439 Result: Up-regulated in Transcription
  misc_feature: MA Experiment 20000439 PARAMETER Experiment Name: At_Roots__P Parameter: Age (day) Value: 14 vs. 21
  misc_feature: MA Experiment 20000439 PARAMETER Experiment Name: At_Roots__P Parameter: Organism Value: A. thaliana
  misc_feature: MA Experiment 20000439 PARAMETER Experiment Name: At_Roots__P Parameter: Tissue Value: Roots vs. Whole Plant
  misc_feature: MA Experiment ID: 20000456 Result: Up-regulated in Transcription
  misc_feature: MA Experiment 20000456 PARAMETER Experiment Name: At_100uM_BA_P Parameter: Age (day) Value: 14
  misc_feature: MA Experiment 20000456 PARAMETER Experiment Name: At_100uM_BA_P Parameter: Organism Value: A. thaliana
  misc_feature: MA Experiment 20000456 PARAMETER Experiment Name: At_100uM_BA_P Parameter: Plant Line Value: WS
  misc_feature: MA Experiment 20000456 PARAMETER Experiment Name: At_100uM_BA_P Parameter: Timepoint (hr) Value: 6
  misc_feature: MA Experiment 20000456 PARAMETER Experiment Name: At_100uM_BA_P Parameter: Tissue Value: Aerial
  misc_feature: MA Experiment 20000456 PARAMETER Experiment Name: At_100uM_BA_P Parameter: Treatment Value: 100uM BA vs. No Treatment
  misc_feature: MA Experiment ID: 20000709 Result: Up-regulated in Transcription
  misc_feature: MA Experiment 20000709 PARAMETER Experiment Name: At_15mM_NH4NO3_L-to-H_P Parameter: Age (hr) Value: 14
  misc_feature: MA Experiment 20000709 PARAMETER Experiment Name: At_15mM_NH4NO3_L-to-H_P Parameter: Organism Value: A. thaliana
  misc_feature: MA Experiment 20000709 PARAMETER Experiment Name: At_15mM_NH4NO3_L-to-H_P Parameter: Plant Line Value: WS
  misc_feature: MA Experiment 20000709 PARAMETER Experiment Name: At_15mM_NH4NO3_L-to-H_P Parameter: Timepoint (hr) Value: 4
  misc_feature: MA Experiment 20000709 PARAMETER Experiment Name: At_15mM_NH4NO3_L-to-H_P Parameter: Tissue Value: Aerial
  misc_feature: MA Experiment 20000709 PARAMETER Experiment Name: At_15mM_NH4NO3_L-to-H_P Parameter: Treatment Value: 15mM NH4NO3 vs. 30mM Mannitol
  misc_feature: MA Experiment ID: 20001905 Result: Up-regulated in Transcription
  misc_feature: MA Experiment 20001905 PARAMETER Experiment Name: At_Drought_Reproduction_P Parameter: Age (day) Value: 40
  misc_feature: MA Experiment 20001905 PARAMETER Experiment Name: At_Drought_Reproduction_P Parameter: Organism Value: A. thaliana
  misc_feature: MA Experiment 20001905 PARAMETER Experiment Name: At_Drought_Reproduction_P Parameter: Plant Line Value: WS
  misc_feature: MA Experiment 20001905 PARAMETER Experiment Name: At_Drought_Reproduction_P Parameter: Timepoint (day) Value: 10
  misc_feature: MA Experiment 20001905 PARAMETER Experiment Name: At_Drought_Reproduction_P Parameter: Tissue Value: Rosettes
  misc_feature: MA Experiment 20001905 PARAMETER Experiment Name: At_Drought_Reproduction_P Parameter: Treatment Value: Drought vs. No Drought
atgggttgtatttgtgccaccgcccgttcaccaagcgccgccgttaccgataaagatctattagattccagcaaatccatccttcaacttctccctcatcatcccccgtcgtcttcgtcttcatccaagaaggaaggatctttcacacgtacgacttcttcagcttctatcaccattgtggctaatggttatcctgtggcacgccgtccttccacttcatctgatcgaaacagcaccaaaccggtcgttgttgtgggagctccgaccagaaatccaacaagaagagtcaccgctataccggttgcacagccggcacagcagcagccagcacgtgtgatcagcaataaaacggaactccctgctgcagaatggccgtcttggctggcttctgttgctggggaggccattaaaggatgggttcctcgctgcgcagagtcctttgagaagttagacaaaattggacaggggacttacagcagcgtgtacaaagctagagaccttgaaacggggaagattgtggcgatgaagaaagttcggtttgtgaacatggatccagagagtgttcggtttatggccagggagattctcattcttcgtaagcttgatcaccccaatgttatgaagctagaaggtctagttacctctagactctcaggtagcctctaccttgtctttgagtacatggaacacgatctcgcaggtctagctgcaactcctggaatcaaattctctgaacctcagatcaagtgctatatgcagcaattgttccgtgggcttgaacattgccacagacgaggaattcttcaccgtgatattaaaggctcaaatctcttaatcaataatgaaggtgtcttgaagattggtgatttcggattggcgaatttttaccgaggtgatggagatctgcagctgaccagtcgtgttgtgaccttatggtacagagcacctgagctgttgctcggtgccactgagtatggaccagccattgacctgtggagcgccggctgcattctcactgagctcttcgccggaaaacctattatgccaggacgcacagaagtggagcagatgcacaagatctttaagctctgtggttcaccctcggaagattactggagaagagcaacactgccactagcaacaagctttaaacccagtcatccttacaagcctgttcttgctgaaacctttaaccatttcccttcatcagctctgatgctcatcaataagctactggcaatagaacctgaaaaacggggatcggctgcttctaccttgaggagcgaattcttcaccacggagccactccctgcgaatccatcaaacttacctagatatccaccaagcaaggaacttgatgccaagcttcgcaacgaagaagcaagaaaactaagggcagaaggtaacaagagaagagggggagaaactgtgacaagaggacggccaaaggatcttaaaacagcccagacaccagagtttatggctgcaggacagtccaaagtcacatgcataagccacaaattcaaaacagacgaggaaggtggcaccgggtttaggatagaaccaccaagaagagggatccagcagaatggtaaagctcatgcttcttcaatggttcacccaacagtggctgatacagaatggaacggaggtggaagcatcaaaagacaaactaatgcagagatgaagtctaggacatctcaaacaggagacttgtctggtgaatcttataggagagatcccaacagagattactcaaccggcaatgcaccaaggaaaaacagaatcaattactcaggaccattgatgcctcctggtggaaatcttgaagatttgcttaaagagcatgagaagcagatccaacaagctgtccgcaaagcacgtgtagaaaagtctgcatcaagaaaaaaccaagctttaacaggacaacaacagcagcaacgttacacaggaagaaatgctcggtag

SEQ ID NO: 70662 - protein, 655 aa, Arabidopsis thaliana
  peptide (1)..(655): Ceres Seq. ID no. 2717065
  misc_feature (147)..(431): Pfam Name: Protein kinase domain Pfam Description: Protein kinase domain
  misc_feature (267)..(655): Homolog of NCBI NO: 25406116 NR Description: hypothetical protein F14O23.1 [imported] - thaliana >gi|7239515|gb|AAF43241.1|AC012654_25 Strong similarity the putative protein kinase F26A9.10 gi|6682614 from A. thaliana
  misc_feature (1)..(637): Homolog of NCBI NO: 7488162 NR Description: probable protein kinase T5L19.140 (EC 2.7.1.-) - thaliana >gi|4539004|emb|CAB39625.1| putative protein kinase thaliana] >gi|7267697|emb|CAB78124.1| putative protein kinase
  misc_feature (1)..(545): Homolog of NCBI NO: 15217643 NR Description: protein kinase, putative; protein id: At1g33770.1
  misc_feature (536)..(641): Homolog of NCBI NO: 15217643 NR Description: protein kinase, putative; protein id: At1g33770.1
  misc_feature (172)..(637): Homolog of NCBI NO: 30681286 NR Description: protein kinase -related [Arabidopsis thaliana]
  misc_feature (1)..(592): Homolog of NCBI NO: 15217565 NR Description: putative protein kinase; protein id: At1g09600.1
  misc_feature (1)..(592): Homolog of NCBI NO: 25402555 NR Description: hypothetical protein [imported] - Arabidopsis >gi|3482933|gb|AAC33218.1| Similar to cdc2 protein kinases
  misc_feature (582)..(655): Homolog of NCBI NO: 15217565 NR Description: putative protein kinase; protein id: At1g09600.1
  misc_feature (582)..(655): Homolog of NCBI NO: 25402555 NR Description: hypothetical protein [imported] - Arabidopsis >gi|3482933|gb|AAC33218.1| Similar to cdc2 protein kinases
  misc_feature (104)..(597): Homolog of NCBI NO: 15223647 NR Description: CRK1 protein, putative; protein id: At1g57700.1
MGCICATARSPSAAVTDKDLLDSSKSILQLLPHHPPSSSSSSKKEGSFTRTTSSASITIVANGYPVARRPSTSSDRNSTKPVVVVGAPTRNPTRRVTAIPVAQPAQQQPARVISNKTELPAAEWPSWLASVAGEAIKGWVPRCAESFEKLDKIGQGTYSSVYKARDLETGKIVAMKKVRFVNMDPESVRFMAREILILRKLDHPNVMKLEGLVTSRLSGSLYLVFEYMEHDLAGLAATPGIKFSEPQIKCYMQQLFRGLEHCHRRGILHRDIKGSNLLINNEGVLKIGDFGLANFYRGDGDLQLTSRVVTLWYRAPELLLGATEYGPAIDLWSAGCILTELFAGKPIMPGRTEVEQMHKIFKLCGSPSEDYWRRATLPLATSFKPSHPYKPVLAETFNHFPSSALMLINKLLAIEPEKRGSAASTLRSEFFTTEPLPANPSNLPRYPPSKELDAKLRNEEARKLRAEGNKRRGGETVTRGRPKDLKTAQTPEFMAAGQSKVTCISHKFKTDEEGGTGFRIEPPRRGIQQNGKAHASSMVHPTVADTEWNGGGSIKRQTNAEMKSRTSQTGDLSGESYRRDPNRDYSTGNAPRKNRINYSGPLMPPGGNLEDLLKEHEKQIQQAVRKARVEKSASRKNQALTGQQQQQRYTGRNAR

SEQ ID NO: 70663 - protein, 481 aa, Arabidopsis thaliana
  peptide (1)..(481): Ceres Seq. ID no. 2717066
  misc_feature (1)..(257): Pfam Name: Protein kinase domain Pfam Description: Protein kinase domain
  misc_feature (1)..(371): Homolog of NCBI NO: 15217643 NR Description: protein kinase, putative; protein id: At1g33770.1
  misc_feature (362)..(467): Homolog of NCBI NO: 15217643 NR Description: protein kinase, putative; protein id: At1g33770.1
  misc_feature (1)..(463): Homolog of NCBI NO: 30681286 NR Description: protein kinase -related [Arabidopsis thaliana]
  misc_feature (1)..(418): Homolog of NCBI NO: 15217565 NR Description: putative protein kinase; protein id: At1g09600.1
  misc_feature (93)..(481): Homolog of NCBI NO: 25406116 NR Description: hypothetical protein F14O23.1 [imported] - thaliana >gi|7239515|gb|AAF43241.1|AC012654_25 Strong similarity the putative protein kinase F26A9.10 gi|6682614 from A. thaliana
  misc_feature (1)..(463): Homolog of NCBI NO: 7488162 NR Description: probable protein kinase T5L19.140 (EC 2.7.1.-) - thaliana >gi|4539004|emb|CAB39625.1| putative protein kinase thaliana] >gi|7267697|emb|CAB78124.1| putative protein kinase
  misc_feature (1)..(418): Homolog of NCBI NO: 25402555 NR Description: hypothetical protein [imported] - Arabidopsis >gi|3482933|gb|AAC33218.1| Similar to cdc2 protein kinases
  misc_feature (408)..(481): Homolog of NCBI NO: 15217565 NR Description: putative protein kinase; protein id: At1g09600.1
  misc_feature (408)..(481): Homolog of NCBI NO: 25402555 NR Description: hypothetical protein [imported] - Arabidopsis >gi|3482933|gb|AAC33218.1| Similar to cdc2 protein kinases
  misc_feature (1)..(423): Homolog of NCBI NO: 15223647 NR Description: CRK1 protein, putative; protein id: At1g57700.1
MKKVRFVNMDPESVRFMAREILILRKLDHPNVMKLEGLVTSRLSGSLYLVFEYMEHDLAGLAATPGIKFSEPQIKCYMQQLFRGLEHCHRRGILHRDIKGSNLLINNEGVLKIGDFGLANFYRGDGDLQLTSRVVTLWYRAPELLLGATEYGPAIDLWSAGCILTELFAGKPIMPGRTEVEQMHKIFKLCGSPSEDYWRRATLPLATSFKPSHPYKPVLAETFNHFPSSALMLINKLLAIEPEKRGSAASTLRSEFFTTEPLPANPSNLPRYPPSKELDAKLRNEEARKLRAEGNKRRGGETVTRGRPKDLKTAQTPEFMAAGQSKVTCISHKFKTDEEGGTGFRIEPPRRGIQQNGKAHASSMVHPTVADTEWNGGGSIKRQTNAEMKSRTSQTGDLSGESYRRDPNRDYSTGNAPRKNRINYSGPLMPPGGNLEDLLKEHEKQIQQAVRKARVEKSASRKNQALTGQQQQQRYTGRNAR

SEQ ID NO: 70664 - protein, 473 aa, Arabidopsis thaliana
  peptide (1)..(473): Ceres Seq. ID no. 2717067
  misc_feature (1)..(249): Pfam Name: Protein kinase domain Pfam Description: Protein kinase domain
  misc_feature (85)..(473): Homolog of NCBI NO: 25406116 NR Description: hypothetical protein F14O23.1 [imported] - thaliana >gi|7239515|gb|AAF43241.1|AC012654_25 Strong similarity the putative protein kinase F26A9.10 gi|6682614 from A. thaliana
  misc_feature (1)..(455): Homolog of NCBI NO: 7488162 NR Description: probable protein kinase T5L19.140 (EC 2.7.1.-) - thaliana >gi|4539004|emb|CAB39625.1| putative protein kinase thaliana] >gi|7267697|emb|CAB78124.1| putative protein kinase
  misc_feature (1)..(363): Homolog of NCBI NO: 15217643 NR Description: protein kinase, putative; protein id: At1g33770.1
  misc_feature (354)..(459): Homolog of NCBI NO: 15217643 NR Description: protein kinase, putative; protein id: At1g33770.1
  misc_feature (1)..(455): Homolog of NCBI NO: 30681286 NR Description: protein kinase -related [Arabidopsis thaliana]
  misc_feature (1)..(410): Homolog of NCBI NO: 15217565 NR Description: putative protein kinase; protein id: At1g09600.1
  misc_feature (1)..(410): Homolog of NCBI NO: 25402555 NR Description: hypothetical protein [imported] - Arabidopsis >gi|3482933|gb|AAC33218.1| Similar to cdc2 protein kinases
  misc_feature (400)..(473): Homolog of NCBI NO: 15217565 NR Description: putative protein kinase; protein id: At1g09600.1
  misc_feature (400)..(473): Homolog of NCBI NO: 25402555 NR Description: hypothetical protein [imported] - Arabidopsis >gi|3482933|gb|AAC33218.1| Similar to cdc2 protein kinases
  misc_feature (1)..(415): Homolog of NCBI NO: 15223647 NR Description: CRK1 protein, putative; protein id: At1g57700.1
MDPESVRFMAREILILRKLDHPNVMKLEGLVTSRLSGSLYLVFEYMEHDLAGLAATPGIKFSEPQIKCYMQQLFRGLEHCHRRGILHRDIKGSNLLINNEGVLKIGDFGLANFYRGDGDLQLTSRVVTLWYRAPELLLGATEYGPAIDLWSAGCILTELFAGKPIMPGRTEVEQMHKIFKLCGSPSEDYWRRATLPLATSFKPSHPYKPVLAETFNHFPSSALMLINKLLAIEPEKRGSAASTLRSEFFTTEPLPANPSNLPRYPPSKELDAKLRNEEARKLRAEGNKRRGGETVTRGRPKDLKTAQTPEFMAAGQSKVTCISHKFKTDEEGGTGFRIEPPRRGIQQNGKAHASSMVHPTVADTEWNGGGSIKRQTNAEMKSRTSQTGDLSGESYRRDPNRDYSTGNAPRKNRINYSGPLMPPGGNLEDLLKEHEKQIQQAVRKARVEKSASRKNQALTGQQQQQRYTGRNAR

SEQ ID NO: 70665 - DNA, 2712 bp, Arabidopsis thaliana
  misc_feature (1)..(2712): Ceres Seq. ID no. 2717204
  misc_feature: MA Experiment ID: 20000180 Result: Down-regulated in Transcription
  misc_feature: MA Experiment 20000180 PARAMETER Experiment Name: At_Germinating_Seeds_P Parameter: Age (hr) Value: 24 vs. 0
  misc_feature: MA Experiment 20000180 PARAMETER Experiment Name: At_Germinating_Seeds_P Parameter: Tissue Value: Germinating Seeds
atggaacaatctcttgtgaaggctttgttgaagaacacgaacaatccgagattagcatggagaatcttcaagaggatattctcttctccttcagaagaaagccatggcatttctttagatgcgactcctacaatcgctcgtatcctggttcgagccaaaatgcacgaagaaatccaagagcttcacaatcttatactctcttcttcaatccaaaagacgaaactttcgtctcttctctctgttgtatccatcttcgcgaaatcgaatcacattgataaggcgtttccgcagtttcagttagtacggtcgcggtttcctgagaacaaacctagcgtttatctgtataatttgttgcttgaaagttgcataaaggaacgacgtgtggagttcgtttcgtggttgtataaagatatggttttgtgtgggattgctccacagacttatacttttaatctcttgatacgtgctttgtgtgattcaagttgtgttgatgctgctcgagagttgttcgacgaaatgcctgagaaaggttgtaagccaaatgagtttacttttgggattttggttcgtgggtattgtaaagctggtttgactgataaagggcttgaattgttgaatgcaatggaaagttttggggttttgcctaataaagttatctataacaccattgtttcgagcttctgtagagaaggtaggaatgatgattctgaaaagatggtggagaagatgcgggaggaaggtttggtgcctgatattgtcacttttaactctaggatatcagcgctttgtaaagaaggaaaggttttggatgcgtctagaattttcagtgatatggagctagatgagtatctgggtcttcctcgtcccaatagtataacatataacttgatgttgaaaggtttctgtaaggtagggttgctggaagatgccaagaccctctttgagtcgattagagaaaatgatgatctcgctagcttgcagagttacaatatttggctgcagggtttggtcagacatgggaagtttatagaggctgaaacagtcctgaagcaaatgactgataagggaataggaccaagtatttattcttacaatatcttgatggatggattgtgtaaattgggcatgctatccgatgcaaaaactattgttggtttgatgaaaagaaatggtgtttgcccggatgctgtaacttatggctgccttcttcatggttattgcagtgttgggaaagtcgatgcagctaaaagcttgttgcaggagatgatgaggaataattgtttaccaaatgcttatacttgcaatattttgctacatagcctttggaagatggggagaatatctgaagcggaagagttgctgcgaaagatgaatgagaaaggttatggactagacactgtcacctgcaacattatcgttgacggactctgtggaagcggggaattagataaagctattgagatagttaagggaatgcgggtgcatggaagtgctgctcttggtaacttaggcaattcatatatcggactggtggatgatagcttgatcgagaacaactgtttgcctgacctgatcacgtattcaactttacttaatggtttgtgcaaagctggaaggtttgctgaagcaaaaaatttgtttgccgagatgatgggagagaaactgcaaccggactcggtcgcatataacattttcattcatcatttctgcaaacaggggaaaatatcatctgcatttcgcgttctcaaagacatggagaagaaaggttgtcataagagcctagagacttataactcactgatcctgggcttaggcataaaaaaccagatttttgaaattcatggactgatggatgagatgaaagaaaagggcatttcaccaaatatatgcacctacaatactgcaatccagtatctttgtgagggagaaaaagttgaagatgcaactaacctccttgatgaaatgatgcaaaagaacatagccccaaatgtattttccttcaaatatttgattgaagcgttctgtaaggtccctgattttgatatggcccaagaagtctttgagactgctgtaagtatctgtggacagaaagaaggcctgtacagcttgatgttcaatgagttgcttgctgcagggcaactactaaaggctacggagttgctcgaagctgttttagatagaggttttgagttggggacttttctttataaagatcttgttgagagcttatgtaagaaggatgaactagaagtagctagtggaattttgcataagatgatagacagaggatatggatttgaccctgcagcattgatgcctgtgatagatggcttaggtaagatgggaaacaagaaagaggcaaacagttttgctgataagatgatggaaatggcttcagttggtgaagtagcaaacaaagtcgatccaaatgcaagggatatacaccagaaaaagcataataagaatggtggaaacaactggcagaatatattacacagagatgacggtagtggaattgcgttaaggtctctgtcaagagttaaaaaaggatggggtcaaggggatatatcaagctttcagcctccaagagttgactacttagactactgggaggacgatgctaagctggtagaaccagacaagacgacatggctggacaaatatatccttgttagaacgacgtttaaacataagagctgcctgctttcataa

SEQ ID NO: 70666 - protein, 903 aa, Arabidopsis thaliana
  peptide (1)..(903): Ceres Seq. ID no. 2717205
  misc_feature (526)..(559): Pfam Name: PPR repeat Pfam Description: PPR repeat
  misc_feature (11)..(688): Homolog of NCBI NO: 30840327 NR Description: fertility restorer homologue [Raphanus sativus]
  misc_feature (11)..(688): Homolog of NCBI NO: 30840221 NR Description: fertility restorer [Raphanus sativus]
  misc_feature (6)..(673): Homolog of NCBI NO: 15232008 NR Description: hypothetical protein; protein id: At3g09060.1 thaliana] >gi|5923671|gb|AAD56322.1|AC009326_9 hypothetical
  misc_feature (145)..(690): Homolog of NCBI NO: 15237662 NR Description: putative protein; protein id: At5g64320.1
  misc_feature (44)..(745): Homolog of NCBI NO: 15221621 NR Description: unknown protein; protein id: At1g62910.1
  misc_feature (138)..(660): Homolog of NCBI NO: 15221610 NR Description: hypothetical protein; protein id: At1g62860.1
  misc_feature (112)..(688): Homolog of NCBI NO: 32452381 NR Description: fertility restorer homologue A [Raphanus sativus]
  misc_feature (112)..(688): Homolog of NCBI NO: 32527604 NR Description: pentatricopeptide repeat-containing protein
  misc_feature (79)..(688): Homolog of NCBI NO: 32452379 NR Description: fertility restorer homologue C [Raphanus sativus]
  misc_feature (58)..(749): Homolog of NCBI NO: 34394343 NR Description: putative fertility restorer homologue [Oryza
MEQSLVKALLKNTNNPRLAWRIFKRIFSSPSEESHGISLDATPTIARILVRAKMHEEIQELHNLILSSSIQKTKLSSLLSVVSIFAKSNHIDKAFPQFQLVRSRFPENKPSVYLYNLLLESCIKERRVEFVSWLYKDMVLCGIAPQTYTFNLLIRALCDSSCVDAARELFDEMPEKGCKPNEFTFGILVRGYCKAGLTDKGLELLNAMESFGVLPNKVIYNTIVSSFCREGRNDDSEKMVEKMREEGLVPDIVTFNSRISALCKEGKVLDASRIFSDMELDEYLGLPRPNSITYNLMLKGFCKVGLLEDAKTLFESIRENDDLASLQSYNIWLQGLVRHGKFIEAETVLKQMTDKGIGPSIYSYNILMDGLCKLGMLSDAKTIVGLMKRNGVCPDAVTYGCLLHGYCSVGKVDAAKSLLQEMMRNNCLPNAYTCNILLHSLWKMGRISEAEELLRKMNEKGYGLDTVTCNIIVDGLCGSGELDKAIEIVKGMRVHGSAALGNLGNSYIGLVDDSLIENNCLPDLITYSTLLNGLCKAGRFAEAKNLFAEMMGEKLQPDSVAYNIFIHHFCKQGKISSAFRVLKDMEKKGCHKSLETYNSLILGLGIKNQIFEIHGLMDEMKEKGISPNICTYNTAIQYLCEGEKVEDATNLLDEMMQKNIAPNVFSFKYLIEAFCKVPDFDMAQEVFETAVSICGQKEGLYSLMFNELLAAGQLLKATELLEAVLDRGFELGTFLYKDLVESLCKKDELEVASGILHKMIDRGYGFDPAALMPVIDGLGKMGNKKEANSFADKMMEMASVGEVANKVDPNARDIHQKKHNKNGGNNWQNILHRDDGSGIALRSLSRVKKGWGQGDISSFQPPRVDYLDYWEDDAKLVEPDKTTWLDKYILVRTTFKHKSCLLS

SEQ ID NO: 70667 - protein, 850 aa, Arabidopsis thaliana
  peptide (1)..(850): Ceres Seq. ID no. 2717206
  misc_feature (473)..(506): Pfam Name: PPR repeat Pfam Description: PPR repeat
  misc_feature (1)..(635): Homolog of NCBI NO: 30840327 NR Description: fertility restorer homologue [Raphanus sativus]
  misc_feature (1)..(635): Homolog of NCBI NO: 30840221 NR Description: fertility restorer [Raphanus sativus]
  misc_feature (1)..(620): Homolog of NCBI NO: 15232008 NR Description: hypothetical protein; protein id: At3g09060.1 thaliana] >gi|5923671|gb|AAD56322.1|AC009326_9 hypothetical
  misc_feature (92)..(637): Homolog of NCBI NO: 15237662 NR Description: putative protein; protein id: At5g64320.1
  misc_feature (1)..(692): Homolog of NCBI NO: 15221621 NR Description: unknown protein; protein id: At1g62910.1
  misc_feature (85)..(607): Homolog of NCBI NO: 15221610 NR Description: hypothetical protein; protein id: At1g62860.1
  misc_feature (59)..(635): Homolog of NCBI NO: 32452381 NR Description: fertility restorer homologue A [Raphanus sativus]
  misc_feature (59)..(635): Homolog of NCBI NO: 32527604 NR Description: pentatricopeptide repeat-containing protein
  misc_feature (26)..(635): Homolog of NCBI NO: 32452379 NR Description: fertility restorer homologue C [Raphanus sativus]
  misc_feature (5)..(696): Homolog of NCBI NO: 34394343 NR Description: putative fertility restorer homologue [Oryza
MHEEIQELHNLILSSSIQKTKLSSLLSVVSIFAKSNHIDKAFPQFQLVRSRFPENKPSVYLYNLLLESCIKERRVEFVSWLYKDMVLCGIAPQTYTFNLLIRALCDSSCVDAARELFDEMPEKGCKPNEFTFGILVRGYCKAGLTDKGLELLNAMESFGVLPNKVIYNTIVSSFCREGRNDDSEKMVEKMREEGLVPDIVTFNSRISALCKEGKVLDASRIFSDMELDEYLGLPRPNSITYNLMLKGFCKVGLLEDAKTLFESIRENDDLASLQSYNIWLQGLVRHGKFIEAETVLKQMTDKGIGPSIYSYNILMDGLCKLGMLSDAKTIVGLMKRNGVCPDAVTYGCLLHGYCSVGKVDAAKSLLQEMMRNNCLPNAYTCNILLHSLWKMGRISEAEELLRKMNEKGYGLDTVTCNIIVDGLCGSGELDKAIEIVKGMRVHGSAALGNLGNSYIGLVDDSLIENNCLPDLITYSTLLNGLCKAGRFAEAKNLFAEMMGEKLQPDSVAYNIFIHHFCKQGKISSAFRVLKDMEKKGCHKSLETYNSLILGLGIKNQIFEIHGLMDEMKEKGISPNICTYNTAIQYLCEGEKVEDATNLLDEMMQKNIAPNVFSFKYLIEAFCKVPDFDMAQEVFETAVSICGQKEGLYSLMFNELLAAGQLLKATELLEAVLDRGFELGTFLYKDLVESLCKKDELEVASGILHKMIDRGYGFDPAALMPVIDGLGKMGNKKEANSFADKMMEMASVGEVANKVDPNARDIHQKKHNKNGGNNWQNILHRDDGSGIALRSLSRVKKGWGQGDISSFQPPRVDYLDYWEDDAKLVEPDKTTWLDKYILVRTTFKHKSCLLS

SEQ ID NO: 70668 - protein, 766 aa, Arabidopsis thaliana
  peptide (1)..(766): Ceres Seq. ID no. 2717207
  misc_feature (389)..(422): Pfam Name: PPR repeat Pfam Description: PPR repeat
  misc_feature (1)..(551): Homolog of NCBI NO: 30840327 NR Description: fertility restorer homologue [Raphanus sativus]
  misc_feature (1)..(551): Homolog of NCBI NO: 30840221 NR Description: fertility restorer [Raphanus sativus]
  misc_feature (1)..(536): Homolog of NCBI NO: 15232008 NR Description: hypothetical protein; protein id: At3g09060.1 thaliana] >gi|5923671|gb|AAD56322.1|AC009326_9 hypothetical
  misc_feature (8)..(553): Homolog of NCBI NO: 15237662 NR Description: putative protein; protein id: At5g64320.1
  misc_feature (1)..(608): Homolog of NCBI NO: 15221621 NR Description: unknown protein; protein id: At1g62910.1
  misc_feature (1)..(523): Homolog of NCBI NO: 15221610 NR Description: hypothetical protein; protein id: At1g62860.1
  misc_feature (1)..(551): Homolog of NCBI NO: 32452381 NR Description: fertility restorer homologue A [Raphanus sativus]
  misc_feature (1)..(551): Homolog of NCBI NO: 32527604 NR Description: pentatricopeptide repeat-containing protein
  misc_feature (1)..(551): Homolog of NCBI NO: 32452379 NR Description: fertility restorer homologue C [Raphanus sativus]
  misc_feature (1)..(612): Homolog of NCBI NO: 34394343 NR Description: putative fertility restorer homologue [Oryza
MVLCGIAPQTYTFNLLIRALCDSSCVDAARELFDEMPEKGCKPNEFTFGILVRGYCKAGLTDKGLELLNAMESFGVLPNKVIYNTIVSSFCREGRNDDSEKMVEKMREEGLVPDIVTFNSRISALCKEGKVLDASRIFSDMELDEYLGLPRPNSITYNLMLKGFCKVGLLEDAKTLFESIRENDDLASLQSYNIWLQGLVRHGKFIEAETVLKQMTDKGIGPSIYSYNILMDGLCKLGMLSDAKTIVGLMKRNGVCPDAVTYGCLLHGYCSVGKVDAAKSLLQEMMRNNCLPNAYTCNILLHSLWKMGRISEAEELLRKMNEKGYGLDTVTCNIIVDGLCGSGELDKAIEIVKGMRVHGSAALGNLGNSYIGLVDDSLIENNCLPDLITYSTLLNGLCKAGRFAEAKNLFAEMMGEKLQPDSVAYNIFIHHFCKQGKISSAFRVLKDMEKKGCHKSLETYNSLILGLGIKNQIFEIHGLMDEMKEKGISPNICTYNTAIQYLCEGEKVEDATNLLDEMMQKNIAPNVFSFKYLIEAFCKVPDFDMAQEVFETAVSICGQKEGLYSLMFNELLAAGQLLKATELLEAVLDRGFELGTFLYKDLVESLCKKDELEVASGILHKMIDRGYGFDPAALMPVIDGLGKMGNKKEANSFADKMMEMASVGEVANKVDPNARDIHQKKHNKNGGNNWQNILHRDDGSGIALRSLSRVKKGWGQGDISSFQPPRVDYLDYWEDDAKLVEPDKTTWLDKYILVRTTFKHKSCLLS

SEQ ID NO: 70669 - DNA, 2097 bp, Arabidopsis thaliana
  misc_feature (1)..(2097): Ceres Seq. ID no. 2717235
  misc_feature: MA Experiment ID: 20000355 Result: Up-regulated in Transcription
  misc_feature: MA Experiment 20000355 PARAMETER Experiment Name: At_Siliques_Sub_P Parameter: Age (day) Value: 21
  misc_feature: MA Experiment 20000355 PARAMETER Experiment Name: At_Siliques_Sub_P Parameter: Organism Value: A. thaliana
  misc_feature: MA Experiment 20000355 PARAMETER Experiment Name: At_Siliques_Sub_P Parameter: Plant Line Value: WS
  misc_feature: MA Experiment 20000355 PARAMETER Experiment Name: At_Siliques_Sub_P Parameter: Tissue Value: Less Than 5mm Siliques vs. Whole Plant
  misc_feature: MA Experiment ID: 20000440 Result: Up-regulated in Transcription
  misc_feature: MA Experiment 20000440 PARAMETER Experiment Name: At_Closed-Flower__Sub_P Parameter: Tissue Value: Closed Flower vs. Whole Plant
atggatttcagaaattccttcaaatctcatagctcatacaaacaaattcgaagccccggagatcaaagcgagccaagccctgaacatctgccaattctccacgatcaccatcctgatcattccggcatggtggtcgatgaccagaaacccgacagcactcgttctagcctcgacgatggtcgtaacgcgcctgtagaacgtgatgccagttacaaattctggcaagacaacactactggaacgtcaacggatcacacggcggtgagaacaagtgataaagatccaatcgctattagtcgaaaaggcgatagattaagcggtagtttcgatttcgtgcacgggaagctaccggttgatgaatctccaacgaaaatggtcgctggagagcctgtgaatcggcaatggagaggtagaaataatgaagagatcacacttgatgttgatcaagaaaatgatgatgtaagtcaccaaacaatgcctacgcctacatcaacggctcgaacctcgtttgatgcgtctagagaaatgcgagtctcttttaacgttcgtagagcgggtggtgcgtttgtcgctggttcggttccttcttcgtcttcccattcgtcttcttcttcgtccgcgacaatgcggacgaatcaggatcagccgcaactgcaggaggaagaggttgtgagatgtacttcgaacatgtcgtttcagaggaaatcagagcttatatctagagtgaagacaaggtctaggcttcaagatccgccacgtgaggaagaaacgccttactcgggttggagatcgggtcagttgaaatccgggttacttgcggatattgatgaagaggatgatccattagcggaagaagatgtaccagatgagtataaaagagggaagcttgacgccattacattgctccagtggcttagcttagtcgctattatagctgcattagcgtgtagtttgtcgattcagtcttggaagaaagttagagtttggaatcttcatctatggaaatgggaagtgttcttgttggttcttatatgtgggaggttggtttcgggttggggaatccgaatcgttgtcttcttcatcgagagaaacttccttttgcggaagcgggttctttacttcgtttacggtgtgcgtagagctgttcagaactgtctatggctaggcctagtccttctcgcttggcacttcttgttcgacaagaaagtacagagggagacaaggagcaggatgaatcataagaacatctctgcttggaacatgaagagactaatgaagattgtgagaaatgtttctctgaccacactggacgaacagatgctagaaagcacatacgaagatgaatccacccgccagatacgaagcgaaaaagaggctaaagcagctgcaaggaagattttcaagaacgttgagcaacgtggcgcaaaagagcgacgagctcttgccctgacactcaacgacaccaagacagcagtgaacaagctccatcacatgattaatattgtcactgccatagtcattgttgtcatttggcttgtccttcttgaaattgcttcctccaaggtacttctctttgtaagttcacaagttgtactcttggccttcatctttgggaacactgtcaagaccgtcttcgagtccatcatcttcttattcatcgtacacccttacgatgttggtgatcggtgtgagattgacagtgtacagttggtggtggaggagatgaacatactcactaccgtgttcttacgatacgacaatctgaagattatgtatccgaatagtcttttgtggcagaaatcaatcaacaattactaccgcagtccggatatgggagatgcaatcgagttctgtgtccacattactactcctcttgaaaaaatctccgtgatcaaacagagaatatcgaagattaatcaccaagacatggctgaaagatggacaagaagagccgtcttagtcgaagaagtgattaagatactcctcgagctcgacattcaacaccggttttatccgctcgatatcaatgtccgaacaatgcctaccgttgtctctagcagagttccacctggctggtcacaaaaccaacctgcctga

SEQ ID NO: 70670 - protein, 698 aa, Arabidopsis thaliana
  peptide (1)..(698): Ceres Seq. ID no. 2717236
  misc_feature (496)..(636): Pfam Name: Mechanosensitive ion channel Pfam Description: Mechanosensitive ion channel
  misc_feature (64)..(447): Homolog of NCBI NO: 15227342 NR Description: hypothetical protein; protein id: At2g17000.1
  misc_feature (460)..(657): Homolog of NCBI NO: 15227342 NR Description: hypothetical protein; protein id: At2g17000.1
  misc_feature (175)..(447): Homolog of NCBI NO: 15218429 NR Description: hypothetical protein; protein id: At1g78610.1
  misc_feature (446)..(636): Homolog of NCBI NO: 15218429 NR Description: hypothetical protein; protein id: At1g78610.1
  misc_feature (637)..(693): Homolog of NCBI NO: 15218429 NR Description: hypothetical protein; protein id: At1g78610.1
  misc_feature (55)..(447): Homolog of NCBI NO: 11994592 NR Description: gb|AAD30575.1~gene_id:T21E2.7~strong similarity
  misc_feature (438)..(678): Homolog of NCBI NO: 11994592 NR Description: gb|AAD30575.1~gene_id:T21E2.7~strong similarity
  misc_feature (55)..(447): Homolog of NCBI NO: 15231928 NR Description: hypothetical protein; protein id: At3g14810.1
  misc_feature (530)..(678): Homolog of NCBI NO: 15231928 NR Description: hypothetical protein; protein id: At3g14810.1
  misc_feature (410)..(476): Homolog of NCBI NO: 15231928 NR Description: hypothetical protein; protein id: At3g14810.1
MDFRNSFKSHSSYKQIRSPGDQSEPSPEHLPILHDHHPDHSGMVVDDQKPDSTRSSLDDGRNAPVERDASYKFWQDNTTGTSTDHTAVRTSDKDPIAISRKGDRLSGSFDFVHGKLPVDESPTKMVAGEPVNRQWRGRNNEEITLDVDQENDDVSHQTMPTPTSTARTSFDASREMRVSFNVRRAGGAFVAGSVPSSSSHSSSSSSATMRTNQDQPQLQEEEVVRCTSNMSFQRKSELISRVKTRSRLQDPPREEETPYSGWRSGQLKSGLLADIDEEDDPLAEEDVPDEYKRGKLDAITLLQWLSLVAIIAALACSLSIQSWKKVRVWNLHLWKWEVFLLVLICGRLVSGWGIRIVVFFIERNFLLRKRVLYFVYGVRRAVQNCLWLGLVLLAWHFLFDKKVQRETRSRMNHKNISAWNMKRLMKIVRNVSLTTLDEQMLESTYEDESTRQIRSEKEAKAAARKIFKNVEQRGAKERRALALTLNDTKTAVNKLHHMINIVTAIVIVVIWLVLLEIASSKVLLFVSSQVVLLAFIFGNTVKTVFESIIFLFIVHPYDVGDRCEIDSVQLVVEEMNILTTVFLRYDNLKIMYPNSLLWQKSINNYYRSPDMGDAIEFCVHITTPLEKISVIKQRISKINHQDMAERWTRRAVLVEEVIKILLELDIQHRFYPLDINVRTMPTVVSSRVPPGWSQNQPA

SEQ ID NO: 70671 - protein, 656 aa, Arabidopsis thaliana
  peptide (1)..(656): Ceres Seq. ID no. 2717237
  misc_feature (454)..(594): Pfam Name: Mechanosensitive ion channel Pfam Description: Mechanosensitive ion channel
  misc_feature (22)..(405): Homolog of NCBI NO: 15227342 NR Description: hypothetical protein; protein id: At2g17000.1
  misc_feature (418)..(615): Homolog of NCBI NO: 15227342 NR Description: hypothetical protein; protein id: At2g17000.1
  misc_feature (133)..(405): Homolog of NCBI NO: 15218429 NR Description: hypothetical protein; protein id: At1g78610.1
  misc_feature (404)..(594): Homolog of NCBI NO: 15218429 NR Description: hypothetical protein; protein id: At1g78610.1
  misc_feature (595)..(651): Homolog of NCBI NO: 15218429 NR Description: hypothetical protein; protein id: At1g78610.1
  misc_feature (13)..(405): Homolog of NCBI NO: 11994592 NR Description: gb|AAD30575.1~gene_id:T21E2.7~strong similarity
  misc_feature (396)..(636): Homolog of NCBI NO: 11994592 NR Description: gb|AAD30575.1~gene_id:T21E2.7~strong similarity
  misc_feature (13)..(405): Homolog of NCBI NO: 15231928 NR Description: hypothetical protein; protein id: At3g14810.1
  misc_feature (488)..(636): Homolog of NCBI NO: 15231928 NR Description: hypothetical protein; protein id: At3g14810.1
  misc_feature (368)..(434): Homolog of NCBI NO: 15231928 NR Description: hypothetical protein; protein id: At3g14810.1
MVVDDQKPDSTRSSLDDGRNAPVERDASYKFWQDNTTGTSTDHTAVRTSDKDPIAISRKGDRLSGSFDFVHGKLPVDESPTKMVAGEPVNRQWRGRNNEEITLDVDQENDDVSHQTMPTPTSTARTSFDASREMRVSFNVRRAGGAFVAGSVPSSSSHSSSSSSATMRTNQDQPQLQEEEVVRCTSNMSFQRKSELISRVKTRSRLQDPPREEETPYSGWRSGQLKSGLLADIDEEDDPLAEEDVPDEYKRGKLDAITLLQWLSLVAIIAALACSLSIQSWKKVRVWNLHLWKWEVFLLVLICGRLVSGWGIRIVVFFIERNFLLRKRVLYFVYGVRRAVQNCLWLGLVLLAWHFLFDKKVQRETRSRMNHKNISAWNMKRLMKIVRNVSLTTLDEQMLESTYEDESTRQIRSEKEAKAAARKIFKNVEQRGAKERRALALTLNDTKTAVNKLHHMINIVTAIVIVVIWLVLLEIASSKVLLFVSSQVVLLAFIFGNTVKTVFESIIFLFIVHPYDVGDRCEIDSVQLVVEEMNILTTVFLRYDNLKIMYPNSLLWQKSINNYYRSPDMGDAIEFCVHITTPLEKISVIKQRISKINHQDMAERWTRRAVLVEEVIKILLELDIQHRFYPLDINVRTMPTVVSSRVPPGWSQNQPA

SEQ ID NO: 70672 - protein, 574 aa, Arabidopsis thaliana
  peptide (1)..(574): Ceres Seq. ID no. 2717238
  misc_feature (372)..(512): Pfam Name: Mechanosensitive ion channel Pfam Description: Mechanosensitive ion channel
  misc_feature (1)..(323): Homolog of NCBI NO: 15227342 NR Description: hypothetical protein; protein id: At2g17000.1
  misc_feature (336)..(533): Homolog of NCBI NO: 15227342 NR Description: hypothetical protein; protein id: At2g17000.1
  misc_feature (51)..(323): Homolog of NCBI NO: 15218429 NR Description: hypothetical protein; protein id: At1g78610.1
  misc_feature (322)..(512): Homolog of NCBI NO: 15218429 NR Description: hypothetical protein; protein id: At1g78610.1
  misc_feature (513)..(569): Homolog of NCBI NO: 15218429 NR Description: hypothetical protein; protein id: At1g78610.1
  misc_feature (1)..(323): Homolog of NCBI NO: 11994592 NR Description: gb|AAD30575.1~gene_id:T21E2.7~strong similarity
  misc_feature (314)..(554): Homolog of NCBI NO: 11994592 NR Description: gb|AAD30575.1~gene_id:T21E2.7~strong similarity
  misc_feature (1)..(323): Homolog of NCBI NO: 15231928 NR Description: hypothetical protein; protein id: At3g14810.1
  misc_feature (406)..(554): Homolog of NCBI NO: 15231928 NR Description: hypothetical protein; protein id: At3g14810.1
  misc_feature (286)..(352): Homolog of NCBI NO: 15231928 NR Description: hypothetical protein; protein id: At3g14810.1
MVAGEPVNRQWRGRNNEEITLDVDQENDDVSHQTMPTPTSTARTSFDASREMRVSFNVRRAGGAFVAGSVPSSSSHSSSSSSATMRTNQDQPQLQEEEVVRCTSNMSFQRKSELISRVKTRSRLQDPPREEETPYSGWRSGQLKSGLLADIDEEDDPLAEEDVPDEYKRGKLDAITLLQWLSLVAIIAALACSLSIQSWKKVRVWNLHLWKWEVFLLVLICGRLVSGWGIRIVVFFIERNFLLRKRVLYFVYGVRRAVQNCLWLGLVLLAWHFLFDKKVQRETRSRMNHKNISAWNMKRLMKIVRNVSLTTLDEQMLESTYEDESTRQIRSEKEAKAAARKIFKNVEQRGAKERRALALTLNDTKTAVNKLHHMINIVTAIVIVVIWLVLLEIASSKVLLFVSSQVVLLAFIFGNTVKTVFESIIFLFIVHPYDVGDRCEIDSVQLVVEEMNILTTVFLRYDNLKIMYPNSLLWQKSINNYYRSPDMGDAIEFCVHITTPLEKISVIKQRISKINHQDMAERWTRRAVLVEEVIKILLELDIQHRFYPLDINVRTMPTVVSSRVPPGWSQNQPA

SEQ ID NO: 70673 - DNA, 2550 bp, Arabidopsis thaliana
  misc_feature (1)..(2550): Ceres Seq. ID no. 2717239
  misc_feature: MA Experiment ID: 108569 Result: Up-regulated in Transcription
  misc_feature: MA Experiment 108569 PARAMETER Experiment Name: At_0.001%_MeJA__cDNA_P Parameter: Timepoint (hr) Value: 6
  misc_feature: MA Experiment 108569 PARAMETER Experiment Name: At_0.001%_MeJA__cDNA_P Parameter: Tissue Value: Aerial
  misc_feature: MA Experiment 108569 PARAMETER Experiment Name: At_0.001%_MeJA__cDNA_P Parameter: Treatment Value: 0.001% MeJA vs. No Treatment
  misc_feature: MA Experiment ID: 108572 Result: Up-regulated in Transcription
  misc_feature: MA Experiment 108572 PARAMETER Experiment Name: At_Drought_cDNA_P Parameter: Timepoint (hr) Value: 1
  misc_feature: MA Experiment 108572 PARAMETER Experiment Name: At_Drought_cDNA_P Parameter: Tissue Value: Aerial
  misc_feature: MA Experiment 108572 PARAMETER Experiment Name: At_Drought_cDNA_P Parameter: Treatment Value: Drought vs. No Drought
  misc_feature: MA Experiment ID: 108573 Result: Up-regulated in Transcription
  misc_feature: MA Experiment 108573 PARAMETER Experiment Name: At_Drought_cDNA_P Parameter: Timepoint (hr) Value: 6
  misc_feature: MA Experiment 108573 PARAMETER Experiment Name: At_Drought_cDNA_P Parameter: Tissue Value: Aerial
  misc_feature: MA Experiment 108573 PARAMETER Experiment Name: At_Drought_cDNA_P Parameter: Treatment Value: Drought vs. No Drought
  misc_feature: MA Experiment ID: 108577 Result: Down-regulated in Transcription
  misc_feature: MA Experiment 108577 PARAMETER Experiment Name: At_42deg_Heat_cDNA_P Parameter: Temperature (deg C) Value: 42 vs. 22
  misc_feature: MA Experiment 108577 PARAMETER Experiment Name: At_42deg_Heat_cDNA_P Parameter: Timepoint (hr) Value: 6
  misc_feature: MA Experiment 108577 PARAMETER Experiment Name: At_42deg_Heat_cDNA_P Parameter: Tissue Value: Aerial
atggaattccgcaaaccctttaagtctcatagctcgtataaacagattataagcaccggagatcaaaacgagaagacaaagaagaagaagaaactggcgaatcttgacgatggcgacattgctaaaactcagagctctgggtctagtttcgatggaaacagctataagttctggcaagacattgcaacagatgattatacaaagagcgggagtttcgatttcccgcaataccgtgaggagatcacactcgatgtaaacgaagaaacagaggaaacagaggatgtcagcaacaacaacaatttgtccggttctaaagaaacgagagtctttttcaaaataaacagttcaggaactaataatatgtctggttctgtacgttcttgtacatcttcgacttcgttttcatcggccacaatgcggttaaatttagagcagcagttggaggatgaaggagaggtggttgtaagatgttcatcggtgaggaaaacagagctagtttcgagggcgaaggcgagatcgaggttgatagatccgccacaagaagaggaacaacaatactcgagctggatcgggacatcggatcagttaagatcaggtttacttgggagacactccgatgatattgaggaagaagatgattcttcggctgaagaagatgttccagtggaatatcgaaagttgaaaatggatgcgataacgttgcttcaatggatgagcttaatcgcactcgtagttgcgttagtgttgagtctagggcttcatacttggagaaatgcaactctatggagccttcatctgtggaaatgggaagtggtcttgctggttctcatctgtgggaggctggtttcgggatgcggaatccgaatcatcgtcttctttatcgaaagaaacttccttttgaggaaacgggttctttacttcgtatacggtgtgaagactgctgttcagaactgtctctggctcggcctcgtgcttctcgcttggcatttcttgtttgacaagaaagtagaaaaggaaacacaaagcgatgttcttcttcttatgtctaaaatattagtgtgttttttgttgagcacggtcttatggctgatcaagacactggtggtgaaagttctagcctcttcgttccacgttagtacctactttgatcggattcaagaagctctgtttcatcattacttgatcgagacgttatctggacctccaatgcttgagttaagcaggattgaggaagaggaagatcggacgcaagatgagatctacaagatgcagaaaggaggagctgatttatcacctgaactttgttccgctgcgtttcctcaggaaaaaagtggaagtacaatgaacatgaagttctctccaatcattccaaagacgggaagtgataacggaatcacaatggatgatttacacaagatgaatcagaaaaacgtttcagcttggaacatgaagagactgatgaagattgtgagaaatgtttccctgagtacgttggacgaacaagcgcttcaaaacacgtgtgaagatgaatccactcgacagatacggagcgaaaaagaagctaaagcagctgcaaggaagattttcaagaacgtagctcaacctggcacaaaacacatatatctggaggacttgatgagatttttgcgagtagacgaggcgatgaagacaatgtgtctcttcgaaggcgccttagtgaccaaaaagattactaaatcagccttgaagaactggctggtaaatgctttcagagagagaagagcacttgccttaacactcaatgacaccaaaacagcagtgaacaaactccatcacatgattagttttctcactgccattgtcatcatagtcatatggctgatccttcttgaaatcgctacttccaagtatcttttatttctaacttcacaagttgtactcttagccttcatgtttgggaactctctcaagaccgtcttcgagtcaatcatcttcctcttcatcattcacccttacgatgttggtgatcggttactcatcgacactgtagagatggtggtggaggaaatgaacattctcacaacagttttcttgagagctgacaatctgaagattgtgtatccaaatattcttctatggcagaaagcgatccacaattacaaccgtagtccggatatgggagatgaagttacatgctgtgtccacattactactcctcctgaaaagattgctgcaatcaaacaaagaatatcaagctacattgatagcaagccagagtattggtatccaaaagctgatgtcattgtaaaggatgtggaagatttgaacattgtgaggatagcaatatggctatgtcataaaattaaccatcaaaacatgggagagagatttacaagaagagcgttgttgatcgaggaagtaatcaaaatcctcctcgaactcgacattcaataccggtttcatccacttgacatcaatgttaaaaccatgccaacagttgtctcgagcagagttccacctgcctggtcacaaaaccctgatttaaggcgaattattcttcttgaatgttaa

SEQ ID NO: 70674 - protein, 849 aa, Arabidopsis thaliana
  peptide (1)..(849): Ceres Seq. ID no. 2717240
  misc_feature (604)..(812): Pfam Name: Mechanosensitive ion channel Pfam Description: Mechanosensitive ion channel
  misc_feature (112)..(836): Homolog of NCBI NO: 15218429 NR Description: hypothetical protein; protein id: At1g78610.1
  misc_feature (79)..(837): Homolog of NCBI NO: 11994592 NR Description: gb|AAD30575.1~gene_id:T21E2.7~strong similarity
  misc_feature (79)..(616): Homolog of NCBI NO: 15231928 NR Description: hypothetical protein; protein id: At3g14810.1
  misc_feature (638)..(837): Homolog of NCBI NO: 15231928 NR Description: hypothetical protein; protein id: At3g14810.1
  misc_feature (119)..(837): Homolog of NCBI NO: 15220793 NR Description: hypothetical protein; protein id: At1g53470.1
  misc_feature (6)..(383): Homolog of NCBI NO: 30679840 NR Description: expressed protein [Arabidopsis thaliana]
  misc_feature (568)..(838): Homolog of NCBI NO: 30679840 NR Description: expressed protein [Arabidopsis thaliana]
  misc_feature (114)..(835): Homolog of NCBI NO: 38345847 NR Description: OSJNBa0084K11.11 [Oryza sativa (japonica
  misc_feature (6)..(383): Homolog of NCBI NO: 25411771 NR Description: hypothetical protein At2g17010 [imported] -
  misc_feature (568)..(765): Homolog of NCBI NO: 25411771 NR Description: hypothetical protein At2g17010 [imported] -
MEFRKPFKSHSSYKQIISTGDQNEKTKKKKKLANLDDGDIAKTQSSGSSFDGNSYKFWQDIATDDYTKSGSFDFPQYREEITLDVNEETEETEDVSNNNNLSGSKETRVFFKINSSGTNNMSGSVRSCTSSTSFSSATMRLNLEQQLEDEGEVVVRCSSVRKTELVSRAKARSRLIDPPQEEEQQYSSWIGTSDQLRSGLLGRHSDDIEEEDDSSAEEDVPVEYRKLKMDAITLLQWMSLIALVVALVLSLGLHTWRNATLWSLHLWKWEVVLLVLICGRLVSGCGIRIIVFFIERNFLLRKRVLYFVYGVKTAVQNCLWLGLVLLAWHFLFDKKVEKETQSDVLLLMSKILVCFLLSTVLWLIKTLVVKVLASSFHVSTYFDRIQEALFHHYLIETLSGPPMLELSRIEEEEDRTQDEIYKMQKGGADLSPELCSAAFPQEKSGSTMNMKFSPIIPKTGSDNGITMDDLHKMNQKNVSAWNMKRLMKIVRNVSLSTLDEQALQNTCEDESTRQIRSEKEAKAAARKIFKNVAQPGTKHIYLEDLMRFLRVDEAMKTMCLFEGALVTKKITKSALKNWLVNAFRERRALALTLNDTKTAVNKLHHMISFLTAIVIIVIWLILLEIATSKYLLFLTSQVVLLAFMFGNSLKTVFESIIFLFIIHPYDVGDRLLIDTVEMVVEEMNILTTVFLRADNLKIVYPNILLWQKAIHNYNRSPDMGDEVTCCVHITTPPEKIAAIKQRISSYIDSKPEYWYPKADVIVKDVEDLNIVRIAIWLCHKINHQNMGERFTRRALLIEEVIKILLELDIQYRFHPLDINVKTMPTVVSSRVPPAWSQNPDLRRIILLEC

SEQ ID NO: 70675 - protein, 729 aa, Arabidopsis thaliana
  peptide (1)..(729): Ceres Seq. ID no. 2717241
  misc_feature (484)..(692): Pfam Name: Mechanosensitive ion channel Pfam Description: Mechanosensitive ion channel
  misc_feature (1)..(716): Homolog of NCBI NO: 15218429 NR Description: hypothetical protein; protein id: At1g78610.1
  misc_feature (1)..(717): Homolog of NCBI NO: 11994592 NR Description: gb|AAD30575.1~gene_id:T21E2.7~strong similarity
  misc_feature (1)..(496): Homolog of NCBI NO: 15231928 NR Description: hypothetical protein; protein id: At3g14810.1
  misc_feature (518)..(717): Homolog of NCBI NO: 15231928 NR Description: hypothetical protein; protein id: At3g14810.1
  misc_feature (1)..(717): Homolog of NCBI NO: 15220793 NR Description: hypothetical protein; protein id: At1g53470.1
  misc_feature (1)..(263): Homolog of NCBI NO: 30679840 NR Description: expressed protein [Arabidopsis thaliana]
  misc_feature (448)..(718): Homolog of NCBI NO: 30679840 NR Description: expressed protein [Arabidopsis thaliana]
  misc_feature (1)..(715): Homolog of NCBI NO: 38345847 NR Description: OSJNBa0084K11.11 [Oryza sativa (japonica
  misc_feature (1)..(263): Homolog of NCBI NO: 25411771 NR Description: hypothetical protein At2g17010 [imported] -
  misc_feature (448)..(645): Homolog of NCBI NO: 25411771 NR Description: hypothetical protein At2g17010 [imported] -
MSGSVRSCTSSTSFSSATMRLNLEQQLEDEGEVVVRCSSVRKTELVSRAKARSRLIDPPQEEEQQYSSWIGTSDQLRSGLLGRHSDDIEEEDDSSAEEDVPVEYRKLKMDAITLLQWMSLIALVVALVLSLGLHTWRNATLWSLHLWKWEVVLLVLICGRLVSGCGIRIIVFFIERNFLLRKRVLYFVYGVKTAVQNCLWLGLVLLAWHFLFDKKVEKETQSDVLLLMSKILVCFLLSTVLWLIKTLVVKVLASSFHVSTYFDRIQEALFHHYLIETLSGPPMLELSRIEEEEDRTQDEIYKMQKGGADLSPELCSAAFPQEKSGSTMNMKFSPIIPKTGSDNGITMDDLHKMNQKNVSAWNMKRLMKIVRNVSLSTLDEQALQNTCEDESTRQIRSEKEAKAAARKIFKNVAQPGTKHIYLEDLMRFLRVDEAMKTMCLFEGALVTKKITKSALKNWLVNAFRERRALALTLNDTKTAVNKLHHMISFLTAIVIIVIWLILLEIATSKYLLFLTSQVVLLAFMFGNSLKTVFESIIFLFIIHPYDVGDRLLIDTVEMVVEEMNILTTVFLRADNLKIVYPNILLWQKAIHNYNRSPDMGDEVTCCVHITTPPEKIAAIKQRISSYIDSKPEYWYPKADVIVKDVEDLNIVRIAIWLCHKINHQNMGERFTRRALLIEEVIKILLELDIQYRFHPLDINVKTMPTVVSSRVPPAWSQNPDLRRIILLEC

SEQ ID NO: 70676 - protein, 711 aa, Arabidopsis thaliana
  peptide (1)..(711): Ceres Seq. ID no. 2717242
  misc_feature (466)..(674): Pfam Name: Mechanosensitive ion channel Pfam Description: Mechanosensitive ion channel
  misc_feature (1)..(698): Homolog of NCBI NO: 15218429 NR Description: hypothetical protein; protein id: At1g78610.1
  misc_feature (1)..(699): Homolog of NCBI NO: 11994592 NR Description: gb|AAD30575.1~gene_id:T21E2.7~strong similarity
  misc_feature (1)..(478): Homolog of NCBI NO: 15231928 NR Description: hypothetical protein; protein id: At3g14810.1
  misc_feature (500)..(699): Homolog of NCBI NO: 15231928 NR Description: hypothetical protein; protein id: At3g14810.1
  misc_feature (1)..(699): Homolog of NCBI NO: 15220793 NR Description: hypothetical protein; protein id: At1g53470.1
  misc_feature (1)..(245): Homolog of NCBI NO: 30679840 NR Description: expressed protein [Arabidopsis thaliana]
  misc_feature (430)..(700): Homolog of NCBI NO: 30679840 NR Description: expressed protein [Arabidopsis thaliana]
  misc_feature (1)..(697): Homolog of NCBI NO: 38345847 NR Description: OSJNBa0084K11.11 [Oryza sativa (japonica
  misc_feature (1)..(245): Homolog of NCBI NO: 25411771 NR Description: hypothetical protein At2g17010 [imported] -
  misc_feature (430)..(627): Homolog of NCBI NO: 25411771 NR Description: hypothetical protein At2g17010 [imported] -
MRLNLEQQLEDEGEVVVRCSSVRKTELVSRAKARSRLIDPPQEEEQQYSSWIGTSDQLRSGLLGRHSDDIEEEDDSSAEEDVPVEYRKLKMDAITLLQWMSLIALVVALVLSLGLHTWRNATLWSLHLWKWEVVLLVLICGRLVSGCGIRIIVFFIERNFLLRKRVLYFVYGVKTAVQNCLWLGLVLLAWHFLFDKKVEKETQSDVLLLMSKILVCFLLSTVLWLIKTLVVKVLASSFHVSTYFDRIQEALFHHYLIETLSGPPMLELSRIEEEEDRTQDEIYKMQKGGADLSPELCSAAFPQEKSGSTMNMKFSPIIPKTGSDNGITMDDLHKMNQKNVSAWNMKRLMKIVRNVSLSTLDEQALQNTCEDESTRQIRSEKEAKAAARKIFKNVAQPGTKHIYLEDLMRFLRVDEAMKTMCLFEGALVTKKITKSALKNWLVNAFRERRALALTLNDTKTAVNKLHHMISFLTAIVIIVIWLILLEIATSKYLLFLTSQVVLLAFMFGNSLKTVFESIIFLFIIHPYDVGDRLLIDTVEMVVEEMNILTTVFLRADNLKIVYPNILLWQKAIHNYNRSPDMGDEVTCCVHITTPPEKIAAIKQRISSYIDSKPEYWYPKADVIVKDVEDLNIVRIAIWLCHKINHQNMGERFTRRALLIEEVIKILLELDIQYRFHPLDINVKTMPTVVSSRVPPAWSQNPDLRRIILLEC

SEQ ID NO: 70677 - DNA, 1845 bp, Arabidopsis thaliana
  misc_feature (1)..(1845): Ceres Seq. ID no. 2717493
  misc_feature: MA Experiment ID: 20000173 Result: Down-regulated in Transcription
  misc_feature: MA Experiment 20000173 PARAMETER Experiment Name: At_42deg_Heat_P Parameter: Age (day) Value: 14
  misc_feature: MA Experiment 20000173 PARAMETER Experiment Name: At_42deg_Heat_P Parameter: Organism Value: A. thaliana
  misc_feature: MA Experiment 20000173 PARAMETER Experiment Name: At_42deg_Heat_P Parameter: Plant Line Value: WS
  misc_feature: MA Experiment 20000173 PARAMETER Experiment Name: At_42deg_Heat_P Parameter: Temperature (deg C) Value: 42 vs. 22
  misc_feature: MA Experiment 20000173 PARAMETER Experiment Name: At_42deg_Heat_P Parameter: Timepoint (hr) Value: 6
  misc_feature: MA Experiment 20000173 PARAMETER Experiment Name: At_42deg_Heat_P Parameter: Tissue Value: Aerial
  misc_feature: MA Experiment ID: 20000184 Result: Down-regulated in Transcription
  misc_feature: MA Experiment 20000184 PARAMETER Experiment Name: At_Shoots__P Parameter: Age (day) Value: 7
  misc_feature: MA Experiment 20000184 PARAMETER Experiment Name: At_Shoots__P Parameter: Tissue Value: Shoots vs. Whole Plant
  misc_feature: MA Experiment ID: 20000185 Result: Down-regulated in Transcription
  misc_feature: MA Experiment 20000185 PARAMETER Experiment Name: At_Roots__P Parameter: Age (day) Value: 7 vs. 21
  misc_feature: MA Experiment 20000185 PARAMETER Experiment Name: At_Roots__P Parameter: Organism Value: A. thaliana
  misc_feature: MA Experiment 20000185 PARAMETER Experiment Name: At_Roots__P Parameter: Tissue Value: Roots vs. Whole Plant
  misc_feature: MA Experiment ID: 20000227 Result: Down-regulated in Transcription
  misc_feature: MA Experiment 20000227 PARAMETER Experiment Name: At_Root-Tips-vs-Tops_P Parameter: Tissue Value: Root Tips vs. Root Tops
  misc_feature: MA Experiment ID: 20000264 Result: Down-regulated in Transcription
  misc_feature: MA Experiment 20000264 PARAMETER Experiment Name: At_Open_Flower_P Parameter: Age (day) Value: 21
  misc_feature: MA Experiment 20000264 PARAMETER Experiment Name: At_Open_Flower_P Parameter: Plant Line Value: WS
  misc_feature: MA Experiment 20000264 PARAMETER Experiment Name: At_Open_Flower_P Parameter: Tissue Value: Open Flower vs. Whole Plant
  misc_feature: MA Experiment ID: 20000265 Result: Down-regulated in Transcription
  misc_feature: MA Experiment 20000265 PARAMETER Experiment Name: At_Open_Flower_P Parameter: Age (day) Value: 21
  misc_feature: MA Experiment 20000265 PARAMETER Experiment Name: At_Open_Flower_P Parameter: Plant Line Value: WS
  misc_feature: MA Experiment 20000265 PARAMETER Experiment Name: At_Open_Flower_P Parameter: Tissue Value: Closed Flower vs. Whole Plant
  misc_feature: MA Experiment ID: 20000286 Result: Down-regulated in Transcription
  misc_feature: MA Experiment 20000286 PARAMETER Experiment Name: At_Open_Flower_P Parameter: Age (day) Value: 21
  misc_feature: MA Experiment 20000286 PARAMETER Experiment Name: At_Open_Flower_P Parameter: Plant Line Value: WS
  misc_feature: MA Experiment 20000286 PARAMETER Experiment Name: At_Open_Flower_P Parameter: Tissue Value: Half Open vs. Whole Plant
  misc_feature: MA Experiment ID: 20000439 Result: Down-regulated in Transcription
  misc_feature: MA Experiment 20000439 PARAMETER Experiment Name: At_Roots__P Parameter: Age (day) Value: 14 vs. 21
  misc_feature: MA Experiment 20000439 PARAMETER Experiment Name: At_Roots__P Parameter: Organism Value: A. thaliana
  misc_feature: MA Experiment 20000439 PARAMETER Experiment Name: At_Roots__P Parameter: Tissue Value: Roots vs. Whole Plant
  misc_feature: MA Experiment ID: 20000451 Result: Down-regulated in Transcription
  misc_feature: MA Experiment 20000451 PARAMETER Experiment Name: At_CS6879_Shoots-Roots_P Parameter: Age (day) Value: 14
  misc_feature: MA Experiment 20000451 PARAMETER Experiment Name: At_CS6879_Shoots-Roots_P Parameter: Organism Value: A. thaliana
  misc_feature: MA Experiment 20000451 PARAMETER Experiment Name: At_CS6879_Shoots-Roots_P Parameter: Plant Line Value: CS6879 vs. WS
  misc_feature: MA Experiment 20000451 PARAMETER Experiment Name: At_CS6879_Shoots-Roots_P Parameter: Tissue Value: Roots
  misc_feature: MA Experiment ID: 20001556 Result: Down-regulated in Transcription
  misc_feature: MA Experiment 20001556 PARAMETER Experiment Name: At_Drought_Soil_Dry_P Parameter: Age (day) Value: 26
  misc_feature: MA Experiment 20001556 PARAMETER Experiment Name: At_Drought_Soil_Dry_P Parameter: Organism Value: A. thaliana
  misc_feature: MA Experiment 20001556 PARAMETER Experiment Name: At_Drought_Soil_Dry_P Parameter: Plant Line Value: WS
  misc_feature: MA Experiment 20001556 PARAMETER Experiment Name: At_Drought_Soil_Dry_P Parameter: Post Timepoint (hr) Value: None
  misc_feature: MA Experiment 20001556 PARAMETER Experiment Name: At_Drought_Soil_Dry_P Parameter: Post-Treatment Value: None
  misc_feature: MA Experiment 20001556 PARAMETER Experiment Name: At_Drought_Soil_Dry_P Parameter: Timepoint (day) Value: 12
  misc_feature: MA Experiment 20001556 PARAMETER Experiment Name: At_Drought_Soil_Dry_P Parameter: Treatment Value: Drought vs. No Drought
  misc_feature: MA Experiment ID: 20001557 Result: Down-regulated in Transcription
  misc_feature: MA Experiment 20001557 PARAMETER Experiment Name: At_Drought_Soil_Dry_P Parameter: Age (day) Value: 27
  misc_feature: MA Experiment 20001557 PARAMETER Experiment Name: At_Drought_Soil_Dry_P Parameter: Organism Value: A. thaliana
  misc_feature: MA Experiment 20001557 PARAMETER Experiment Name: At_Drought_Soil_Dry_P Parameter: Plant Line Value: WS
  misc_feature: MA Experiment 20001557 PARAMETER Experiment Name: At_Drought_Soil_Dry_P Parameter: Post Timepoint (hr) Value: 3
  misc_feature: MA Experiment 20001557 PARAMETER Experiment Name: At_Drought_Soil_Dry_P Parameter: Post-Treatment Value: Re-Water vs. No Drought
  misc_feature: MA Experiment 20001557 PARAMETER Experiment Name: At_Drought_Soil_Dry_P Parameter: Timepoint (day) Value: 13
  misc_feature: MA Experiment 20001557 PARAMETER Experiment Name: At_Drought_Soil_Dry_P Parameter: Treatment Value: Drought vs. No Drought
  misc_feature: MA Experiment ID: 20001560 Result: Down-regulated in Transcription
  misc_feature: MA Experiment 20001560 PARAMETER Experiment Name: At_Drought_Soil_Dry_P Parameter: Age (day) Value: 28
  misc_feature: MA Experiment 20001560 PARAMETER Experiment Name: At_Drought_Soil_Dry_P Parameter: Organism Value: A. thaliana
  misc_feature: MA Experiment 20001560 PARAMETER Experiment Name: At_Drought_Soil_Dry_P Parameter: Plant Line Value: WS
  misc_feature: MA Experiment 20001560 PARAMETER Experiment Name: At_Drought_Soil_Dry_P Parameter: Post Timepoint (hr) Value: None
  misc_feature: MA Experiment 20001560 PARAMETER Experiment Name: At_Drought_Soil_Dry_P Parameter: Post-Treatment Value: None
  misc_feature: MA Experiment 20001560 PARAMETER Experiment Name: At_Drought_Soil_Dry_P Parameter: Timepoint (day) Value: 14
  misc_feature: MA Experiment 20001560 PARAMETER Experiment Name: At_Drought_Soil_Dry_P Parameter: Treatment Value: Drought vs. No Drought
  misc_feature: MA Experiment ID: 20001906 Result: Down-regulated in Transcription
  misc_feature: MA Experiment 20001906 PARAMETER Experiment Name: At_Drought_Reproduction_P Parameter: Age (day) Value: 35
  misc_feature: MA Experiment 20001906 PARAMETER Experiment Name: At_Drought_Reproduction_P Parameter: Organism Value: A. thaliana
  misc_feature: MA Experiment 20001906 PARAMETER Experiment Name: At_Drought_Reproduction_P Parameter: Plant Line Value: WS
  misc_feature: MA Experiment 20001906 PARAMETER Experiment Name: At_Drought_Reproduction_P Parameter: Timepoint (day) Value: 5
  misc_feature: MA Experiment 20001906 PARAMETER Experiment Name: At_Drought_Reproduction_P Parameter: Tissue Value: Siliques
  misc_feature: MA Experiment 20001906 PARAMETER Experiment Name: At_Drought_Reproduction_P Parameter: Treatment Value: Drought vs. No Drought
atggctacagctactctcactcttttcctagggctcttagccttaactagtaccatacttagcttcaacgccgatgctaggcctcaaccaagtgatgaggatcttggtaccatcattggacctcatcaaactagcttcgatgacgagataggcatcgtgattggaccacatgcgaccgtagatgacgaagacattgacatggacatgggcaccaccgttggaccgcagaccaacctaaatgatgatgatttgggcaccatcattggacccgagtttgagatccacaagcaagatttccccgcagatttcatatttggaacatctgtttccgcatatcaggttgaaggtgctaaaaagggttctgggagaggcttgacctcatgggacgaatttacacacatgtttcctgagaaggttcaacaaaatggcgatggagatgagggagtcgacttctatacccgttacaaggatgatataaaattaatgaaggagttgaacacgaatggcttcagattttcaatctcatggaccaggatcttgccttatggaactattaaaaaaggtgtaaacgaggagggggtgaagttctacaacgatcttataaatgaacttttagctaatggaattcagccttcggttactctctttcactgggaatctccacttgctctagaaatggagtacggaggtttcctaaacgaaaggatagtagaggatttccgtgagtttgcaaacttttgcttcaaggaatttggagatagggtgaagaattgggcgacgtttaacgagccatcggtatacagcgttgctggttactcgaaaggtaagaaagcaccaggacggtgctctaaatggcaagccccaaaatgtcccacaggagattcatccgaggagccatacatagttgctcacaaccaaattcttgctcatcttgctgctgttgatgaattccgaaactgtaaaaaggtcgagggtggagggaaaattgggatagtgttggtatctcactggttcgagcctaaagatccaaattcgagtgaagacgtcaaagcagctagacgatccctcgagtaccaactcggctggtttcttcgccctctcacatatggacagtatccagcggaaatgttagaagatgtaaacatccgactgcgtgaatttacaccagaagaatctgagaaactaagaaaatctttggatttcgtcggattaaattactatggagcattcttctctacccctctcgccaaagtcaattcatcgcagcttaattatgagaccgacttacgtgtaaactggacagttattactaataacctaagtcttcctgatttgcagacaacttcaatgggtatagtgatatatccagcgggtttgaagaatatcttgaaacatatcaaagacgaatacatggacccagagatttacattatggagaatgggatggacgagatcgactatgggaccaaaaacataacggaagctactaacgattacgggaggaaagagttcatcaagagtcacatcttaatcatgggtaaatccatcaggatggacaaagtgaggctgaagggttactacatatggtcgttaatggacaacttcgagtgggataaaggttataaagtcaggttcgggctctattacgtcgattataatgacaacatgaaacgttatataaggtcatctggaaaatggctaagtgagtttcttgattccaaagagactctccataaatgctatttcgagggccatcgtgagaaaggatatgcacccaagttgttcgacgttgagtatctggaacctgagaactcgcagctaagttacaggagcgattttatgtga

SEQ ID NO: 70678 - protein, 614 aa, Arabidopsis thaliana
  peptide (1)..(614): Ceres Seq. ID no. 2717494
  misc_feature (134)..(548): Homolog of NCBI NO: 24417286 NR Description: unknown [Arabidopsis thaliana]
  misc_feature (93)..(571): Homolog of NCBI NO: 10834548 NR Description: beta-glucosidase [Arabidopsis thaliana]
  misc_feature (93)..(571): Homolog of NCBI NO: 15232262 NR Description: glycosyl hydrolase family 1, beta-glucosidase; id: At3g60140.1, supported by cDNA: gi_10834547 [Arabidopsis
  misc_feature (86)..(609): Homolog of NCBI NO: 30689721 NR Description: glycosyl hydrolase family 1 [Arabidopsis thaliana]
  misc_feature (94)..(571): Homolog of NCBI NO: 22327030 NR Description: glycosyl hydrolase family 1; protein id:
  misc_feature (86)..(609): Homolog of NCBI NO: 7435453 NR Description: probable beta-glucosidase At2g44460 [imported] -
  misc_feature (86)..(571): Homolog of NCBI NO: 7435454 NR Description: beta-glucosidase homolog At2g44470 [imported] -
  misc_feature (94)..(572): Homolog of NCBI NO: 15238569 NR Description: glycosyl hydrolase family 1; protein id:
  misc_feature (96)..(571): Homolog of NCBI NO: 15224886 NR Description: glycosyl hydrolase family 1; protein id: supported by cDNA: gi_20259434 [Arabidopsis thaliana]
  misc_feature (93)..(587): Homolog of NCBI NO: 25404995 NR Description: protein T4O12.15 [imported] - Arabidopsis >gi|8778810|gb|AAF26759.2|AC007396_8 T4O12.15 [Arabidopsis
MATATLTLFLGLLALTSTILSFNADARPQPSDEDLGTIIGPHQTSFDDEIGIVIGPHATVDDEDIDMDMGTTVGPQTNLNDDDLGTIIGPEFEIHKQDFPADFIFGTSVSAYQVEGAKKGSGRGLTSWDEFTHMFPEKVQQNGDGDEGVDFYTRYKDDIKLMKELNTNGFRFSISWTRILPYGTIKKGVNEEGVKFYNDLINELLANGIQPSVTLFHWESPLALEMEYGGFLNERIVEDFREFANFCFKEFGDRVKNWATFNEPSVYSVAGYSKGKKAPGRCSKWQAPKCPTGDSSEEPYIVAHNQILAHLAAVDEFRNCKKVEGGGKIGIVLVSHWFEPKDPNSSEDVKAARRSLEYQLGWFLRPLTYGQYPAEMLEDVNIRLREFTPEESEKLRKSLDFVGLNYYGAFFSTPLAKVNSSQLNYETDLRVNWTVITNNLSLPDLQTTSMGIVIYPAGLKNILKHIKDEYMDPEIYIMENGMDEIDYGTKNITEATNDYGRKEFIKSHILIMGKSIRMDKVRLKGYYIWSLMDNFEWDKGYKVRFGLYYVDYNDNMKRYIRSSGKWLSEFLDSKETLHKCYFEGHREKGYAPKLFDVEYLEPENSQLSYRSDFM

SEQ ID NO: 70679 - protein, 548 aa, Arabidopsis thaliana
  peptide (1)..(548): Ceres Seq. ID no. 2717495
  misc_feature (30)..(505): Homolog of NCBI NO: 15224886 NR Description: glycosyl hydrolase family 1; protein id: supported by cDNA: gi_20259434 [Arabidopsis thaliana]
  misc_feature (27)..(521): Homolog of NCBI NO: 25404995 NR Description: protein T4O12.15 [imported] - Arabidopsis >gi|8778810|gb|AAF26759.2|AC007396_8 T4O12.15 [Arabidopsis
  misc_feature (68)..(482): Homolog of NCBI NO: 24417286 NR Description: unknown [Arabidopsis thaliana]
  misc_feature (27)..(505): Homolog of NCBI NO: 10834548 NR Description: beta-glucosidase [Arabidopsis thaliana]
  misc_feature (27)..(505): Homolog of NCBI NO: 15232262 NR Description: glycosyl hydrolase family 1, beta-glucosidase; id: At3g60140.1, supported by cDNA: gi_10834547 [Arabidopsis
  misc_feature (20)..(543): Homolog of NCBI NO: 30689721 NR Description: glycosyl hydrolase family 1 [Arabidopsis thaliana]
  misc_feature (28)..(505): Homolog of NCBI NO: 22327030 NR Description: glycosyl hydrolase family 1; protein id:
  misc_feature (20)..(543): Homolog of NCBI NO: 7435453 NR Description: probable beta-glucosidase At2g44460 [imported] -
  misc_feature (20)..(505): Homolog of NCBI NO: 7435454 NR Description: beta-glucosidase homolog At2g44470 [imported] -
  misc_feature (28)..(506): Homolog of NCBI NO: 15238569 NR Description: glycosyl hydrolase family 1; protein id:
MDMGTTVGPQTNLNDDDLGTIIGPEFEIHKQDFPADFIFGTSVSAYQVEGAKKGSGRGLTSWDEFTHMFPEKVQQNGDGDEGVDFYTRYKDDIKLMKELNTNGFRFSISWTRILPYGTIKKGVNEEGVKFYNDLINELLANGIQPSVTLFHWESPLALEMEYGGFLNERIVEDFREFANFCFKEFGDRVKNWATFNEPSVYSVAGYSKGKKAPGRCSKWQAPKCPTGDSSEEPYIVAHNQILAHLAAVDEFRNCKKVEGGGKIGIVLVSHWFEPKDPNSSEDVKAARRSLEYQLGWFLRPLTYGQYPAEMLEDVNIRLREFTPEESEKLRKSLDFVGLNYYGAFFSTPLAKVNSSQLNYETDLRVNWTVITNNLSLPDLQTTSMGIVIYPAGLKNILKHIKDEYMDPEIYIMENGMDEIDYGTKNITEATNDYGRKEFIKSHILIMGKSIRMDKVRLKGYYIWSLMDNFEWDKGYKVRFGLYYVDYNDNMKRYIRSSGKWLSEFLDSKETLHKCYFEGHREKGYAPKLFDVEYLEPENSQLSYRSDFM

SEQ ID NO: 70680 - protein, 546 aa, Arabidopsis thaliana
  peptide (1)..(546): Ceres Seq. ID no. 2717496
  misc_feature (66)..(480): Homolog of NCBI NO: 24417286 NR Description: unknown [Arabidopsis thaliana]
  misc_feature (25)..(503): Homolog of NCBI NO: 10834548 NR Description: beta-glucosidase [Arabidopsis thaliana]
  misc_feature (25)..(503): Homolog of NCBI NO: 15232262 NR Description: glycosyl hydrolase family 1, beta-glucosidase; id: At3g60140.1, supported by cDNA: gi_10834547 [Arabidopsis
  misc_feature (18)..(541): Homolog of NCBI NO: 30689721 NR Description: glycosyl hydrolase family 1 [Arabidopsis thaliana]
  misc_feature (26)..(503): Homolog of NCBI NO: 22327030 NR Description: glycosyl hydrolase family 1; protein id:
  misc_feature (18)..(541): Homolog of NCBI NO: 7435453 NR Description: probable beta-glucosidase At2g44460 [imported] -
  misc_feature (18)..(503): Homolog of NCBI NO: 7435454 NR Description: beta-glucosidase homolog At2g44470 [imported] -
  misc_feature (26)..(504): Homolog of NCBI NO: 15238569 NR Description: glycosyl hydrolase family 1; protein id:
  misc_feature (28)..(503): Homolog of NCBI NO: 15224886 NR Description: glycosyl hydrolase family 1; protein id: supported by cDNA: gi_20259434 [Arabidopsis thaliana]
  misc_feature (25)..(519): Homolog of NCBI NO: 25404995 NR Description: protein T4O12.15 [imported] - Arabidopsis >gi|8778810|gb|AAF26759.2|AC007396_8 T4O12.15 [Arabidopsis
MGTTVGPQTNLNDDDLGTIIGPEFEIHKQDFPADFIFGTSVSAYQVEGAKKGSGRGLTSWDEFTHMFPEKVQQNGDGDEGVDFYTRYKDDIKLMKELNTNGFRFSISWTRILPYGTIKKGVNEEGVKFYNDLINELLANGIQPSVTLFHWESPLALEMEYGGFLNERIVEDFREFANFCFKEFGDRVKNWATFNEPSVYSVAGYSKGKKAPGRCSKWQAPKCPTGDSSEEPYIVAHNQILAHLAAVDEFRNCKKVEGGGKIGIVLVSHWFEPKDPNSSEDVKAARRSLEYQLGWFLRPLTYGQYPAEMLEDVNIRLREFTPEESEKLRKSLDFVGLNYYGAFFSTPLAKVNSSQLNYETDLRVNWTVITNNLSLPDLQTTSMGIVIYPAGLKNILKHIKDEYMDPEIYIMENGMDEIDYGTKNITEATNDYGRKEFIKSHILIMGKSIRMDKVRLKGYYIWSLMDNFEWDKGYKVRFGLYYVDYNDNMKRYIRSSGKWLSEFLDSKETLHKCYFEGHREKGYAPKLFDVEYLEPENSQLSYRSDFM

SEQ ID NO: 70681 - DNA, 1389 bp, Arabidopsis thaliana
  misc_feature (1)..(1389): Ceres Seq. ID no. 2729671
  misc_feature: MA Experiment ID: 20001905 Result: Up-regulated in Transcription
  misc_feature: MA Experiment 20001905 PARAMETER Experiment Name: At_Drought_Reproduction_P Parameter: Age (day) Value: 40
  misc_feature: MA Experiment 20001905 PARAMETER Experiment Name: At_Drought_Reproduction_P Parameter: Organism Value: A. thaliana
  misc_feature: MA Experiment 20001905 PARAMETER Experiment Name: At_Drought_Reproduction_P Parameter: Plant Line Value: WS
  misc_feature: MA Experiment 20001905 PARAMETER Experiment Name: At_Drought_Reproduction_P Parameter: Timepoint (day) Value: 10
  misc_feature: MA Experiment 20001905 PARAMETER Experiment Name: At_Drought_Reproduction_P Parameter: Tissue Value: Rosettes
  misc_feature: MA Experiment 20001905 PARAMETER Experiment Name: At_Drought_Reproduction_P Parameter: Treatment Value: Drought vs. No Drought
atgaggtttatcttgcgtcatctgcattcacttggagtgatcaacaaatttgattcctttcttctacattttcacaccaaatcgcttaaatctaaccacactttgaagcaatatcttgaatctggggaaccaatcaaagctcttttagatttccggcaccgattcagacaaagtcctagttttgttgacagtttttctgttttgtttgccattaaagtttcgtcagctcagaaagcttcctcacttgatggtagacagatccacgctcttgtaagaaaactaggtttcaatgccgttattcaaattcaaacatctttagtgggattctactcttccgtgggtgatgtcgattatgcacgccaagtgttcgacgaaacgcctgagaaacagaacattgtcttgtggacagcgatgatttcagcttacactgagaatgagaactctgtggaagctattgagctgtttaaacgaatggaagcggaaaagatcgaacttgatggagtgattgtgactgtggctttatcagcttgtgctgatctcggggcggtgcagatgggagaagagatttattcgcgtagtatcaagagaaaacgaagattggctatggatttaactctgagaaattcacttcttaacatgtacgtgaaatctggggaaactgagaaagctaggaaactctttgatgaaagtatgagaaaagatgtgactacttacacatctatgatcttcgggtatgctttaaacggtcaagctcaagaatctttagaactcttcaagaaaatgaagacgattgatcagagccaagatactgtcattactccaaatgatgtgactttcatcggcgtcttgatggcttgtagtcacagtggcttagtagaagaaggaaaacgacatttcaagagcatgattatggattacaatctgaaacctagagaagctcatttcggatgtatggtggatttgttttgtcggtcaggtcatttgaaagatgctcacgagttcatcaatcagatgccgataaagccaaacacagtgatatggagaacactgctaggcgcttgcagtcttcacgggaatgttgagctcggagaagaagttcagagacggatctttgagttagatcgtgatcatgtcggagattatgttgcgttgtcaaatatctacgcttcaaaaggaatgtgggatgagaaatcaaagatgagggatcgtgtgaggaagagaagaatgcctggtaaaagctggattgaactcggaagcattatcaatgagtttgtctcaggacctgataataacgatgagcagctgatgatgggagagattagtgaggttttgagatgtttagtttcttgtatgacaagttttgattgtgtaatagggaaaaaaatgtag

SEQ ID NO: 70682 - protein, 462 aa, Arabidopsis thaliana
  peptide (1)..(462): Ceres Seq. ID no. 2729672
  misc_feature (313)..(347): Pfam Name: PPR repeat Pfam Description: PPR repeat
  misc_feature (1)..(462): Homolog of NCBI NO: 15221226 NR Description: hypothetical protein; protein id: At1g74400.1
  misc_feature (32)..(433): Homolog of NCBI NO: 7486979 NR Description: hypothetical protein T13K14.230 - Arabidopsis
  misc_feature (32)..(445): Homolog of NCBI NO: 15226299 NR Description: hypothetical protein; protein id: At2g01510.1
  misc_feature (32)..(433): Homolog of NCBI NO: 38175558 NR Description: putative pentatricopeptide (PPR)
  misc_feature (4)..(444): Homolog of NCBI NO: 15223099 NR Description: unknown protein; protein id: At1g08070.1 thaliana] >gi|8778839|gb|AAF79838.1|AC026875_18 T6D22.15
  misc_feature (83)..(445): Homolog of NCBI NO: 34393394 NR Description: putative pentatricopeptide (PPR)
  misc_feature (99)..(449): Homolog of NCBI NO: 34902972 NR Description: unnamed protein product [Oryza sativa (japonica group)] >gi|9558518|dbj|BAB03436.1| unnamed protein product
  misc_feature (63)..(427): Homolog of NCBI NO: 15227067 NR Description: hypothetical protein; protein id: At2g02980.1
  misc_feature (63)..(427): Homolog of NCBI NO: 21780142 NR Description: hypothetical protein [Arabidopsis thaliana]
  misc_feature (38)..(427): Homolog of NCBI NO: 11994419 NR Description: selenium-binding protein-like [Arabidopsis
MRFILRHLHSLGVINKFDSFLLHFHTKSLKSNHTLKQYLESGEPIKALLDFRHRFRQSPSFVDSFSVLFAIKVSSAQKASSLDGRQIHALVRKLGFNAVIQIQTSLVGFYSSVGDVDYARQVFDETPEKQNIVLWTAMISAYTENENSVEAIELFKRMEAEKIELDGVIVTVALSACADLGAVQMGEEIYSRSIKRKRRLAMDLTLRNSLLNMYVKSGETEKARKLFDESMRKDVTTYTSMIFGYALNGQAQESLELFKKMKTIDQSQDTVITPNDVTFIGVLMACSHSGLVEEGKRHFKSMIMDYNLKPREAHFGCMVDLFCRSGHLKDAHEFINQMPIKPNTVIWRTLLGACSLHGNVELGEEVQRRIFELDRDHVGDYVALSNIYASKGMWDEKSKMRDRVRKRRMPGKSWIELGSIINEFVSGPDNNDEQLMMGEISEVLRCLVSCMTSFDCVIGKKM

SEQ ID NO: 70683 - protein, 325 aa, Arabidopsis thaliana
  peptide (1)..(325): Ceres Seq. ID no. 2729673
  misc_feature (176)..(210): Pfam Name: PPR repeat Pfam Description: PPR repeat
  misc_feature (1)..(325): Homolog of NCBI NO: 15221226 NR Description: hypothetical protein; protein id: At1g74400.1
  misc_feature (1)..(296): Homolog of NCBI NO: 7486979 NR Description: hypothetical protein T13K14.230 - Arabidopsis
  misc_feature (1)..(308): Homolog of NCBI NO: 15226299 NR Description: hypothetical protein; protein id: At2g01510.1
  misc_feature (1)..(296): Homolog of NCBI NO: 38175558 NR Description: putative pentatricopeptide (PPR)
  misc_feature (1)..(307): Homolog of NCBI NO: 15223099 NR Description: unknown protein; protein id: At1g08070.1 thaliana] >gi|8778839|gb|AAF79838.1|AC026875_18 T6D22.15
  misc_feature (1)..(308): Homolog of NCBI NO: 34393394 NR Description: putative pentatricopeptide (PPR)
  misc_feature (1)..(312): Homolog of NCBI NO: 34902972 NR Description: unnamed protein product [Oryza sativa (japonica group)] >gi|9558518|dbj|BAB03436.1| unnamed protein product
  misc_feature (1)..(290): Homolog of NCBI NO: 15227067 NR Description: hypothetical protein; protein id: At2g02980.1
  misc_feature (1)..(290): Homolog of NCBI NO: 21780142 NR Description: hypothetical protein [Arabidopsis thaliana]
  misc_feature (1)..(290): Homolog of NCBI NO: 11994419 NR Description: selenium-binding protein-like [Arabidopsis
MISAYTENENSVEAIELFKRMEAEKIELDGVIVTVALSACADLGAVQMGEEIYSRSIKRKRRLAMDLTLRNSLLNMYVKSGETEKARKLFDESMRKDVTTYTSMIFGYALNGQAQESLELFKKMKTIDQSQDTVITPNDVTFIGVLMACSHSGLVEEGKRHFKSMIMDYNLKPREAHFGCMVDLFCRSGHLKDAHEFINQMPIKPNTVIWRTLLGACSLHGNVELGEEVQRRIFELDRDHVGDYVALSNIYASKGMWDEKSKMRDRVRKRRMPGKSWIELGSIINEFVSGPDNNDEQLMMGEISEVLRCLVSCMTSFDCVIGKKM

SEQ ID NO: 70684 - protein, 305 aa, Arabidopsis thaliana
  peptide (1)..(305): Ceres Seq. ID no. 2729674
  misc_feature (156)..(190): Pfam Name: PPR repeat Pfam Description: PPR repeat
  misc_feature (1)..(305): Homolog of NCBI NO: 15221226 NR Description: hypothetical protein; protein id: At1g74400.1
  misc_feature (1)..(276): Homolog of NCBI NO: 7486979 NR Description: hypothetical protein T13K14.230 - Arabidopsis
  misc_feature (1)..(288): Homolog of NCBI NO: 15226299 NR Description: hypothetical protein; protein id: At2g01510.1
  misc_feature (1)..(276): Homolog of NCBI NO: 38175558 NR Description: putative pentatricopeptide (PPR)
  misc_feature (1)..(287): Homolog of NCBI NO: 15223099 NR Description: unknown protein; protein id: At1g08070.1 thaliana] >gi|8778839|gb|AAF79838.1|AC026875_18 T6D22.15
  misc_feature (1)..(288): Homolog of NCBI NO: 34393394 NR Description: putative pentatricopeptide (PPR)
  misc_feature (1)..(292): Homolog of NCBI NO: 34902972 NR Description: unnamed protein product [Oryza sativa (japonica group)] >gi|9558518|dbj|BAB03436.1| unnamed protein product
  misc_feature (1)..(270): Homolog of NCBI NO: 15227067 NR Description: hypothetical protein; protein id: At2g02980.1
  misc_feature (1)..(270): Homolog of NCBI NO: 21780142 NR Description: hypothetical protein [Arabidopsis thaliana]
  misc_feature (1)..(270): Homolog of NCBI NO: 11994419 NR Description: selenium-binding protein-like [Arabidopsis
MEAEKIELDGVIVTVALSACADLGAVQMGEEIYSRSIKRKRRLAMDLTLRNSLLNMYVKSGETEKARKLFDESMRKDVTTYTSMIFGYALNGQAQESLELFKKMKTIDQSQDTVITPNDVTFIGVLMACSHSGLVEEGKRHFKSMIMDYNLKPREAHFGCMVDLFCRSGHLKDAHEFINQMPIKPNTVIWRTLLGACSLHGNVELGEEVQRRIFELDRDHVGDYVALSNIYASKGMWDEKSKMRDRVRKRRMPGKSWIELGSIINEFVSGPDNNDEQLMMGEISEVLRCLVSCMTSFDCVIGKKM

SEQ ID NO: 70685 - DNA, 465 bp, Arabidopsis thaliana
  misc_feature (1)..(465): Ceres Seq. ID no. 2729705
  misc_feature: MA Experiment ID: 20000327 Result: Up-regulated in Transcription
  misc_feature: MA Experiment 20000327 PARAMETER Experiment Name: At_42deg_Heat_Sub_P Parameter: Age (day) Value: 14
  misc_feature: MA Experiment 20000327 PARAMETER Experiment Name: At_42deg_Heat_Sub_P Parameter: Organism Value: A. thaliana
  misc_feature: MA Experiment 20000327 PARAMETER Experiment Name: At_42deg_Heat_Sub_P Parameter: Plant Line Value: WS
  misc_feature: MA Experiment 20000327 PARAMETER Experiment Name: At_42deg_Heat_Sub_P Parameter: Temperature (deg C) Value: 42 vs. 22
  misc_feature: MA Experiment 20000327 PARAMETER Experiment Name: At_42deg_Heat_Sub_P Parameter: Timepoint (hr) Value: 1
  misc_feature: MA Experiment 20000327 PARAMETER Experiment Name: At_42deg_Heat_Sub_P Parameter: Tissue Value: Aerial
  misc_feature: MA Experiment ID: 20000328 Result: Up-regulated in Transcription
  misc_feature: MA Experiment 20000328 PARAMETER Experiment Name: At_42deg_Heat_Sub_P Parameter: Age (day) Value: 14
  misc_feature: MA Experiment 20000328 PARAMETER Experiment Name: At_42deg_Heat_Sub_P Parameter: Organism Value: A. thaliana
  misc_feature: MA Experiment 20000328 PARAMETER Experiment Name: At_42deg_Heat_Sub_P Parameter: Plant Line Value: WS
  misc_feature: MA Experiment 20000328 PARAMETER Experiment Name: At_42deg_Heat_Sub_P Parameter: Temperature (deg C) Value: 42 vs. 22
  misc_feature: MA Experiment 20000328 PARAMETER Experiment Name: At_42deg_Heat_Sub_P Parameter: Timepoint (hr) Value: 6
  misc_feature: MA Experiment 20000328 PARAMETER Experiment Name: At_42deg_Heat_Sub_P Parameter: Tissue Value: Aerial
  misc_feature: Pfam Name: UQ_con Pfam Description: Ubiquitin-conjugating enzyme
atgtttaagaaaatggataaaaaagcagcgcagagaattgcgatggaatacagagctatgatctcgaaagaatctttgttcagtattggtcaaaactcgaacaatatatacgaatggactgcagtgatccggggtccagatggcactccctatgaaggtggcatgtttaatctcagtattaagtttcctacggattatccttttaaaccacccaagtttacgtttaaaactccgatttaccatccaaatatcaatgatgaaggatcgatttgcatgaacattcttaaagacaaatggactcctgctcttatggttgaaaaggtgcttctgtcaatacttttactattggaaaaaccaaacccagatgatcctcttgtacctgaaattggacagctcttcaagaataacagattccaatttgaccagagagctcgagaattcactgctcgacatgctaataattaa

SEQ ID NO: 70686 - protein, 154 aa, Arabidopsis thaliana
  peptide (1)..(154): Ceres Seq. ID no. 2729706
  misc_feature: Pfam Name: UQ_con Pfam Description: Ubiquitin-conjugating enzyme
  misc_feature (1)..(154): Homolog of NCBI NO: 18400088 NR Description: E2, ubiquitin-conjugating enzyme, putative; id: At1g36340.1 [Arabidopsis thaliana] >gi|25293671|pir||E86484
  misc_feature (9)..(152): Homolog of NCBI NO: 13811942 NR Description: ubiquitin conjugating enzyme [Guillardia theta] ubiquitin conjugating enzyme [Guillardia theta] ubiquitin conjugating enzyme [Guillardia theta]
  misc_feature (9)..(152): Homolog of NCBI NO: 32400971 NR Description: ubiquitin-conjugating enzyme [Griffithsia
  misc_feature (9)..(154): Homolog of NCBI NO: 4100646 NR Description: putative ubiquitin conjugating enzyme [Pinus
  misc_feature (9)..(152): Homolog of NCBI NO: 19112075 NR Description: ubiquitin-conjugating enzyme e2-16 kd
  misc_feature (9)..(152): Homolog of NCBI NO: 18398206 NR Description: E2, ubiquitin-conjugating enzyme 11 (UBC11); id: At3g08690.1, supported by cDNA: 21455., supported by cDNA: supported by cDNA: gi_20259610 [Arabidopsis thaliana] protein 11)
  misc_feature (9)..(152): Homolog of NCBI NO: 6320264 NR Description: ubiquitin-conjugating enzyme; Ubc5p [Saccharomyces
  misc_feature (28)..(152): Homolog of NCBI NO: 477134 NR Description: ubiquitin-conjugating enzyme ubc-2 -
  misc_feature (28)..(152): Homolog of NCBI NO: 17541470 NR Description: Ubiquitin conjugating enzyme UBC-2, LEThal LET-70
  misc_feature (28)..(152): Homolog of NCBI NO: 30584383 NR Description: Homo sapiens ubiquitin-conjugating enzyme E2D 1
MFKKMDKKAAQRIAMEYRAMISKESLFSIGQNSNNIYEWTAVIRGPDGTPYEGGMFNLSIKFPTDYPFKPPKFTFKTPIYHPNINDEGSICMNILKDKWTPALMVEKVLLSILLLLEKPNPDDPLVPEIGQLFKNNRFQFDQRAREFTARHANN

SEQ ID NO: 70687 - protein, 150 aa, Arabidopsis thaliana
  peptide (1)..(150): Ceres Seq. ID no. 2729707
  misc_feature: Pfam Name: UQ_con Pfam Description: Ubiquitin-conjugating enzyme
  misc_feature (1)..(150): Homolog of NCBI NO: 18400088 NR Description: E2, ubiquitin-conjugating enzyme, putative; id: At1g36340.1 [Arabidopsis thaliana] >gi|25293671|pir||E86484
  misc_feature (5)..(148): Homolog of NCBI NO: 13811942 NR Description: ubiquitin conjugating enzyme [Guillardia theta] ubiquitin conjugating enzyme [Guillardia theta] ubiquitin conjugating enzyme [Guillardia theta]
  misc_feature (5)..(148): Homolog of NCBI NO: 32400971 NR Description: ubiquitin-conjugating enzyme [Griffithsia
  misc_feature (5)..(150): Homolog of NCBI NO: 4100646 NR Description: putative ubiquitin conjugating enzyme [Pinus
  misc_feature (5)..(148): Homolog of NCBI NO: 19112075 NR Description: ubiquitin-conjugating enzyme e2-16 kd
  misc_feature (5)..(148): Homolog of NCBI NO: 18398206 NR Description: E2, ubiquitin-conjugating enzyme 11 (UBC11); id: At3g08690.1, supported by cDNA: 21455., supported by cDNA: supported by cDNA: gi_20259610 [Arabidopsis thaliana] protein 11)
  misc_feature (5)..(148): Homolog of NCBI NO: 6320264 NR Description: ubiquitin-conjugating enzyme; Ubc5p [Saccharomyces
  misc_feature (24)..(148): Homolog of NCBI NO: 477134 NR Description: ubiquitin-conjugating enzyme ubc-2 -
  misc_feature (24)..(148): Homolog of NCBI NO: 17541470 NR Description: Ubiquitin conjugating enzyme UBC-2, LEThal LET-70
  misc_feature (24)..(148): Homolog of NCBI NO: 30584383 NR Description: Homo sapiens ubiquitin-conjugating enzyme E2D 1
MDKKAAQRIAMEYRAMISKESLFSIGQNSNNIYEWTAVIRGPDGTPYEGGMFNLSIKFPTDYPFKPPKFTFKTPIYHPNINDEGSICMNILKDKWTPALMVEKVLLSILLLLEKPNPDDPLVPEIGQLFKNNRFQFDQRAREFTARHANN

SEQ ID NO: 70688 - protein, 140 aa, Arabidopsis thaliana
  peptide (1)..(140): Ceres Seq. ID no. 2729708
  misc_feature: Pfam Name: UQ_con Pfam Description: Ubiquitin-conjugating enzyme
  misc_feature (1)..(140): Homolog of NCBI NO: 18400088 NR Description: E2, ubiquitin-conjugating enzyme, putative; id: At1g36340.1 [Arabidopsis thaliana] >gi|25293671|pir||E86484
  misc_feature (1)..(138): Homolog of NCBI NO: 13811942 NR Description: ubiquitin conjugating enzyme [Guillardia theta] ubiquitin conjugating enzyme [Guillardia theta] ubiquitin conjugating enzyme [Guillardia theta]
  misc_feature (1)..(138): Homolog of NCBI NO: 32400971 NR Description: ubiquitin-conjugating enzyme [Griffithsia
  misc_feature (1)..(140): Homolog of NCBI NO: 4100646 NR Description: putative ubiquitin conjugating enzyme [Pinus
  misc_feature (1)..(138): Homolog of NCBI NO: 19112075 NR Description: ubiquitin-conjugating enzyme e2-16 kd
  misc_feature (1)..(138): Homolog of NCBI NO: 18398206 NR Description: E2, ubiquitin-conjugating enzyme 11 (UBC11); id: At3g08690.1, supported by cDNA: 21455., supported by cDNA: supported by cDNA: gi_20259610 [Arabidopsis thaliana] protein 11)
  misc_feature (1)..(138): Homolog of NCBI NO: 6320264 NR Description: ubiquitin-conjugating enzyme; Ubc5p [Saccharomyces
  misc_feature (14)..(138): Homolog of NCBI NO: 477134 NR Description: ubiquitin-conjugating enzyme ubc-2 -
  misc_feature (14)..(138): Homolog of NCBI NO: 17541470 NR Description: Ubiquitin conjugating enzyme UBC-2, LEThal LET-70
  misc_feature (14)..(138): Homolog of NCBI NO: 30584383 NR Description: Homo sapiens ubiquitin-conjugating enzyme E2D 1
MEYRAMISKESLFSIGQNSNNIYEWTAVIRGPDGTPYEGGMFNLSIKFPTDYPFKPPKFTFKTPIYHPNINDEGSICMNILKDKWTPALMVEKVLLSILLLLEKPNPDDPLVPEIGQLFKNNRFQFDQRAREFTARHANN

SEQ ID NO: 70689 - DNA, 1533 bp, Arabidopsis thaliana
  misc_feature (1)..(1533): Ceres Seq. ID no. 2729766
  misc_feature: MA Experiment ID: 20000307 Result: Down-regulated in Transcription
  misc_feature: MA Experiment 20000307 PARAMETER Experiment Name: At_Germinating_Seeds_Sub_P Parameter: Age (hr) Value: 24 vs. 0
  misc_feature: MA Experiment 20000307 PARAMETER Experiment Name: At_Germinating_Seeds_Sub_P Parameter: Organism Value: A. thaliana
  misc_feature: MA Experiment 20000307 PARAMETER Experiment Name: At_Germinating_Seeds_Sub_P Parameter: Plant Line Value: WS
  misc_feature: MA Experiment 20000307 PARAMETER Experiment Name: At_Germinating_Seeds_Sub_P Parameter: Tissue Value: Germinating Seeds
  misc_feature: MA Experiment ID: 20000314 Result: Up-regulated in Transcription
  misc_feature: MA Experiment 20000314 PARAMETER Experiment Name: At_14day_Shoots-Roots_Sub_P Parameter: Age (day) Value: 14
  misc_feature: MA Experiment 20000314 PARAMETER Experiment Name: At_14day_Shoots-Roots_Sub_P Parameter: Organism Value: A. thaliana
  misc_feature: MA Experiment 20000314 PARAMETER Experiment Name: At_14day_Shoots-Roots_Sub_P Parameter: Plant Line Value: WS
  misc_feature: MA Experiment 20000314 PARAMETER Experiment Name: At_14day_Shoots-Roots_Sub_P Parameter: Tissue Value: Roots vs. Whole Plant
  misc_feature: MA Experiment ID: 20000315 Result: Up-regulated in Transcription
  misc_feature: MA Experiment 20000315 PARAMETER Experiment Name: At_14day_Shoots-Roots_Sub_P Parameter: Age (day) Value: 14
  misc_feature: MA Experiment 20000315 PARAMETER Experiment Name: At_14day_Shoots-Roots_Sub_P Parameter: Organism Value: A. thaliana
  misc_feature: MA Experiment 20000315 PARAMETER Experiment Name: At_14day_Shoots-Roots_Sub_P Parameter: Plant Line Value: WS
  misc_feature: MA Experiment 20000315 PARAMETER Experiment Name: At_14day_Shoots-Roots_Sub_P Parameter: Tissue Value: Shoots vs. Whole Plant
  misc_feature: Pfam Name: MatE Pfam Description: MatE
atggaagacaaaatccagtcagatgatttcacttcccataaaaacccaactcttcctcaagtcattgaagagctaaaagagctctgggctatggttttaccaatcacagcaatgaactgtcttgtctacgtgcgcgccgtcgtgtctgttctcttcctcggccgtctcggtagcctcgagttagccggaggagctctctccatcggattcaccaacatcacaggatactctgttatggttggactcgcctcgggtctcgagccagtgtgtagccaagcctacggtagcaaaaactgggatctcctcacgctctctcttcaccgtatggtcgtgattctcttaatggcctctctgcccataagcctcctttggatcaaccttggacccatcatgcttttcatgggtcaaaacccggagataaccgctacagcggctgaatattgtctctacgcgcttcctgatcttttgaccaatactctccttcagccgttacgtgtttatctaaggtcgcagcgagtgacgaaaccgatgatgtggtgtacgctagcagcagtggcgttccatgtgccattgaattattggcttgtgatggtgaagcattggggtgttcctggtgtggctattgcgtctgttgtgacgaatttgatcatggttgtgcttttggttggttatgtttgggttagtgggatgttgcagaagagagtgagtggtgatggtgatggtgggtctactacgatggtggcggtggtggctcagtcgtcgtctgtgatggagttggttggagggttgggaccgttgatgagagtggcggttccgagttgtttggggatatgtttggaatggtggtggtatgagattgtgattgtgatgggtggttacttggagaatcctaagcttgctgtggctgccactgggattttgattcagactactagtcttatgtatacggttcctatggctttagctggatgcgtctctgctcgggttgggaacgagctcggtgcaggtagaccttacaaggccagactagccgcgaacgtggctctagcttgcgcgtttgtagtaggagcattgaatgtggcttggacggttattctaaaagagcgttgggctggactattcactggctatgagccactcaaggtcttggttgcttcggttatgccaattgtcgggctatgcgagctagggaattgtccacagaccacgggctgcgggattcttagagggacaggtcggcctgcggttggggcacatgtgaatctcgggtcgttttatttcgttgggactcccgtggcagttggactagcgttttggttgaaaattgggtttagtgggttgtggtttgggttgctttcagctcaagcggcttgcgtggtttcgatattgtatgcggttttggcgaggacggattgggaaggggaagccgtgaaggcaatgagactgacgagtttggagatgaggaaagttggacaagatgaagagtcttcattgttattgttggatgatgagaagttgggtgatgttttgtaa

SEQ ID NO: 70690 - protein, 510 aa, Arabidopsis thaliana
  peptide (1)..(510): Ceres Seq. ID no. 2729767
  misc_feature: Pfam Name: MatE Pfam Description: MatE
  misc_feature (1)..(510): Homolog of NCBI NO: 15217599 NR Description: hypothetical protein; protein id: At1g71870.1
  misc_feature (19)..(500): Homolog of NCBI NO: 28376699 NR Description: putative MATE efflux membrane protein [Oryza
  misc_feature (13)..(479): Homolog of NCBI NO: 15239797 NR Description: putative protein; protein id: At5g49130.1 thaliana] >gi|10176946|dbj|BAB10095.1| similarity to unknown protein [Arabidopsis thaliana]
  misc_feature (262)..(486): Homolog of NCBI NO: 15233459 NR Description: putative protein; protein id: At4g29140.1
  misc_feature (15)..(230): Homolog of NCBI NO: 15233459 NR Description: putative protein; protein id: At4g29140.1
  misc_feature (264)..(486): Homolog of NCBI NO: 15241158 NR Description: putative protein; protein id: At5g19700.1
  misc_feature (16)..(232): Homolog of NCBI NO: 15241158 NR Description: putative protein; protein id: At5g19700.1
  misc_feature (7)..(230): Homolog of NCBI NO: 18406257 NR Description: expressed protein; protein id: At1g58340.1, by cDNA: gi_6520160 [Arabidopsis thaliana]
  misc_feature (262)..(484): Homolog of NCBI NO: 18406257 NR Description: expressed protein; protein id: At1g58340.1, by cDNA: gi_6520160 [Arabidopsis thaliana]
  misc_feature (257)..(502): Homolog of NCBI NO: 15235905 NR Description: putative protein; protein id: At4g23030.1
MEDKIQSDDFTSHKNPTLPQVIEELKELWAMVLPITAMNCLVYVRAVVSVLFLGRLGSLELAGGALSIGFTNITGYSVMVGLASGLEPVCSQAYGSKNWDLLTLSLHRMVVILLMASLPISLLWINLGPIMLFMGQNPEITATAAEYCLYALPDLLTNTLLQPLRVYLRSQRVTKPMMWCTLAAVAFHVPLNYWLVMVKHWGVPGVAIASVVTNLIMVVLLVGYVWVSGMLQKRVSGDGDGGSTTMVAVVAQSSSVMELVGGLGPLMRVAVPSCLGICLEWWWYEIVIVMGGYLENPKLAVAATGILIQTTSLMYTVPMALAGCVSARVGNELGAGRPYKARLAANVALACAFVVGALNVAWTVILKERWAGLFTGYEPLKVLVASVMPIVGLCELGNCPQTTGCGILRGTGRPAVGAHVNLGSFYFVGTPVAVGLAFWLKIGFSGLWFGLLSAQAACVVSILYAVLARTDWEGEAVKAMRLTSLEMRKVGQDEESSLLLLDDEKLGDVL

SEQ ID NO: 70691 - protein, 480 aa, Arabidopsis thaliana
  peptide (1)..(480): Ceres Seq. ID no. 2729768
  misc_feature: Pfam Name: MatE Pfam Description: MatE
  misc_feature (1)..(480): Homolog of NCBI NO: 15217599 NR Description: hypothetical protein; protein id: At1g71870.1
  misc_feature (1)..(470): Homolog of NCBI NO: 28376699 NR Description: putative MATE efflux membrane protein [Oryza
  misc_feature (1)..(449): Homolog of NCBI NO: 15239797 NR Description: putative protein; protein id: At5g49130.1 thaliana] >gi|10176946|dbj|BAB10095.1| similarity to unknown protein [Arabidopsis thaliana]
  misc_feature (232)..(456): Homolog of NCBI NO: 15233459 NR Description: putative protein; protein id: At4g29140.1
  misc_feature (1)..(200): Homolog of NCBI NO: 15233459 NR Description: putative protein; protein id: At4g29140.1
  misc_feature (234)..(456): Homolog of NCBI NO: 15241158 NR Description: putative protein; protein id: At5g19700.1
  misc_feature (1)..(202): Homolog of NCBI NO: 15241158 NR Description: putative protein; protein id: At5g19700.1
  misc_feature (1)..(200): Homolog of NCBI NO: 18406257 NR Description: expressed protein; protein id: At1g58340.1, by cDNA: gi_6520160 [Arabidopsis thaliana]
  misc_feature (232)..(454): Homolog of NCBI NO: 18406257 NR Description: expressed protein; protein id: At1g58340.1, by cDNA: gi_6520160 [Arabidopsis thaliana]
  misc_feature (227)..(472): Homolog of NCBI NO: 15235905 NR Description: putative protein; protein id: At4g23030.1
MVLPITAMNCLVYVRAVVSVLFLGRLGSLELAGGALSIGFTNITGYSVMVGLASGLEPVCSQAYGSKNWDLLTLSLHRMVVILLMASLPISLLWINLGPIMLFMGQNPEITATAAEYCLYALPDLLTNTLLQPLRVYLRSQRVTKPMMWCTLAAVAFHVPLNYWLVMVKHWGVPGVAIASVVTNLIMVVLLVGYVWVSGMLQKRVSGDGDGGSTTMVAVVAQSSSVMELVGGLGPLMRVAVPSCLGICLEWWWYEIVIVMGGYLENPKLAVAATGILIQTTSLMYTVPMALAGCVSARVGNELGAGRPYKARLAANVALACAFVVGALNVAWTVILKERWAGLFTGYEPLKVLVASVMPIVGLCELGNCPQTTGCGILRGTGRPAVGAHVNLGSFYFVGTPVAVGLAFWLKIGFSGLWFGLLSAQAACVVSILYAVLARTDWEGEAVKAMRLTSLEMRKVGQDEESSLLLLDDEKLGDVL

SEQ ID NO: 70692 - protein, 473 aa, Arabidopsis thaliana
  peptide (1)..(473): Ceres Seq. ID no. 2729769
  misc_feature: Pfam Name: MatE Pfam Description: MatE
  misc_feature (1)..(473): Homolog of NCBI NO: 15217599 NR Description: hypothetical protein; protein id: At1g71870.1
  misc_feature (1)..(463): Homolog of NCBI NO: 28376699 NR Description: putative MATE efflux membrane protein [Oryza
  misc_feature (1)..(442): Homolog of NCBI NO: 15239797 NR Description: putative protein; protein id: At5g49130.1 thaliana] >gi|10176946|dbj|BAB10095.1| similarity to unknown protein [Arabidopsis thaliana]
  misc_feature (225)..(449): Homolog of NCBI NO: 15233459 NR Description: putative protein; protein id: At4g29140.1
  misc_feature (1)..(193): Homolog of NCBI NO: 15233459 NR Description: putative protein; protein id: At4g29140.1
  misc_feature (227)..(449): Homolog of NCBI NO: 15241158 NR Description: putative protein; protein id: At5g19700.1
  misc_feature (1)..(195): Homolog of NCBI NO: 15241158 NR Description: putative protein; protein id: At5g19700.1
  misc_feature (1)..(193): Homolog of NCBI NO: 18406257 NR Description: expressed protein; protein id: At1g58340.1, by cDNA: gi_6520160 [Arabidopsis thaliana]
  misc_feature (225)..(447): Homolog of NCBI NO: 18406257 NR Description: expressed protein; protein id: At1g58340.1, by cDNA: gi_6520160 [Arabidopsis thaliana]
  misc_feature (220)..(465): Homolog of NCBI NO: 15235905 NR Description: putative protein; protein id: At4g23030.1
MNCLVYVRAVVSVLFLGRLGSLELAGGALSIGFTNITGYSVMVGLASGLEPVCSQAYGSKNWDLLTLSLHRMVVILLMASLPISLLWINLGPIMLFMGQNPEITATAAEYCLYALPDLLTNTLLQPLRVYLRSQRVTKPMMWCTLAAVAFHVPLNYWLVMVKHWGVPGVAIASVVTNLIMVVLLVGYVWVSGMLQKRVSGDGDGGSTTMVAVVAQSSSVMELVGGLGPLMRVAVPSCLGICLEWWWYEIVIVMGGYLENPKLAVAATGILIQTTSLMYTVPMALAGCVSARVGNELGAGRPYKARLAANVALACAFVVGALNVAWTVILKERWAGLFTGYEPLKVLVASVMPIVGLCELGNCPQTTGCGILRGTGRPAVGAHVNLGSFYFVGTPVAVGLAFWLKIGFSGLWFGLLSAQAACVVSILYAVLARTDWEGEAVKAMRLTSLEMRKVGQDEESSLLLLDDEKLGDVL

SEQ ID NO: 70693 - DNA, 1032 bp, Arabidopsis thaliana
  misc_feature (1)..(1032): Ceres Seq. ID no. 2730036
  misc_feature: MA Experiment ID: 20000185 Result: Up-regulated in Transcription
  misc_feature: MA Experiment 20000185 PARAMETER Experiment Name: At_Roots__P Parameter: Age (day) Value: 7 vs. 21
  misc_feature: MA Experiment 20000185 PARAMETER Experiment Name: At_Roots__P Parameter: Organism Value: A. thaliana
  misc_feature: MA Experiment 20000185 PARAMETER Experiment Name: At_Roots__P Parameter: Tissue Value: Roots vs. Whole Plant
  misc_feature: MA Experiment ID: 20000227 Result: Down-regulated in Transcription
  misc_feature: MA Experiment 20000227 PARAMETER Experiment Name: At_Root-Tips-vs-Tops_P Parameter: Tissue Value: Root Tips vs. Root Tops
  misc_feature: MA Experiment ID: 20000439 Result: Up-regulated in Transcription
  misc_feature: MA Experiment 20000439 PARAMETER Experiment Name: At_Roots__P Parameter: Age (day) Value: 14 vs. 21
  misc_feature: MA Experiment 20000439 PARAMETER Experiment Name: At_Roots__P Parameter: Organism Value: A. thaliana
  misc_feature: MA Experiment 20000439 PARAMETER Experiment Name: At_Roots__P Parameter: Tissue Value: Roots vs. Whole Plant
atggattacactgtttcctctctacaatgcttcttcttagttttatgtctctctcttttggtttgctctaactctgaaactagttacaagtcaaacaagaaacctatattgataaacttcggcgactctaactccgacaccggaggagttcttgctggagttggacttcctatcggactccctcatggcattaccttcttccatagaggcactggtcgtctcggtgacggtcgactcatcgttgacttctactgtgaacatttaaagatgacatatttgagtccatatttggattcactttcaccaaatttcaaaagaggagtcaatttcgcagtctcgggcgccaccgctcttccgatcttttccttccctcttgccattcaaattcgtcaattcgtccatttcaaaaaccgttctcaagaacttatctcttccggtagaagagaccttattgatgataatggatttagaaacgcgttgtacatgatcgatattggacaaaacgatcttttacttgctctatatgattcgaatttaacctatgcacccgttgtcgaaaaaattccttccatgcttcttgagataaagaaagccatacagggtgaattggcgattcacctgcataacgattcggatcttgacccgattggttgtttccgggttcacaatgaagtcgccaaagccttcaacaaaggactccttagtctctgcaacgaactgagatcccaattcaaagacgccactctcgtctacgttgatatttactccatcaaatataaactctccgccgatttcaaactatacggatttgtggacccgttgatggcttgttgcggttatggaggaagacctaacaactatgatcgaaaagcaacgtgtggtcaacccggttcaactatttgtcgtgatgtaaccaaagcaattgtatgggatggggttcactatactgaagctgctaaccggtttgtcgttgatgctgttttgacgaatcggtactcttacccaaaaaattcccttgaccggttttggtag

SEQ ID NO: 70694 - protein, 343 aa, Arabidopsis thaliana
  peptide (1)..(343): Ceres Seq. ID no. 2730037
  misc_feature (37)..(327): Pfam Name: GDSL-like Lipase/Acylhydrolase Pfam Description: GDSL-like Lipase/Acylhydrolase
  misc_feature (1)..(343): Homolog of NCBI NO: 15228721 NR Description: putative protein; protein id: At3g62280.1
  misc_feature (11)..(218): Homolog of NCBI NO: 15223585 NR Description: nodule-specific protein, putative; protein id: [Arabidopsis thaliana] >gi|25404142|pir||D96608 hypothetical
  misc_feature (212)..(335): Homolog of NCBI NO: 15223585 NR Description: nodule-specific protein, putative; protein id: [Arabidopsis thaliana] >gi|25404142|pir||D96608 hypothetical
  misc_feature (11)..(246): Homolog of NCBI NO: 15217506 NR Description: putative lipase; protein id: At1g09390.1
  misc_feature (214)..(335): Homolog of NCBI NO: 15217506 NR Description: putative lipase; protein id: At1g09390.1
  misc_feature (41)..(218): Homolog of NCBI NO: 25336281 NR Description: lipase-like protein Lip-4 [imported] - thaliana (fragment) >gi|3220021|gb|AAC23651.1| lipase homolog
  misc_feature (212)..(316): Homolog of NCBI NO: 25336281 NR Description: lipase-like protein Lip-4 [imported] - thaliana (fragment) >gi|3220021|gb|AAC23651.1| lipase homolog
  misc_feature (30)..(200): Homolog of NCBI NO: 34894838 NR Description: putative lipase homolog [Oryza sativa (japonica group)] >gi|13365800|dbj|BAB39238.1| putative lipase homolog
  misc_feature (202)..(335): Homolog of NCBI NO: 34894838 NR Description: putative lipase homolog [Oryza sativa (japonica group)] >gi|13365800|dbj|BAB39238.1| putative lipase homolog
  misc_feature (202)..(342): Homolog of NCBI NO: 34894844 NR Description: putative lipase homolog [Oryza sativa (japonica group)] >gi|13365803|dbj|BAB39241.1| putative lipase homolog
MDYTVSSLQCFFLVLCLSLLVCSNSETSYKSNKKPILINFGDSNSDTGGVLAGVGLPIGLPHGITFFHRGTGRLGDGRLIVDFYCEHLKMTYLSPYLDSLSPNFKRGVNFAVSGATALPIFSFPLAIQIRQFVHFKNRSQELISSGRRDLIDDNGFRNALYMIDIGQNDLLLALYDSNLTYAPVVEKIPSMLLEIKKAIQGELAIHLHNDSDLDPIGCFRVHNEVAKAFNKGLLSLCNELRSQFKDATLVYVDIYSIKYKLSADFKLYGFVDPLMACCGYGGRPNNYDRKATCGQPGSTICRDVTKAIVWDGVHYTEAANRFVVDAVLTNRYSYPKNSLDRFW

SEQ ID NO: 70695 - protein, 254 aa, Arabidopsis thaliana
  peptide (1)..(254): Ceres Seq. ID no. 2730038
  misc_feature (1)..(238): Pfam Name: GDSL-like Lipase/Acylhydrolase Pfam Description: GDSL-like Lipase/Acylhydrolase
  misc_feature (1)..(129): Homolog of NCBI NO: 15223585 NR Description: nodule-specific protein, putative; protein id: [Arabidopsis thaliana] >gi|25404142|pir||D96608 hypothetical
  misc_feature (123)..(246): Homolog of NCBI NO: 15223585 NR Description: nodule-specific protein, putative; protein id: [Arabidopsis thaliana] >gi|25404142|pir||D96608 hypothetical
  misc_feature (1)..(157): Homolog of NCBI NO: 15217506 NR Description: putative lipase; protein id: At1g09390.1
  misc_feature (125)..(246): Homolog of NCBI NO: 15217506 NR Description: putative lipase; protein id: At1g09390.1
  misc_feature (1)..(129): Homolog of NCBI NO: 25336281 NR Description: lipase-like protein Lip-4 [imported] - thaliana (fragment) >gi|3220021|gb|AAC23651.1| lipase homolog
  misc_feature (1)..(254): Homolog of NCBI NO: 15228721 NR Description: putative protein; protein id: At3g62280.1
  misc_feature (123)..(227): Homolog of NCBI NO: 25336281 NR Description: lipase-like protein Lip-4 [imported] - thaliana (fragment) >gi|3220021|gb|AAC23651.1| lipase homolog
  misc_feature (1)..(111): Homolog of NCBI NO: 34894838 NR Description: putative lipase homolog [Oryza sativa (japonica group)] >gi|13365800|dbj|BAB39238.1| putative lipase homolog
  misc_feature (113)..(246): Homolog of NCBI NO: 34894838 NR Description: putative lipase homolog [Oryza sativa (japonica group)] >gi|13365800|dbj|BAB39238.1| putative lipase homolog
  misc_feature (113)..(253): Homolog of NCBI NO: 34894844 NR Description: putative lipase homolog [Oryza sativa (japonica group)] >gi|13365803|dbj|BAB39241.1| putative lipase homolog
MTYLSPYLDSLSPNFKRGVNFAVSGATALPIFSFPLAIQIRQFVHFKNRSQELISSGRRDLIDDNGFRNALYMIDIGQNDLLLALYDSNLTYAPVVEKIPSMLLEIKKAIQGELAIHLHNDSDLDPIGCFRVHNEVAKAFNKGLLSLCNELRSQFKDATLVYVDIYSIKYKLSADFKLYGFVDPLMACCGYGGRPNNYDRKATCGQPGSTICRDVTKAIVWDGVHYTEAANRFVVDAVLTNRYSYPKNSLDRFW

SEQ ID NO: 70696 - protein, 182 aa, Arabidopsis thaliana
  peptide (1)..(182): Ceres Seq. ID no. 2730039
  misc_feature (1)..(166): Pfam Name: GDSL-like Lipase/Acylhydrolase Pfam Description: GDSL-like Lipase/Acylhydrolase
  misc_feature (1)..(182): Homolog of NCBI NO: 15228721 NR Description: putative protein; protein id: At3g62280.1
  misc_feature (1)..(57): Homolog of NCBI NO: 15223585 NR Description: nodule-specific protein, putative; protein id: [Arabidopsis thaliana] >gi|25404142|pir||D96608 hypothetical
  misc_feature (51)..(174): Homolog of NCBI NO: 15223585 NR Description: nodule-specific protein, putative; protein id: [Arabidopsis thaliana] >gi|25404142|pir||D96608 hypothetical
  misc_feature (1)..(85): Homolog of NCBI NO: 15217506 NR Description: putative lipase; protein id: At1g09390.1
  misc_feature (53)..(174): Homolog of NCBI NO: 15217506 NR Description: putative lipase; protein id: At1g09390.1
  misc_feature (1)..(57): Homolog of NCBI NO: 25336281 NR Description: lipase-like protein Lip-4 [imported] - thaliana (fragment) >gi|3220021|gb|AAC23651.1| lipase homolog
  misc_feature (51)..(155): Homolog of NCBI NO: 25336281 NR Description: lipase-like protein Lip-4 [imported] - thaliana (fragment) >gi|3220021|gb|AAC23651.1| lipase homolog
  misc_feature (1)..(39): Homolog of NCBI NO: 34894838 NR Description: putative lipase homolog [Oryza sativa (japonica group)] >gi|13365800|dbj|BAB39238.1| putative lipase homolog
  misc_feature (41)..(174): Homolog of NCBI NO: 34894838 NR Description: putative lipase homolog [Oryza sativa (japonica group)] >gi|13365800|dbj|BAB39238.1| putative lipase homolog
  misc_feature (41)..(181): Homolog of NCBI NO: 34894844 NR Description: putative lipase homolog [Oryza sativa (japonica group)] >gi|13365803|dbj|BAB39241.1| putative lipase homolog
MIDIGQNDLLLALYDSNLTYAPVVEKIPSMLLEIKKAIQGELAIHLHNDSDLDPIGCFRVHNEVAKAFNKGLLSLCNELRSQFKDATLVYVDIYSIKYKLSADFKLYGFVDPLMACCGYGGRPNNYDRKATCGQPGSTICRDVTKAIVWDGVHYTEAANRFVVDAVLTNRYSYPKNSLDRFW

SEQ ID NO: 70697 - DNA, 1110 bp, Arabidopsis thaliana
  misc_feature (1)..(1110): Ceres Seq. ID no. 2730114
  misc_feature: MA Experiment ID: 20000227 Result: Up-regulated in Transcription
  misc_feature: MA Experiment 20000227 PARAMETER Experiment Name: At_Root-Tips-vs-Tops_P Parameter: Tissue Value: Root Tips vs. Root Tops
  misc_feature: MA Experiment ID: 20001451 Result: Up-regulated in Transcription
  misc_feature: MA Experiment 20001451 PARAMETER Experiment Name: At_Far-red-induction_P Parameter: Age (day) Value: 7
  misc_feature: MA Experiment 20001451 PARAMETER Experiment Name: At_Far-red-induction_P Parameter: Light Value: Far-red vs. White
  misc_feature: MA Experiment 20001451 PARAMETER Experiment Name: At_Far-red-induction_P Parameter: Organism Value: A. thaliana
  misc_feature: MA Experiment 20001451 PARAMETER Experiment Name: At_Far-red-induction_P Parameter: Plant Line Value: Columbia
  misc_feature: MA Experiment 20001451 PARAMETER Experiment Name: At_Far-red-induction_P Parameter: Timepoint (hr) Value: 24
  misc_feature: MA Experiment 20001451 PARAMETER Experiment Name: At_Far-red-induction_P Parameter: Tissue Value: Whole Plant
atggcgacaaacttcaaatccctattaccagttatcggtacggatgaaaccctaaattcattattttcagcaaatgtcgcactcatcatcaaagttttcatattaaatctcaaggaaactaaaatgcatgagacaatggtttttgtagacatcagtcctttagtggtcaaatgtgatgatgccaacatggcggaggatgccggcgtggcggaggttgtgggaaagctggacagggcctgtcgggacgcaggattcttctacgtaattggtcatggaatatcggaggattttataaggaaggtgagagtgatgtcgcatcaattcttcgagcttccttatgaagagaaacttaagatcaagattactccagctgctggatacagaggatatcagagaatcggactaaacttaacgaatgggaaacaagatatgcacgaagccattgattgttacaaagagtttaagcaagggaagcatggggacattggaaaggttatggaaggggcaaaccagtggccagagaatcctcaagaatacaaagagttgatggaggagtatattaagctctgcatagatctttctagaaatatcttaaggggaatctcattagcccttggtggatcaccttatgagtttgagggaaagatgcttacagatccgttttggataatgcgtattcttggttatccagtaactcgtctcatctttttcacttacagtggagctcacactgactatggcttgttgtcacttataaatcaagatgatgacaaaactgctcttcaggtgagagacttggccggcgattggataccagttattccgatccctggatcatttgtctgcaacatcggtgacatgctaaagattctttctaacggagtttacgaatccacacttcatagagtgatcaataactctccccgataccgtgtttgcgtcggattcttttacgagacgaacttcgacgcagcggtggagccgttggatatcttcaaagagaagtacccaggaaaaggaacatcccaagttttcaaaagagttgtctatggggagcatctggttcacaaactccagaccacttttcaaaatttagtggaacacagttaa

SEQ ID NO: 70698 - protein, 369 aa, Arabidopsis thaliana
  peptide (1)..(369): Ceres Seq. ID no. 2730115
  misc_feature (228)..(320): Pfam Name: 2OG-Fe(II) oxygenase superfamily Pfam Description: 2OG-Fe(II) oxygenase superfamily
  misc_feature (1)..(369): Homolog of NCBI NO: 15229181 NR Description: putative protein; protein id: At3g49630.1
  misc_feature (35)..(369): Homolog of NCBI NO: 19423910 NR Description: unknown protein [Arabidopsis thaliana]
  misc_feature (35)..(369): Homolog of NCBI NO: 22331716 NR Description: oxidoreductase (din11), putative; protein id: [Arabidopsis thaliana] >gi|24030245|gb|AAN41298.1| unknown
  misc_feature (40)..(369): Homolog of NCBI NO: 11255891 NR Description: hypothetical protein T9C5.210 - Arabidopsis >gi|6561962|emb|CAB62466.1| putative protein [Arabidopsis
  misc_feature (44)..(362): Homolog of NCBI NO: 21554579 NR Description: flavonol synthase-like protein [Arabidopsis
  misc_feature (44)..(362): Homolog of NCBI NO: 18409039 NR Description: flavonol synthase - like protein; protein id:
  misc_feature (44)..(362): Homolog of NCBI NO: 11255902 NR Description: flavonol synthase-like protein - Arabidopsis
  misc_feature (44)..(362): Homolog of NCBI NO: 6984228 NR Description: putative flavonol synthase-like protein
  misc_feature (35)..(160): Homolog of NCBI NO: 10834554 NR Description: 2-oxoacid-dependent oxidase [Arabidopsis thaliana]
  misc_feature (41)..(331): Homolog of NCBI NO: 23130050 NR Description: hypothetical protein [Nostoc punctiforme]
MATNFKSLLPVIGTDETLNSLFSANVALIIKVFILNLKETKMHETMVFVDISPLVVKCDDANMAEDAGVAEVVGKLDRACRDAGFFYVIGHGISEDFIRKVRVMSHQFFELPYEEKLKIKITPAAGYRGYQRIGLNLTNGKQDMHEAIDCYKEFKQGKHGDIGKVMEGANQWPENPQEYKELMEEYIKLCIDLSRNILRGISLALGGSPYEFEGKMLTDPFWIMRILGYPVTRLIFFTYSGAHTDYGLLSLINQDDDKTALQVRDLAGDWIPVIPIPGSFVCNIGDMLKILSNGVYESTLHRVINNSPRYRVCVGFFYETNFDAAVEPLDIFKEKYPGKGTSQVFKRVVYGEHLVHKLQTTFQNLVEHS

SEQ ID NO: 70699 - protein, 328 aa, Arabidopsis thaliana
  peptide (1)..(328): Ceres Seq. ID no. 2730116
  misc_feature (187)..(279): Pfam Name: 2OG-Fe(II) oxygenase superfamily Pfam Description: 2OG-Fe(II) oxygenase superfamily
  misc_feature (1)..(328): Homolog of NCBI NO: 15229181 NR Description: putative protein; protein id: At3g49630.1
  misc_feature (1)..(328): Homolog of NCBI NO: 19423910 NR Description: unknown protein [Arabidopsis thaliana]
  misc_feature (1)..(328): Homolog of NCBI NO: 22331716 NR Description: oxidoreductase (din11), putative; protein id: [Arabidopsis thaliana] >gi|24030245|gb|AAN41298.1| unknown
  misc_feature (1)..(328): Homolog of NCBI NO: 11255891 NR Description: hypothetical protein T9C5.210 - Arabidopsis >gi|6561962|emb|CAB62466.1| putative protein [Arabidopsis
  misc_feature (3)..(321): Homolog of NCBI NO: 21554579 NR Description: flavonol synthase-like protein [Arabidopsis
  misc_feature (3)..(321): Homolog of NCBI NO: 18409039 NR Description: flavonol synthase - like protein; protein id:
  misc_feature (3)..(321): Homolog of NCBI NO: 11255902 NR Description: flavonol synthase-like protein - Arabidopsis
  misc_feature (3)..(321): Homolog of NCBI NO: 6984228 NR Description: putative flavonol synthase-like protein
  misc_feature (1)..(119): Homolog of NCBI NO: 10834554 NR Description: 2-oxoacid-dependent oxidase [Arabidopsis thaliana]
  misc_feature (1)..(290): Homolog of NCBI NO: 23130050 NR Description: hypothetical protein [Nostoc punctiforme]
MHETMVFVDISPLVVKCDDANMAEDAGVAEVVGKLDRACRDAGFFYVIGHGISEDFIRKVRVMSHQFFELPYEEKLKIKITPAAGYRGYQRIGLNLTNGKQDMHEAIDCYKEFKQGKHGDIGKVMEGANQWPENPQEYKELMEEYIKLCIDLSRNILRGISLALGGSPYEFEGKMLTDPFWIMRILGYPVTRLIFFTYSGAHTDYGLLSLINQDDDKTALQVRDLAGDWIPVIPIPGSFVCNIGDMLKILSNGVYESTLHRVINNSPRYRVCVGFFYETNFDAAVEPLDIFKEKYPGKGTSQVFKRVVYGEHLVHKLQTTFQNLVEHS

SEQ ID NO: 70700 - protein, 324 aa, Arabidopsis thaliana
  peptide (1)..(324): Ceres Seq. ID no. 2730117
  misc_feature (183)..(275): Pfam Name: 2OG-Fe(II) oxygenase superfamily Pfam Description: 2OG-Fe(II) oxygenase superfamily
  misc_feature (1)..(324): Homolog of NCBI NO: 15229181 NR Description: putative protein; protein id: At3g49630.1
  misc_feature (1)..(324): Homolog of NCBI NO: 19423910 NR Description: unknown protein [Arabidopsis thaliana]
  misc_feature (1)..(324): Homolog of NCBI NO: 22331716 NR Description: oxidoreductase (din11), putative; protein id: [Arabidopsis thaliana] >gi|24030245|gb|AAN41298.1| unknown
  misc_feature (1)..(324): Homolog of NCBI NO: 11255891 NR Description: hypothetical protein T9C5.210 - Arabidopsis >gi|6561962|emb|CAB62466.1| putative protein [Arabidopsis
  misc_feature (1)..(317): Homolog of NCBI NO: 21554579 NR Description: flavonol synthase-like protein [Arabidopsis
  misc_feature (1)..(317): Homolog of NCBI NO: 18409039 NR Description: flavonol synthase - like protein; protein id:
  misc_feature (1)..(317): Homolog of NCBI NO: 11255902 NR Description: flavonol synthase-like protein - Arabidopsis
  misc_feature (1)..(317): Homolog of NCBI NO: 6984228 NR Description: putative flavonol synthase-like protein
  misc_feature (1)..(115): Homolog of NCBI NO: 10834554 NR Description: 2-oxoacid-dependent oxidase [Arabidopsis thaliana]
  misc_feature (1)..(286): Homolog of NCBI NO: 23130050 NR Description: hypothetical protein [Nostoc punctiforme]
MVFVDISPLVVKCDDANMAEDAGVAEVVGKLDRACRDAGFFYVIGHGISEDFIRKVRVMSHQFFELPYEEKLKIKITPAAGYRGYQRIGLNLTNGKQDMHEAIDCYKEFKQGKHGDIGKVMEGANQWPENPQEYKELMEEYIKLCIDLSRNILRGISLALGGSPYEFEGKMLTDPFWIMRILGYPVTRLIFFTYSGAHTDYGLLSLINQDDDKTALQVRDLAGDWIPVIPIPGSFVCNIGDMLKILSNGVYESTLHRVINNSPRYRVCVGFFYETNFDAAVEPLDIFKEKYPGKGTSQVFKRVVYGEHLVHKLQTTFQNLVEHS

SEQ ID NO: 70701 - DNA, 774 bp, Arabidopsis thaliana
  misc_feature (1)..(774): Ceres Seq. ID no. 2730195
  misc_feature: MA Experiment ID: 20000355 Result: Down-regulated in Transcription
  misc_feature: MA Experiment 20000355 PARAMETER Experiment Name: At_Siliques_Sub_P Parameter: Age (day) Value: 21
  misc_feature: MA Experiment 20000355 PARAMETER Experiment Name: At_Siliques_Sub_P Parameter: Organism Value: A. thaliana
  misc_feature: MA Experiment 20000355 PARAMETER Experiment Name: At_Siliques_Sub_P Parameter: Plant Line Value: WS
  misc_feature: MA Experiment 20000355 PARAMETER Experiment Name: At_Siliques_Sub_P Parameter: Tissue Value: Less Than 5mm Siliques vs. Whole Plant
  misc_feature: MA Experiment ID: 20000440 Result: Up-regulated in Transcription
  misc_feature: MA Experiment 20000440 PARAMETER Experiment Name: At_Closed-Flower__Sub_P Parameter: Tissue Value: Closed Flower vs. Whole Plant
atggcgaattactcaagtattcacattctcttcttggtcttcatcacaatttttattgttgttgtttgttttgaaattgcaggcggcattgctgtttccgccgccaccgtcttcactttacagaacagttgtccttacaccgtttggcctggaattctctccggcaacgacaacaccctcggcgacggcggatttcccttaacaccaggcgcttccgtacagctcacggctcctgcaggatggtcaggacggttctgggctcgtaccggctgcaacttcgacgcctccggccacggtaactgcggcaccggagactgcggcggtgttcttaaatgtaacggcggcggagttccaccagtcactctggctgaattcacacttgtaggcgacggcggcaaggatttctacgacgtgagtctcgtcgacggttacaatgtcgagatggggattaaacctcaaggaggttccggtgattgccattacgccggctgcgtcgccgacgtcaacgcggtttgccctaacgagcttcggctcatggatccacatacaggaatcatcgcggcgtgtaaaagcgcttgtgcggcgtttaattctgaggagttctgttgtaccggtgctcacgcgacgccgcaaacttgttctccgacgcattactcggcgatgtttaaaagcgcttgccctggtgcttacagttacgcctacgacgacgccacgagcaccttcacttgtaccggctctaactacttgatctctttctgccccacccggaactaa

SEQ ID NO: 70702 - protein, 257 aa, Arabidopsis thaliana
  peptide (1)..(257): Ceres Seq. ID no. 2730196
  misc_feature (42)..(254): Pfam Name: Thaumatin family Pfam Description: Thaumatin family
  misc_feature (1)..(257): Homolog of NCBI NO: 15222090 NR Description: thaumatin-like protein; protein id: At1g75050.1
  misc_feature (1)..(257): Homolog of NCBI NO: 15222088 NR Description: thaumatin-like protein (PR-5); protein id: supported by cDNA: gi_2435405 [Arabidopsis thaliana]
  misc_feature (1)..(257): Homolog of NCBI NO: 2435406 NR Description: thaumatin-like protein [Arabidopsis thaliana]
  misc_feature (1)..(254): Homolog of NCBI NO: 15222089 NR Description: thaumatin-like protein; protein id: At1g75040.1, by cDNA: gi_14334527, supported by cDNA: gi_1448918, supported by
  misc_feature (30)..(254): Homolog of NCBI NO: 6273385 NR Description: SCUTL2 [Vitis vinifera]
  misc_feature (1)..(253): Homolog of NCBI NO: 30686314 NR Description: thaumatin family [Arabidopsis thaliana]
  misc_feature (1)..(253): Homolog of NCBI NO: 28973703 NR Description: putative pathogenesis-related protein 5 precursor
  misc_feature (15)..(256): Homolog of NCBI NO: 20330768 NR Description: Putative thaumatin-like protein [Oryza sativa
  misc_feature (1)..(183): Homolog of NCBI NO: 5882717 NR Description: Identical to gb|U83490 thaumatin-like protein Arabidopsis thaliana. (This gene is cut off.) EST gb|T20787 comes
  misc_feature (33)..(255): Homolog of NCBI NO: 7442168 NR Description: pathogenesis-related protein F20M13.220 -
MANYSSIHILFLVFITIFIVVVCFEIAGGIAVSAATVFTLQNSCPYTVWPGILSGNDNTLGDGGFPLTPGASVQLTAPAGWSGRFWARTGCNFDASGHGNCGTGDCGGVLKCNGGGVPPVTLAEFTLVGDGGKDFYDVSLVDGYNVEMGIKPQGGSGDCHYAGCVADVNAVCPNELRLMDPHTGIIAACKSACAAFNSEEFCCTGAHATPQTCSPTHYSAMFKSACPGAYSYAYDDATSTFTCTGSNYLISFCPTRN

SEQ ID NO: 70703 - DNA, 996 bp, Arabidopsis thaliana
  misc_feature (1)..(996): Ceres Seq. ID no. 2730248
  misc_feature: MA Experiment ID: 20000171 Result: Down-regulated in Transcription
  misc_feature: MA Experiment 20000171 PARAMETER Experiment Name: At_42deg_Heat_P Parameter: Age (day) Value: 14
  misc_feature: MA Experiment 20000171 PARAMETER Experiment Name: At_42deg_Heat_P Parameter: Organism Value: A. thaliana
  misc_feature: MA Experiment 20000171 PARAMETER Experiment Name: At_42deg_Heat_P Parameter: Plant Line Value: WS
  misc_feature: MA Experiment 20000171 PARAMETER Experiment Name: At_42deg_Heat_P Parameter: Temperature (deg C) Value: 42 vs. 22
  misc_feature: MA Experiment 20000171 PARAMETER Experiment Name: At_42deg_Heat_P Parameter: Timepoint (hr) Value: 1
  misc_feature: MA Experiment 20000171 PARAMETER Experiment Name: At_42deg_Heat_P Parameter: Tissue Value: Aerial
  misc_feature: MA Experiment ID: 20000173 Result: Down-regulated in Transcription
  misc_feature: MA Experiment 20000173 PARAMETER Experiment Name: At_42deg_Heat_P Parameter: Age (day) Value: 14
  misc_feature: MA Experiment 20000173 PARAMETER Experiment Name: At_42deg_Heat_P Parameter: Organism Value: A. thaliana
  misc_feature: MA Experiment 20000173 PARAMETER Experiment Name: At_42deg_Heat_P Parameter: Plant Line Value: WS
  misc_feature: MA Experiment 20000173 PARAMETER Experiment Name: At_42deg_Heat_P Parameter: Temperature (deg C) Value: 42 vs. 22
  misc_feature: MA Experiment 20000173 PARAMETER Experiment Name: At_42deg_Heat_P Parameter: Timepoint (hr) Value: 6
  misc_feature: MA Experiment 20000173 PARAMETER Experiment Name: At_42deg_Heat_P Parameter: Tissue Value: Aerial
  misc_feature: MA Experiment ID: 20000180 Result: Up-regulated in Transcription
  misc_feature: MA Experiment 20000180 PARAMETER Experiment Name: At_Germinating_Seeds_P Parameter: Age (hr) Value: 24 vs. 0
  misc_feature: MA Experiment 20000180 PARAMETER Experiment Name: At_Germinating_Seeds_P Parameter: Tissue Value: Germinating Seeds
  misc_feature: MA Experiment ID: 20000182 Result: Up-regulated in Transcription
  misc_feature: MA Experiment 20000182 PARAMETER Experiment Name: At_2mM_SA_P Parameter: Age (day) Value: 14
  misc_feature: MA Experiment 20000182 PARAMETER Experiment Name: At_2mM_SA_P Parameter: Organism Value: A. thaliana
  misc_feature: MA Experiment 20000182 PARAMETER Experiment Name: At_2mM_SA_P Parameter: Plant Line Value: WS
  misc_feature: MA Experiment 20000182 PARAMETER Experiment Name: At_2mM_SA_P Parameter: Timepoint (hr) Value: 6
  misc_feature: MA Experiment 20000182 PARAMETER Experiment Name: At_2mM_SA_P Parameter: Tissue Value: Aerial
  misc_feature: MA Experiment 20000182 PARAMETER Experiment Name: At_2mM_SA_P Parameter: Treatment Value: 2mM SA vs. No Treatment
  misc_feature: MA Experiment ID: 20000439 Result: Up-regulated in Transcription
  misc_feature: MA Experiment 20000439 PARAMETER Experiment Name: At_Roots__P Parameter: Age (day) Value: 14 vs. 21
  misc_feature: MA Experiment 20000439 PARAMETER Experiment Name: At_Roots__P Parameter: Organism Value: A. thaliana
  misc_feature: MA Experiment 20000439 PARAMETER Experiment Name: At_Roots__P Parameter: Tissue Value: Roots vs. Whole Plant
  misc_feature: MA Experiment ID: 20000527 Result: Down-regulated in Transcription
  misc_feature: MA Experiment 20000527 PARAMETER Experiment Name: At_10percent_PEG_P Parameter: Age (day) Value: 20
  misc_feature: MA Experiment 20000527 PARAMETER Experiment Name: At_10percent_PEG_P Parameter: Organism Value: A. thaliana
  misc_feature: MA Experiment 20000527 PARAMETER Experiment Name: At_10percent_PEG_P Parameter: Plant Line Value: WS
  misc_feature: MA Experiment 20000527 PARAMETER Experiment Name: At_10percent_PEG_P Parameter: Timepoint (day) Value: 20
  misc_feature: MA Experiment 20000527 PARAMETER Experiment Name: At_10percent_PEG_P Parameter: Tissue Value: Whole Plant
  misc_feature: MA Experiment 20000527 PARAMETER Experiment Name: At_10percent_PEG_P Parameter: Treatment Value: 10percent PEG vs. No Treatment
  misc_feature: MA Experiment ID: 20000794 Result: Down-regulated in Transcription
  misc_feature: MA Experiment 20000794 PARAMETER Experiment Name: At_Petals_P Parameter: Age (day) Value: 23-25 days
  misc_feature: MA Experiment 20000794 PARAMETER Experiment Name: At_Petals_P Parameter: Plant Line Value: WS
  misc_feature: MA Experiment 20000794 PARAMETER Experiment Name: At_Petals_P Parameter: Tissue Value: Petals vs. Whole plant
  misc_feature: MA Experiment ID: 20001247 Result: Up-regulated in Transcription
  misc_feature: MA Experiment 20001247 PARAMETER Experiment Name: At_Far-red-induction_P Parameter: Age (day) Value: 7
  misc_feature: MA Experiment 20001247 PARAMETER Experiment Name: At_Far-red-induction_P Parameter: Light Value: Far-red vs. White
  misc_feature: MA Experiment 20001247 PARAMETER Experiment Name: At_Far-red-induction_P Parameter: Organism Value: A. thaliana
  misc_feature: MA Experiment 20001247 PARAMETER Experiment Name: At_Far-red-induction_P Parameter: Plant Line Value: Columbia
  misc_feature: MA Experiment 20001247 PARAMETER Experiment Name: At_Far-red-induction_P Parameter: Timepoint (hr) Value: 1
  misc_feature: MA Experiment 20001247 PARAMETER Experiment Name: At_Far-red-induction_P Parameter: Tissue Value: Whole Plant
  misc_feature: MA Experiment ID: 20001557 Result: Down-regulated in Transcription
  misc_feature: MA Experiment 20001557 PARAMETER Experiment Name: At_Drought_Soil_Dry_P Parameter: Age (day) Value: 27
  misc_feature: MA Experiment 20001557 PARAMETER Experiment Name: At_Drought_Soil_Dry_P Parameter: Organism Value: A. thaliana
  misc_feature: MA Experiment 20001557 PARAMETER Experiment Name: At_Drought_Soil_Dry_P Parameter: Plant Line Value: WS
  misc_feature: MA Experiment 20001557 PARAMETER Experiment Name: At_Drought_Soil_Dry_P Parameter: Post Timepoint (hr) Value: 3
  misc_feature: MA Experiment 20001557 PARAMETER Experiment Name: At_Drought_Soil_Dry_P Parameter: Post-Treatment Value: Re-Water vs. No Drought
  misc_feature: MA Experiment 20001557 PARAMETER Experiment Name: At_Drought_Soil_Dry_P Parameter: Timepoint (day) Value: 13
  misc_feature: MA Experiment 20001557 PARAMETER Experiment Name: At_Drought_Soil_Dry_P Parameter: Treatment Value: Drought vs. No Drought
  misc_feature: MA Experiment ID: 20001905 Result: Down-regulated in Transcription
  misc_feature: MA Experiment 20001905 PARAMETER Experiment Name: At_Drought_Reproduction_P Parameter: Age (day) Value: 40
  misc_feature: MA Experiment 20001905 PARAMETER Experiment Name: At_Drought_Reproduction_P Parameter: Organism Value: A. thaliana
  misc_feature: MA Experiment 20001905 PARAMETER Experiment Name: At_Drought_Reproduction_P Parameter: Plant Line Value: WS
  misc_feature: MA Experiment 20001905 PARAMETER Experiment Name: At_Drought_Reproduction_P Parameter: Timepoint (day) Value: 10
  misc_feature: MA Experiment 20001905 PARAMETER Experiment Name: At_Drought_Reproduction_P Parameter: Tissue Value: Rosettes
  misc_feature: MA Experiment 20001905 PARAMETER Experiment Name: At_Drought_Reproduction_P Parameter: Treatment Value: Drought vs. No Drought
  misc_feature: MA Experiment ID: 20001911 Result: Down-regulated in Transcription
  misc_feature: MA Experiment 20001911 PARAMETER Experiment Name: At_Drought_Reproduction_P Parameter: Age (day) Value: 40
  misc_feature: MA Experiment 20001911 PARAMETER Experiment Name: At_Drought_Reproduction_P Parameter: Organism Value: A. thaliana
  misc_feature: MA Experiment 20001911 PARAMETER Experiment Name: At_Drought_Reproduction_P Parameter: Plant Line Value: WS
  misc_feature: MA Experiment 20001911 PARAMETER Experiment Name: At_Drought_Reproduction_P Parameter: Timepoint (day) Value: 10
  misc_feature: MA Experiment 20001911 PARAMETER Experiment Name: At_Drought_Reproduction_P Parameter: Tissue Value: Flowers
  misc_feature: MA Experiment 20001911 PARAMETER Experiment Name: At_Drought_Reproduction_P Parameter: Treatment Value: Drought vs. No Drought
atggtgtcaatgaaaagcttcgttcatattctccgtcgatacatctccattgcaatcactctcttctataacctcatttggtgtttattcgacaatttcgattacccgatcctaatcaagctcgctgatacattcttatcattatatttcctaatcttctgcgatctccgtccaatcaccgtcgatttaaacgatggagaaaccacattacatttctggatctccggccaccgtaaaatcaaccgccctaacctcgtcatgttacacggctacggaggaaattcgaaatggcagttcattcatcaagtctcagatctatcgaaatcgtttaatctctttatccctgatcttgtgttcttcgggaaatcgtactcgagaaacaccgatcggactatcgagtttcaggcgaggagtatcgtcggaggtttgaagaggttaggttgtggtgacggagatttatcggtttattcaattagttacggtggatttgttgcgtaccggatagcgaagatttggccggagatgattgagaaattggtgattgtgagtagtggagttgggtttacacaacagcaaaagatgacggagatgaaaaaacacggcggagatgtatcggagattcttgttccgagtaatccgagagatctacggttgttagttaaggtttcgatgaatacaggtatcagatttcttgactgggttccagatttcatcctctcccaattcatcgctacaaatcggcaagagcttgttgatttagctaagaatttgctggaaagagaagaggagccagagttattttcaatatcacagagaacgttaatcgtttggggtgataaggataatgtgtttccgttggagcatggacgtcgtctacaaaggcatttgccgaattcgagtttagaggtattgaaggaaattggacatggtgtgaacattgaagcaccaactactcttaacaatttgattatctcgtttgttttaggtgttccttaa

SEQ ID NO: 70704 - protein, 331 aa, Arabidopsis thaliana
  peptide (1)..(331): Ceres Seq. ID no. 2730249
  misc_feature (110)..(325): Pfam Name: alpha/beta hydrolase fold Pfam Description: alpha/beta hydrolase fold
  misc_feature (1)..(331): Homolog of NCBI NO: 15218538 NR Description: unknown protein; protein id: At1g72620.1
  misc_feature (1)..(328): Homolog of NCBI NO: 21592821 NR Description: unknown [Arabidopsis thaliana]
  misc_feature (1)..(328): Homolog of NCBI NO: 18394481 NR Description: expressed protein; protein id: At1g17430.1, by cDNA: 32887. [Arabidopsis thaliana] >gi|25402829|pir||H86310
  misc_feature (8)..(294): Homolog of NCBI NO: 9665130 NR Description: Unknown protein [Arabidopsis thaliana]
  misc_feature (38)..(243): Homolog of NCBI NO: 27436747 NR Description: Hypothetical protein [Oryza sativa (japonica
  misc_feature (247)..(328): Homolog of NCBI NO: 27436747 NR Description: Hypothetical protein [Oryza sativa (japonica
  misc_feature (56)..(328): Homolog of NCBI NO: 15242419 NR Description: putative hydrolase; protein id: At5g09430.1 thaliana] >gi|9955530|emb|CAC05469.1| putative hydrolase
  misc_feature (65)..(329): Homolog of NCBI NO: 30689631 NR Description: hydrolase, alpha/beta fold family [Arabidopsis
  misc_feature (56)..(328): Homolog of NCBI NO: 18411865 NR Description: hypothetical protein; protein id: At1g78210.1, by cDNA: gi_19699018 [Arabidopsis thaliana] unknown protein [Arabidopsis thaliana]
  misc_feature (56)..(330): Homolog of NCBI NO: 33146617 NR Description: hydrolase-like protein [Oryza sativa (japonica
MVSMKSFVHILRRYISIAITLFYNLIWCLFDNFDYPILIKLADTFLSLYFLIFCDLRPITVDLNDGETTLHFWISGHRKINRPNLVMLHGYGGNSKWQFIHQVSDLSKSFNLFIPDLVFFGKSYSRNTDRTIEFQARSIVGGLKRLGCGDGDLSVYSISYGGFVAYRIAKIWPEMIEKLVIVSSGVGFTQQQKMTEMKKHGGDVSEILVPSNPRDLRLLVKVSMNTGIRFLDWVPDFILSQFIATNRQELVDLAKNLLEREEEPELFSISQRTLIVWGDKDNVFPLEHGRRLQRHLPNSSLEVLKEIGHGVNIEAPTTLNNLIISFVLGVP

SEQ ID NO: 70705 - protein, 328 aa, Arabidopsis thaliana
  peptide (1)..(328): Ceres Seq. ID no. 2730250
  misc_feature (107)..(322): Pfam Name: alpha/beta hydrolase fold Pfam Description: alpha/beta hydrolase fold
  misc_feature (1)..(328): Homolog of NCBI NO: 15218538 NR Description: unknown protein; protein id: At1g72620.1
  misc_feature (1)..(325): Homolog of NCBI NO: 21592821 NR Description: unknown [Arabidopsis thaliana]
  misc_feature (1)..(325): Homolog of NCBI NO: 18394481 NR Description: expressed protein; protein id: At1g17430.1, by cDNA: 32887. [Arabidopsis thaliana] >gi|25402829|pir||H86310
  misc_feature (5)..(291): Homolog of NCBI NO: 9665130 NR Description: Unknown protein [Arabidopsis thaliana]
  misc_feature (35)..(240): Homolog of NCBI NO: 27436747 NR Description: Hypothetical protein [Oryza sativa (japonica
  misc_feature (244)..(325): Homolog of NCBI NO: 27436747 NR Description: Hypothetical protein [Oryza sativa (japonica
  misc_feature (53)..(325): Homolog of NCBI NO: 15242419 NR Description: putative hydrolase; protein id: At5g09430.1 thaliana] >gi|9955530|emb|CAC05469.1| putative hydrolase
  misc_feature (62)..(326): Homolog of NCBI NO: 30689631 NR Description: hydrolase, alpha/beta fold family [Arabidopsis
  misc_feature (53)..(325): Homolog of NCBI NO: 18411865 NR Description: hypothetical protein; protein id: At1g78210.1, by cDNA: gi_19699018 [Arabidopsis thaliana] unknown protein [Arabidopsis thaliana]
  misc_feature (53)..(327): Homolog of NCBI NO: 33146617 NR Description: hydrolase-like protein [Oryza sativa (japonica
MKSFVHILRRYISIAITLFYNLIWCLFDNFDYPILIKLADTFLSLYFLIFCDLRPITVDLNDGETTLHFWISGHRKINRPNLVMLHGYGGNSKWQFIHQVSDLSKSFNLFIPDLVFFGKSYSRNTDRTIEFQARSIVGGLKRLGCGDGDLSVYSISYGGFVAYRIAKIWPEMIEKLVIVSSGVGFTQQQKMTEMKKHGGDVSEILVPSNPRDLRLLVKVSMNTGIRFLDWVPDFILSQFIATNRQELVDLAKNLLEREEEPELFSISQRTLIVWGDKDNVFPLEHGRRLQRHLPNSSLEVLKEIGHGVNIEAPTTLNNLIISFVLGVP

SEQ ID NO: 70706 - protein, 245 aa, Arabidopsis thaliana
  peptide (1)..(245): Ceres Seq. ID no. 2730251
  misc_feature (24)..(239): Pfam Name: alpha/beta hydrolase fold Pfam Description: alpha/beta hydrolase fold
  misc_feature (1)..(245): Homolog of NCBI NO: 15218538 NR Description: unknown protein; protein id: At1g72620.1
  misc_feature (1)..(242): Homolog of NCBI NO: 21592821 NR Description: unknown [Arabidopsis thaliana]
  misc_feature (1)..(242): Homolog of NCBI NO: 18394481 NR Description: expressed protein; protein id: At1g17430.1, by cDNA: 32887. [Arabidopsis thaliana] >gi|25402829|pir||H86310
  misc_feature (1)..(208): Homolog of NCBI NO: 9665130 NR Description: Unknown protein [Arabidopsis thaliana]
  misc_feature (1)..(157): Homolog of NCBI NO: 27436747 NR Description: Hypothetical protein [Oryza sativa (japonica
  misc_feature (161)..(242): Homolog of NCBI NO: 27436747 NR Description: Hypothetical protein [Oryza sativa (japonica
  misc_feature (1)..(242): Homolog of NCBI NO: 15242419 NR Description: putative hydrolase; protein id: At5g09430.1 thaliana] >gi|9955530|emb|CAC05469.1| putative hydrolase
  misc_feature (1)..(243): Homolog of NCBI NO: 30689631 NR Description: hydrolase, alpha/beta fold family [Arabidopsis
  misc_feature (1)..(242): Homolog of NCBI NO: 18411865 NR Description: hypothetical protein; protein id: At1g78210.1, by cDNA: gi_19699018 [Arabidopsis thaliana] unknown protein [Arabidopsis thaliana]
  misc_feature (1)..(244): Homolog of NCBI NO: 33146617 NR Description: hydrolase-like protein [Oryza sativa (japonica
MLHGYGGNSKWQFIHQVSDLSKSFNLFIPDLVFFGKSYSRNTDRTIEFQARSIVGGLKRLGCGDGDLSVYSISYGGFVAYRIAKIWPEMIEKLVIVSSGVGFTQQQKMTEMKKHGGDVSEILVPSNPRDLRLLVKVSMNTGIRFLDWVPDFILSQFIATNRQELVDLAKNLLEREEEPELFSISQRTLIVWGDKDNVFPLEHGRRLQRHLPNSSLEVLKEIGHGVNIEAPTTLNNLIISFVLGVP

SEQ ID NO: 70707 - DNA, 1380 bp, Arabidopsis thaliana
  misc_feature (1)..(1380): Ceres Seq. ID no. 2730313
  misc_feature: MA Experiment ID: 20000180 Result: Up-regulated in Transcription
  misc_feature: MA Experiment 20000180 PARAMETER Experiment Name: At_Germinating_Seeds_P Parameter: Age (hr) Value: 24 vs. 0
  misc_feature: MA Experiment 20000180 PARAMETER Experiment Name: At_Germinating_Seeds_P Parameter: Tissue Value: Germinating Seeds
  misc_feature: MA Experiment ID: 20000184 Result: Up-regulated in Transcription
  misc_feature: MA Experiment 20000184 PARAMETER Experiment Name: At_Shoots__P Parameter: Age (day) Value: 7
  misc_feature: MA Experiment 20000184 PARAMETER Experiment Name: At_Shoots__P Parameter: Tissue Value: Shoots vs. Whole Plant
  misc_feature: MA Experiment ID: 20000437 Result: Down-regulated in Transcription
  misc_feature: MA Experiment 20000437 PARAMETER Experiment Name: At_Drought_P Parameter: Age (day) Value: 8
  misc_feature: MA Experiment 20000437 PARAMETER Experiment Name: At_Drought_P Parameter: Organism Value: A. thaliana
  misc_feature: MA Experiment 20000437 PARAMETER Experiment Name: At_Drought_P Parameter: Plant Line Value: WS
  misc_feature: MA Experiment 20000437 PARAMETER Experiment Name: At_Drought_P Parameter: Timepoint (hr) Value: 24
  misc_feature: MA Experiment 20000437 PARAMETER Experiment Name: At_Drought_P Parameter: Tissue Value: Whole Plant
  misc_feature: MA Experiment 20000437 PARAMETER Experiment Name: At_Drought_P Parameter: Treatment Value: Drought vs. No Drought
  misc_feature: MA Experiment ID: 20000438 Result: Up-regulated in Transcription
  misc_feature: MA Experiment 20000438 PARAMETER Experiment Name: At_Shoots__P Parameter: Age (day) Value: 14
  misc_feature: MA Experiment 20000438 PARAMETER Experiment Name: At_Shoots__P Parameter: Tissue Value: Shoots vs. Whole Plant
  misc_feature: MA Experiment ID: 20000794 Result: Down-regulated in Transcription
  misc_feature: MA Experiment 20000794 PARAMETER Experiment Name: At_Petals_P Parameter: Age (day) Value: 23-25 days
  misc_feature: MA Experiment 20000794 PARAMETER Experiment Name: At_Petals_P Parameter: Plant Line Value: WS
  misc_feature: MA Experiment 20000794 PARAMETER Experiment Name: At_Petals_P Parameter: Tissue Value: Petals vs. Whole plant
  misc_feature: MA Experiment ID: 20001911 Result: Down-regulated in Transcription
  misc_feature: MA Experiment 20001911 PARAMETER Experiment Name: At_Drought_Reproduction_P Parameter: Age (day) Value: 40
  misc_feature: MA Experiment 20001911 PARAMETER Experiment Name: At_Drought_Reproduction_P Parameter: Organism Value: A. thaliana
  misc_feature: MA Experiment 20001911 PARAMETER Experiment Name: At_Drought_Reproduction_P Parameter: Plant Line Value: WS
  misc_feature: MA Experiment 20001911 PARAMETER Experiment Name: At_Drought_Reproduction_P Parameter: Timepoint (day) Value: 10
  misc_feature: MA Experiment 20001911 PARAMETER Experiment Name: At_Drought_Reproduction_P Parameter: Tissue Value: Flowers
  misc_feature: MA Experiment 20001911 PARAMETER Experiment Name: At_Drought_Reproduction_P Parameter: Treatment Value: Drought vs. No Drought
  misc_feature: Pfam Name: Peptidase_S10 Pfam Description: Serine carboxypeptidase
atggattactctttccttctaatcattctcttactcacaatctctacttcatgttgtgctgctccttcttcttatgtggaagaacaattgagagacagaatcagtaacttacctggacaacctagtaatgtcgattttagacagtactcaggctatgtcactgtgcatgaagaacgtggaagagctttgttctactggttggtcgagtctccgttggcccgtgacccaaagtctagacctttggttctgtggctcaatggtggccctggttgttcttctgttgcttatggtgctgctgaagaaattggaccttttcgtgttggttctgatggcaagactcttcattccaaactttatgcttggaataaattggcaaacttgctattcttggagtctccagctggagttggtttctcatattcaaacacaacttcagatctttacacaaccggtgatcagagaacagctgaggattcgtacatatttcttgtcaactggtttgagaggtttccacaatacaagcatagggagttttacattgttggagaaagctatgcaggtcattttgttcctcaactgtctaaacttgtccatgaaaggaacaagggcttcaagaacccggctataaacctcaaaggttttatggtgggaaatgctgttacagatgactatcatgattatataggaacatttgaatactggtggaatcacggtctcatatccgattccacgtatcaccaactaaagaccgcgtgctactcagtatcatctcagcatccttcaatgcagtgtatggtggctctgagaaatgccgaattagagcaaggaaatatcgatccatatagcattttcaccaaaccttgcaacagtactgtggcacttaagagattcttaaagggtcgctacccatggatgtcaagagcttatgatccttgtacagagagatattcgaatgtgtattttaaccgcttggacgttcagaaggctctccacgcaaatgtcactcgcttatcttacccctggaaagcatgcagtgacattgtaggaagctattgggacgattctcctctgtctatgcttcctatatacaaagaattgattactgcaggtctcaaaatatgggtcttcagtggggatacagatgctgttgttcctataaccgctacccgatactctgtagatgcactgaagctagcaaccatcacgaactggtacccgtggtacgaccatggcaaggtaggtgggtggagtcaagtttacaaaggacttacattagtgacagtagcaggagctggtcatgaagtgcctctacaccgtccccggcaagcctttattcttttcagatcctttttagagagcaaaccaatgcctatgacttga

SEQ ID NO: 70708 - protein, 459 aa, Arabidopsis thaliana
  peptide (1)..(459): Ceres Seq. ID no. 2730314
  misc_feature: Pfam Name: Peptidase_S10 Pfam Description: Serine carboxypeptidase
  misc_feature (1)..(459): Homolog of NCBI NO: 15231911 NR Description: putative serine carboxypeptidase II; protein id: [Arabidopsis thaliana] >gi|6648211|gb|AAF21209.1|AC013483_33
  misc_feature (9)..(457): Homolog of NCBI NO: 34908012 NR Description: putative carboxypeptidase D [Oryza sativa
  misc_feature (28)..(458): Homolog of NCBI NO: 15227493 NR Description: putative serine carboxypeptidase II; protein id:
  misc_feature (32)..(457): Homolog of NCBI NO: 7428204 NR Description: carboxypeptidase D (EC 3.4.16.6) precursor -
  misc_feature (32)..(457): Homolog of NCBI NO: 20455471 NR Description: Serine carboxypeptidase II precursor
  misc_feature (65)..(457): Homolog of NCBI NO: 7428205 NR Description: carboxypeptidase D (EC 3.4.16.6) - wheat
  misc_feature (5)..(457): Homolog of NCBI NO: 13877871 NR Description: putative serine carboxypeptidase II [Arabidopsis
  misc_feature (5)..(457): Homolog of NCBI NO: 15234795 NR Description: SERINE CARBOXYPEPTIDASE II-like protein; protein At4g30610.1, supported by cDNA: gi_13877870 [Arabidopsis
  misc_feature (9)..(457): Homolog of NCBI NO: 15232847 NR Description: putative serine carboxypeptidase II; protein id: supported by cDNA: 42069., supported by cDNA: gi_14335061 thaliana] >gi|6513922|gb|AAF14826.1|AC011664_8 putative serine
  misc_feature (23)..(291): Homolog of NCBI NO: 10177810 NR Description: serine carboxypeptidase II-like protein
MDYSFLLIILLLTISTSCCAAPSSYVEEQLRDRISNLPGQPSNVDFRQYSGYVTVHEERGRALFYWLVESPLARDPKSRPLVLWLNGGPGCSSVAYGAAEEIGPFRVGSDGKTLHSKLYAWNKLANLLFLESPAGVGFSYSNTTSDLYTTGDQRTAEDSYIFLVNWFERFPQYKHREFYIVGESYAGHFVPQLSKLVHERNKGFKNPAINLKGFMVGNAVTDDYHDYIGTFEYWWNHGLISDSTYHQLKTACYSVSSQHPSMQCMVALRNAELEQGNIDPYSIFTKPCNSTVALKRFLKGRYPWMSRAYDPCTERYSNVYFNRLDVQKALHANVTRLSYPWKACSDIVGSYWDDSPLSMLPIYKELITAGLKIWVFSGDTDAVVPITATRYSVDALKLATITNWYPWYDHGKVGGWSQVYKGLTLVTVAGAGHEVPLHRPRQAFILFRSFLESKPMPMT

SEQ ID NO: 70709 - protein, 245 aa, Arabidopsis thaliana
  peptide (1)..(245): Ceres Seq. ID no. 2730315
  misc_feature: Pfam Name: Peptidase_S10 Pfam Description: Serine carboxypeptidase
  misc_feature (1)..(245): Homolog of NCBI NO: 15231911 NR Description: putative serine carboxypeptidase II; protein id: [Arabidopsis thaliana] >gi|6648211|gb|AAF21209.1|AC013483_33
  misc_feature (1)..(243): Homolog of NCBI NO: 34908012 NR Description: putative carboxypeptidase D [Oryza sativa
  misc_feature (1)..(244): Homolog of NCBI NO: 15227493 NR Description: putative serine carboxypeptidase II; protein id:
  misc_feature (1)..(243): Homolog of NCBI NO: 7428204 NR Description: carboxypeptidase D (EC 3.4.16.6) precursor -
  misc_feature (1)..(243): Homolog of NCBI NO: 20455471 NR Description: Serine carboxypeptidase II precursor
  misc_feature (1)..(243): Homolog of NCBI NO: 7428205 NR Description: carboxypeptidase D (EC 3.4.16.6) - wheat
  misc_feature (1)..(243): Homolog of NCBI NO: 13877871 NR Description: putative serine carboxypeptidase II [Arabidopsis
  misc_feature (1)..(243): Homolog of NCBI NO: 15234795 NR Description: SERINE CARBOXYPEPTIDASE II-like protein; protein At4g30610.1, supported by cDNA: gi_13877870 [Arabidopsis
  misc_feature (1)..(243): Homolog of NCBI NO: 15232847 NR Description: putative serine carboxypeptidase II; protein id: supported by cDNA: 42069., supported by cDNA: gi_14335061 thaliana] >gi|6513922|gb|AAF14826.1|AC011664_8 putative serine
  misc_feature (1)..(77): Homolog of NCBI NO: 10177810 NR Description: serine carboxypeptidase II-like protein
MVGNAVTDDYHDYIGTFEYWWNHGLISDSTYHQLKTACYSVSSQHPSMQCMVALRNAELEQGNIDPYSIFTKPCNSTVALKRFLKGRYPWMSRAYDPCTERYSNVYFNRLDVQKALHANVTRLSYPWKACSDIVGSYWDDSPLSMLPIYKELITAGLKIWVFSGDTDAVVPITATRYSVDALKLATITNWYPWYDHGKVGGWSQVYKGLTLVTVAGAGHEVPLHRPRQAFILFRSFLESKPMPMT

SEQ ID NO: 70710 - DNA, 954 bp, Arabidopsis thaliana
  misc_feature (1)..(954): Ceres Seq. ID no. 2730518
atggctgtaaagcaaaaggtctgtgttactggtgcaggagggtttattgcttcatggctcgtcaagtttcttctctctcgtggctacactgtccatggaaccgttcgagatccttgtgatgaaaagaatgaccatttgaggaaactggataatgcttcaaaaaatctgaaacttttcaaggcagatttgtttgatgatgaaggtcttttctcagccattgatggttgctctggcgttttccatatcgcttctcctgtgccttttgaaggagaagaactgattaaaccagctctcactggcaccaagaatgttctagaagcatgcacagaaaccaaagtgcagaaagttgtggttgtatcatcaatcgctgcagttgtttacaatccaaaatggcctcaagatgttgctaaggacgaggattgttggtcagacactcaataccttcactcacttgagcgttattactatcttgccaaaacattaacggaacgtgaagctttagagtggagtaagagaaactttgctgatgttgttacgctctgtccgtctgtcattataggccctaggcttcaatccacgcttaactctagtagtttgggacttctcaagttcataaaaggtggtataaagtccttgttgagcgatgaactgtatcttgtggatgtgcgtgatgttgcggatgcgcttttgttggtgtatgaaaatcgagaagcaacaggaagatacatatgtaattctcattcactttacactgattctcttatggagaagctcaagaatatgtatcctaaacgcaacttccctgaaagtttcacggaggtaaaagagaaggaagtgaggcctctaagtgcagagaagttgaaaaacttggggtggaagtttaggccattagaagaaaccattgatgattctgttgtgagctttgaagcagctggtgatcttccaaaggcataa

SEQ ID NO: 70711 - protein, 317 aa, Arabidopsis thaliana
  peptide (1)..(317): Ceres Seq. ID no. 2730519
  misc_feature (4)..(213): Pfam Name: 3-beta hydroxysteroid dehydrogenase/isomerase family Pfam Description: 3-beta hydroxysteroid dehydrogenase/isomerase
  misc_feature (1)..(317): Homolog of NCBI NO: 6554472 NR Description: putative cinnamoyl-CoA reductase; 14056-15506
  misc_feature (4)..(311): Homolog of NCBI NO: 15226134 NR Description: putative cinnamoyl-CoA reductase; protein id: supported by cDNA: 11254. [Arabidopsis thaliana]
  misc_feature (1)..(311): Homolog of NCBI NO: 15226135 NR Description: putative cinnamoyl-CoA reductase; protein id: supported by cDNA: gi_20260487 [Arabidopsis thaliana]
  misc_feature (5)..(316): Homolog of NCBI NO: 17978649 NR Description: cinnamoyl-CoA reductase [Pinus taeda]
  misc_feature (5)..(315): Homolog of NCBI NO: 25989515 NR Description: cinnamoyl CoA reductase [Eucalyptus globulus]
  misc_feature (1)..(317): Homolog of NCBI NO: 15223068 NR Description: putative cinnamoyl-CoA reductase; protein id:
  misc_feature (5)..(315): Homolog of NCBI NO: 9998901 NR Description: cinnamoyl-CoA reductase [Populus balsamifera
  misc_feature (5)..(315): Homolog of NCBI NO: 40233135 NR Description: cinnamoyl CoA reductase [Populus tomentosa]
  misc_feature (5)..(315): Homolog of NCBI NO: 7431407 NR Description: cinnamoyl-CoA reductase (EC 1.2.1.44) CCR - cider
  misc_feature (5)..(315): Homolog of NCBI NO: 10304406 NR Description: cinnamoyl-CoA reductase [Eucalyptus saligna]
MAVKQKVCVTGAGGFIASWLVKFLLSRGYTVHGTVRDPCDEKNDHLRKLDNASKNLKLFKADLFDDEGLFSAIDGCSGVFHIASPVPFEGEELIKPALTGTKNVLEACTETKVQKVVVVSSIAAVVYNPKWPQDVAKDEDCWSDTQYLHSLERYYYLAKTLTEREALEWSKRNFADVVTLCPSVIIGPRLQSTLNSSSLGLLKFIKGGIKSLLSDELYLVDVRDVADALLLVYENREATGRYICNSHSLYTDSLMEKLKNMYPKRNFPESFTEVKEKEVRPLSAEKLKNLGWKFRPLEETIDDSVVSFEAAGDLPKA

SEQ ID NO: 70712 - DNA, 747 bp, Arabidopsis thaliana
  misc_feature (1)..(747): Ceres Seq. ID no. 2730552
  misc_feature: MA Experiment ID: 20000495 Result: Down-regulated in Transcription
  misc_feature: MA Experiment 20000495 PARAMETER Experiment Name: At_Guard_Cells_P Parameter: Harvest Date Value: 8/2/2002
  misc_feature: MA Experiment 20000495 PARAMETER Experiment Name: At_Guard_Cells_P Parameter: Organism Value: A. thaliana
  misc_feature: MA Experiment 20000495 PARAMETER Experiment Name: At_Guard_Cells_P Parameter: Tissue Value: Guard Cells vs. Leaves
  misc_feature: MA Experiment ID: 20001451 Result: Up-regulated in Transcription
  misc_feature: MA Experiment 20001451 PARAMETER Experiment Name: At_Far-red-induction_P Parameter: Age (day) Value: 7
  misc_feature: MA Experiment 20001451 PARAMETER Experiment Name: At_Far-red-induction_P Parameter: Light Value: Far-red vs. White
  misc_feature: MA Experiment 20001451 PARAMETER Experiment Name: At_Far-red-induction_P Parameter: Organism Value: A. thaliana
  misc_feature: MA Experiment 20001451 PARAMETER Experiment Name: At_Far-red-induction_P Parameter: Plant Line Value: Columbia
  misc_feature: MA Experiment 20001451 PARAMETER Experiment Name: At_Far-red-induction_P Parameter: Timepoint (hr) Value: 24
  misc_feature: MA Experiment 20001451 PARAMETER Experiment Name: At_Far-red-induction_P Parameter: Tissue Value: Whole Plant
  misc_feature: MA Experiment ID: 20001557 Result: Up-regulated in Transcription
  misc_feature: MA Experiment 20001557 PARAMETER Experiment Name: At_Drought_Soil_Dry_P Parameter: Age (day) Value: 27
  misc_feature: MA Experiment 20001557 PARAMETER Experiment Name: At_Drought_Soil_Dry_P Parameter: Organism Value: A. thaliana
  misc_feature: MA Experiment 20001557 PARAMETER Experiment Name: At_Drought_Soil_Dry_P Parameter: Plant Line Value: WS
  misc_feature: MA Experiment 20001557 PARAMETER Experiment Name: At_Drought_Soil_Dry_P Parameter: Post Timepoint (hr) Value: 3
  misc_feature: MA Experiment 20001557 PARAMETER Experiment Name: At_Drought_Soil_Dry_P Parameter: Post-Treatment Value: Re-Water vs. No Drought
  misc_feature: MA Experiment 20001557 PARAMETER Experiment Name: At_Drought_Soil_Dry_P Parameter: Timepoint (day) Value: 13
  misc_feature: MA Experiment 20001557 PARAMETER Experiment Name: At_Drought_Soil_Dry_P Parameter: Treatment Value: Drought vs. No Drought
atggctgaccctaacaatcctatcactgaacctaaagctataatccaatcttctacttcatcgtcagttactattgtgccagttcccacgtgcggtgacagcctctctgactctgccacgtgtgaaaacccttgtccacttgatactatcactactactactactactgtttgttttgcggctccttcttctactgcaagtggtaatgatattaatactttaatggccactgacaccgacatctctcgccggaaaaagaatccggtttatcggggaattcgttgtcggagtggaaaatgggtgtctgaaatccgagagcctaaaaagactacacgtgtctggcttgggacttatccgacgccggagatggctgctgccgcatatgacgtggcggcgttagctcttaaaggtggagacactctcttgaacttcccggattccctgggatcttaccccattcccctttcctcttccgcagctcatatcagatgcgctgcagctgcggctgctgcgactaggggtgcggctggagcggccgtgaaggtaggtcaaaagaaggaagataaagtttatgatacggcggaatcttcaactatggggtttgtggatgaagaagagctattgaacatgcctggtttgctagcggatatggccaaagggatgatggtggctccaccgtggatgggatctccaccgtcagatgattcgccagagaattctgatggagagagcttgtggagctattga

SEQ ID NO: 70713 - protein, 248 aa, Arabidopsis thaliana
  peptide (1)..(248): Ceres Seq. ID no. 2730553
  misc_feature (87)..(150): Pfam Name: AP2 domain Pfam Description: AP2 domain
  misc_feature (1)..(248): Homolog of NCBI NO: 25404394 NR Description: hypothetical protein F16M19.1 [imported] - thaliana >gi|12323257|gb|AAG51609.1|AC010795_13 transcription
  misc_feature (1)..(238): Homolog of NCBI NO: 8493594 NR Description: Contains similarity to transcriptional activator from Arabidopsis thaliana gb|U77378 and contains an AP2 PF|00847
  misc_feature (81)..(248): Homolog of NCBI NO: 15222031 NR Description: DRE binding protein; protein id: At1g12630.1
  misc_feature (60)..(248): Homolog of NCBI NO: 15242262 NR Description: DRE binding protein; protein id: At5g52020.1, by cDNA: 251466. [Arabidopsis thaliana] contains similarity to AP2 domain transcription
  misc_feature (86)..(248): Homolog of NCBI NO: 15227980 NR Description: DRE binding protein; protein id: At2g36450.1 thaliana] >gi|25408476|pir||H84780 probable AP2 domain
  misc_feature (83)..(248): Homolog of NCBI NO: 37147896 NR Description: CaCBF1B [Capsicum annuum]
  misc_feature (83)..(248): Homolog of NCBI NO: 40647095 NR Description: DREB-like protein 1 [Capsicum annuum]
  misc_feature (86)..(226): Homolog of NCBI NO: 37536218 NR Description: putative transcription factor [Oryza sativa
  misc_feature (83)..(248): Homolog of NCBI NO: 18535580 NR Description: putative transcriptional activator CBF1
  misc_feature (83)..(248): Homolog of NCBI NO: 12003382 NR Description: Avr9/Cf-9 rapidly elicited protein 111A
MADPNNPITEPKAIIQSSTSSSVTIVPVPTCGDSLSDSATCENPCPLDTITTTTTTVCFAAPSSTASGNDINTLMATDTDISRRKKNPVYRGIRCRSGKWVSEIREPKKTTRVWLGTYPTPEMAAAAYDVAALALKGGDTLLNFPDSLGSYPIPLSSSAAHIRCAAAAAAATRGAAGAAVKVGQKKEDKVYDTAESSTMGFVDEEELLNMPGLLADMAKGMMVAPPWMGSPPSDDSPENSDGESLWSY

SEQ ID NO: 70714 - protein, 174 aa, Arabidopsis thaliana
  peptide (1)..(174): Ceres Seq. ID no. 2730554
  misc_feature (13)..(76): Pfam Name: AP2 domain Pfam Description: AP2 domain
  misc_feature (1)..(174): Homolog of NCBI NO: 25404394 NR Description: hypothetical protein F16M19.1 [imported] - thaliana >gi|12323257|gb|AAG51609.1|AC010795_13 transcription
  misc_feature (1)..(164): Homolog of NCBI NO: 8493594 NR Description: Contains similarity to transcriptional activator from Arabidopsis thaliana gb|U77378 and contains an AP2 PF|00847
  misc_feature (7)..(174): Homolog of NCBI NO: 15222031 NR Description: DRE binding protein; protein id: At1g12630.1
  misc_feature (1)..(174): Homolog of NCBI NO: 15242262 NR Description: DRE binding protein; protein id: At5g52020.1, by cDNA: 251466. [Arabidopsis thaliana] contains similarity to AP2 domain transcription
  misc_feature (12)..(174): Homolog of NCBI NO: 15227980 NR Description: DRE binding protein; protein id: At2g36450.1 thaliana] >gi|25408476|pir||H84780 probable AP2 domain
  misc_feature (9)..(174): Homolog of NCBI NO: 37147896 NR Description: CaCBF1B [Capsicum annuum]
  misc_feature (9)..(174): Homolog of NCBI NO: 40647095 NR Description: DREB-like protein 1 [Capsicum annuum]
  misc_feature (12)..(152): Homolog of NCBI NO: 37536218 NR Description: putative transcription factor [Oryza sativa
  misc_feature (9)..(174): Homolog of NCBI NO: 18535580 NR Description: putative transcriptional activator CBF1
  misc_feature (9)..(174): Homolog of NCBI NO: 12003382 NR Description: Avr9/Cf-9 rapidly elicited protein 111A
MATDTDISRRKKNPVYRGIRCRSGKWVSEIREPKKTTRVWLGTYPTPEMAAAAYDVAALALKGGDTLLNFPDSLGSYPIPLSSSAAHIRCAAAAAAATRGAAGAAVKVGQKKEDKVYDTAESSTMGFVDEEELLNMPGLLADMAKGMMVAPPWMGSPPSDDSPENSDGESLWSY

SEQ ID NO: 70715 - protein, 126 aa, Arabidopsis thaliana
  peptide (1)..(126): Ceres Seq. ID no. 2730555
  misc_feature (1)..(126): Homolog of NCBI NO: 25404394 NR Description: hypothetical protein F16M19.1 [imported] - thaliana >gi|12323257|gb|AAG51609.1|AC010795_13 transcription
  misc_feature (1)..(116): Homolog of NCBI NO: 8493594 NR Description: Contains similarity to transcriptional activator from Arabidopsis thaliana gb|U77378 and contains an AP2 PF|00847
  misc_feature (1)..(126): Homolog of NCBI NO: 15222031 NR Description: DRE binding protein; protein id: At1g12630.1
  misc_feature (1)..(126): Homolog of NCBI NO: 15242262 NR Description: DRE binding protein; protein id: At5g52020.1, by cDNA: 251466. [Arabidopsis thaliana] contains similarity to AP2 domain transcription
  misc_feature (1)..(126): Homolog of NCBI NO: 15227980 NR Description: DRE binding protein; protein id: At2g36450.1 thaliana] >gi|25408476|pir||H84780 probable AP2 domain
  misc_feature (1)..(126): Homolog of NCBI NO: 37147896 NR Description: CaCBF1B [Capsicum annuum]
  misc_feature (1)..(126): Homolog of NCBI NO: 40647095 NR Description: DREB-like protein 1 [Capsicum annuum]
  misc_feature (1)..(104): Homolog of NCBI NO: 37536218 NR Description: putative transcription factor [Oryza sativa
  misc_feature (1)..(126): Homolog of NCBI NO: 18535580 NR Description: putative transcriptional activator CBF1
  misc_feature (1)..(126): Homolog of NCBI NO: 12003382 NR Description: Avr9/Cf-9 rapidly elicited protein 111A
MAAAAYDVAALALKGGDTLLNFPDSLGSYPIPLSSSAAHIRCAAAAAAATRGAAGAAVKVGQKKEDKVYDTAESSTMGFVDEEELLNMPGLLADMAKGMMVAPPWMGSPPSDDSPENSDGESLWSY

SEQ ID NO: 70716 - DNA, 597 bp, Arabidopsis thaliana
  misc_feature (1)..(597): Ceres Seq. ID no. 2730630
  misc_feature: MA Experiment ID: 20000173 Result: Down-regulated in Transcription
  misc_feature: MA Experiment 20000173 PARAMETER Experiment Name: At_42deg_Heat_P Parameter: Age (day) Value: 14
  misc_feature: MA Experiment 20000173 PARAMETER Experiment Name: At_42deg_Heat_P Parameter: Organism Value: A. thaliana
  misc_feature: MA Experiment 20000173 PARAMETER Experiment Name: At_42deg_Heat_P Parameter: Plant Line Value: WS
  misc_feature: MA Experiment 20000173 PARAMETER Experiment Name: At_42deg_Heat_P Parameter: Temperature (deg C) Value: 42 vs. 22
  misc_feature: MA Experiment 20000173 PARAMETER Experiment Name: At_42deg_Heat_P Parameter: Timepoint (hr) Value: 6
  misc_feature: MA Experiment 20000173 PARAMETER Experiment Name: At_42deg_Heat_P Parameter: Tissue Value: Aerial
  misc_feature: MA Experiment ID: 20000185 Result: Down-regulated in Transcription
  misc_feature: MA Experiment 20000185 PARAMETER Experiment Name: At_Roots__P Parameter: Age (day) Value: 7 vs. 21
  misc_feature: MA Experiment 20000185 PARAMETER Experiment Name: At_Roots__P Parameter: Organism Value: A. thaliana
  misc_feature: MA Experiment 20000185 PARAMETER Experiment Name: At_Roots__P Parameter: Tissue Value: Roots vs. Whole Plant
  misc_feature: MA Experiment ID: 20000234 Result: Up-regulated in Transcription
  misc_feature: MA Experiment 20000234 PARAMETER Experiment Name: At_Siliques_P Parameter: Age (day) Value: 21
  misc_feature: MA Experiment 20000234 PARAMETER Experiment Name: At_Siliques_P Parameter: Organism Value: A. thaliana
  misc_feature: MA Experiment 20000234 PARAMETER Experiment Name: At_Siliques_P Parameter: Plant Line Value: WS
  misc_feature: MA Experiment 20000234 PARAMETER Experiment Name: At_Siliques_P Parameter: Tissue Value: Less Than 5mm Siliques vs. Whole Plant
  misc_feature: MA Experiment ID: 20000264 Result: Up-regulated in Transcription
  misc_feature: MA Experiment 20000264 PARAMETER Experiment Name: At_Open_Flower_P Parameter: Age (day) Value: 21
  misc_feature: MA Experiment 20000264 PARAMETER Experiment Name: At_Open_Flower_P Parameter: Plant Line Value: WS
  misc_feature: MA Experiment 20000264 PARAMETER Experiment Name: At_Open_Flower_P Parameter: Tissue Value: Open Flower vs. Whole Plant
  misc_feature: MA Experiment ID: 20000265 Result: Up-regulated in Transcription
  misc_feature: MA Experiment 20000265 PARAMETER Experiment Name: At_Open_Flower_P Parameter: Age (day) Value: 21
  misc_feature: MA Experiment 20000265 PARAMETER Experiment Name: At_Open_Flower_P Parameter: Plant Line Value: WS
  misc_feature: MA Experiment 20000265 PARAMETER Experiment Name: At_Open_Flower_P Parameter: Tissue Value: Closed Flower vs. Whole Plant
  misc_feature: MA Experiment ID: 20000286 Result: Up-regulated in Transcription
  misc_feature: MA Experiment 20000286 PARAMETER Experiment Name: At_Open_Flower_P Parameter: Age (day) Value: 21
  misc_feature: MA Experiment 20000286 PARAMETER Experiment Name: At_Open_Flower_P Parameter: Plant Line Value: WS
  misc_feature: MA Experiment 20000286 PARAMETER Experiment Name: At_Open_Flower_P Parameter: Tissue Value: Half Open vs. Whole Plant
  misc_feature: MA Experiment ID: 20000438 Result: Up-regulated in Transcription
  misc_feature: MA Experiment 20000438 PARAMETER Experiment Name: At_Shoots__P Parameter: Age (day) Value: 14
  misc_feature: MA Experiment 20000438 PARAMETER Experiment Name: At_Shoots__P Parameter: Tissue Value: Shoots vs. Whole Plant
  misc_feature: MA Experiment ID: 20000439 Result: Down-regulated in Transcription
  misc_feature: MA Experiment 20000439 PARAMETER Experiment Name: At_Roots__P Parameter: Age (day) Value: 14 vs. 21
  misc_feature: MA Experiment 20000439 PARAMETER Experiment Name: At_Roots__P Parameter: Organism Value: A. thaliana
  misc_feature: MA Experiment 20000439 PARAMETER Experiment Name: At_Roots__P Parameter: Tissue Value: Roots vs. Whole Plant
  misc_feature: MA Experiment ID: 20000496 Result: Up-regulated in Transcription
  misc_feature: MA Experiment 20000496 PARAMETER Experiment Name: At_Guard_Cells_P Parameter: Harvest Date Value: 7/19/2002
  misc_feature: MA Experiment 20000496 PARAMETER Experiment Name: At_Guard_Cells_P Parameter: Organism Value: Canola
  misc_feature: MA Experiment 20000496 PARAMETER Experiment Name: At_Guard_Cells_P Parameter: Tissue Value: Guard Cells vs. Leaves
  misc_feature: MA Experiment ID: 20000794 Result: Up-regulated in Transcription
  misc_feature: MA Experiment 20000794 PARAMETER Experiment Name: At_Petals_P Parameter: Age (day) Value: 23-25 days
  misc_feature: MA Experiment 20000794 PARAMETER Experiment Name: At_Petals_P Parameter: Plant Line Value: WS
  misc_feature: MA Experiment 20000794 PARAMETER Experiment Name: At_Petals_P Parameter: Tissue Value: Petals vs. Whole plant
  misc_feature: MA Experiment ID: 20001247 Result: Down-regulated in Transcription
  misc_feature: MA Experiment 20001247 PARAMETER Experiment Name: At_Far-red-induction_P Parameter: Age (day) Value: 7
  misc_feature: MA Experiment 20001247 PARAMETER Experiment Name: At_Far-red-induction_P Parameter: Light Value: Far-red vs. White
  misc_feature: MA Experiment 20001247 PARAMETER Experiment Name: At_Far-red-induction_P Parameter: Organism Value: A. thaliana
  misc_feature: MA Experiment 20001247 PARAMETER Experiment Name: At_Far-red-induction_P Parameter: Plant Line Value: Columbia
  misc_feature: MA Experiment 20001247 PARAMETER Experiment Name: At_Far-red-induction_P Parameter: Timepoint (hr) Value: 1
  misc_feature: MA Experiment 20001247 PARAMETER Experiment Name: At_Far-red-induction_P Parameter: Tissue Value: Whole Plant
  misc_feature: MA Experiment ID: 20001451 Result: Down-regulated in Transcription
  misc_feature: MA Experiment 20001451 PARAMETER Experiment Name: At_Far-red-induction_P Parameter: Age (day) Value: 7
  misc_feature: MA Experiment 20001451 PARAMETER Experiment Name: At_Far-red-induction_P Parameter: Light Value: Far-red vs. White
  misc_feature: MA Experiment 20001451 PARAMETER Experiment Name: At_Far-red-induction_P Parameter: Organism Value: A. thaliana
  misc_feature: MA Experiment 20001451 PARAMETER Experiment Name: At_Far-red-induction_P Parameter: Plant Line Value: Columbia
  misc_feature: MA Experiment 20001451 PARAMETER Experiment Name: At_Far-red-induction_P Parameter: Timepoint (hr) Value: 24
  misc_feature: MA Experiment 20001451 PARAMETER Experiment Name: At_Far-red-induction_P Parameter: Tissue Value: Whole Plant
  misc_feature: MA Experiment ID: 20001557 Result: Up-regulated in Transcription
  misc_feature: MA Experiment 20001557 PARAMETER Experiment Name: At_Drought_Soil_Dry_P Parameter: Age (day) Value: 27
  misc_feature: MA Experiment 20001557 PARAMETER Experiment Name: At_Drought_Soil_Dry_P Parameter: Organism Value: A. thaliana
  misc_feature: MA Experiment 20001557 PARAMETER Experiment Name: At_Drought_Soil_Dry_P Parameter: Plant Line Value: WS
  misc_feature: MA Experiment 20001557 PARAMETER Experiment Name: At_Drought_Soil_Dry_P Parameter: Post Timepoint (hr) Value: 3
  misc_feature: MA Experiment 20001557 PARAMETER Experiment Name: At_Drought_Soil_Dry_P Parameter: Post-Treatment Value: Re-Water vs. No Drought
  misc_feature: MA Experiment 20001557 PARAMETER Experiment Name: At_Drought_Soil_Dry_P Parameter: Timepoint (day) Value: 13
  misc_feature: MA Experiment 20001557 PARAMETER Experiment Name: At_Drought_Soil_Dry_P Parameter: Treatment Value: Drought vs. No Drought
  misc_feature: MA Experiment ID: 20001906 Result: Down-regulated in Transcription
  misc_feature: MA Experiment 20001906 PARAMETER Experiment Name: At_Drought_Reproduction_P Parameter: Age (day) Value: 35
  misc_feature: MA Experiment 20001906 PARAMETER Experiment Name: At_Drought_Reproduction_P Parameter: Organism Value: A. thaliana
  misc_feature: MA Experiment 20001906 PARAMETER Experiment Name: At_Drought_Reproduction_P Parameter: Plant Line Value: WS
  misc_feature: MA Experiment 20001906 PARAMETER Experiment Name: At_Drought_Reproduction_P Parameter: Timepoint (day) Value: 5
  misc_feature: MA Experiment 20001906 PARAMETER Experiment Name: At_Drought_Reproduction_P Parameter: Tissue Value: Siliques
  misc_feature: MA Experiment 20001906 PARAMETER Experiment Name: At_Drought_Reproduction_P Parameter: Treatment Value: Drought vs. No Drought
  misc_feature: MA Experiment ID: 20001911 Result: Down-regulated in Transcription
  misc_feature: MA Experiment 20001911 PARAMETER Experiment Name: At_Drought_Reproduction_P Parameter: Age (day) Value: 40
  misc_feature: MA Experiment 20001911 PARAMETER Experiment Name: At_Drought_Reproduction_P Parameter: Organism Value: A. thaliana
  misc_feature: MA Experiment 20001911 PARAMETER Experiment Name: At_Drought_Reproduction_P Parameter: Plant Line Value: WS
  misc_feature: MA Experiment 20001911 PARAMETER Experiment Name: At_Drought_Reproduction_P Parameter: Timepoint (day) Value: 10
  misc_feature: MA Experiment 20001911 PARAMETER Experiment Name: At_Drought_Reproduction_P Parameter: Tissue Value: Flowers
  misc_feature: MA Experiment 20001911 PARAMETER Experiment Name: At_Drought_Reproduction_P Parameter: Treatment Value: Drought vs. No Drought
atggtttctcgacaagaaggaaccctctactctagaaagagggatttcacagtctgtggagaagagtttcacaattcattcaagaagagcaaacaagaagatcaatcacagagcactctgttcaatgaacgaccaaaatcggagagtatgagatcaattacctttgattttgaacttcatctccacactcctctaccatcagattggcaaactaagatgagcctagaccttgagctgaacctttcaccttcaggttcaccttcacgaaccacaacgaagaaatatgaatcctcctcaattcacaatgaaacagtatcatcatcaaagattaaagttttgacgaacacaagtaagaagagcataattgggacaggactaagtcgatcaccatcctggctagcgtttgaaggtggtgatgataacgatgttgatcacaaggggcaagagatggtaacaacagtttgcatgaaatgccacatgctggttatgttgtgtacatcaactcctgtttgtcccaactgcaagttcatgcacccacacgatcacagctctacaaaactgtttaaaccatcaaatttgcttaggcttctatgctag

SEQ ID NO: 70717 - protein, 198 aa, Arabidopsis thaliana
  peptide (1)..(198): Ceres Seq. ID no. 2730631
  misc_feature (1)..(198): Homolog of NCBI NO: 25372722 NR Description: unknown protein T11I11.11 [imported] -
  misc_feature (62)..(198): Homolog of NCBI NO: 30699311 NR Description: expressed protein [Arabidopsis thaliana] unknown protein [Arabidopsis thaliana]
  misc_feature (1)..(72): Homolog of NCBI NO: 30699311 NR Description: expressed protein [Arabidopsis thaliana] unknown protein [Arabidopsis thaliana]
  misc_feature (1)..(198): Homolog of NCBI NO: 30687784 NR Description: expressed protein [Arabidopsis thaliana]
  misc_feature (11)..(190): Homolog of NCBI NO: 15236641 NR Description: hypothetical protein; protein id: At4g08910.1
MVSRQEGTLYSRKRDFTVCGEEFHNSFKKSKQEDQSQSTLFNERPKSESMRSITFDFELHLHTPLPSDWQTKMSLDLELNLSPSGSPSRTTTKKYESSSIHNETVSSSKIKVLTNTSKKSIIGTGLSRSPSWLAFEGGDDNDVDHKGQEMVTTVCMKCHMLVMLCTSTPVCPNCKFMHPHDHSSTKLFKPSNLLRLLC

SEQ ID NO: 70718 - protein, 149 aa, Arabidopsis thaliana
  peptide (1)..(149): Ceres Seq. ID no. 2730632
  misc_feature (1)..(149): Homolog of NCBI NO: 25372722 NR Description: unknown protein T11I11.11 [imported] -
  misc_feature (13)..(149): Homolog of NCBI NO: 30699311 NR Description: expressed protein [Arabidopsis thaliana] unknown protein [Arabidopsis thaliana]
  misc_feature (1)..(23): Homolog of NCBI NO: 30699311 NR Description: expressed protein [Arabidopsis thaliana] unknown protein [Arabidopsis thaliana]
  misc_feature (1)..(149): Homolog of NCBI NO: 30687784 NR Description: expressed protein [Arabidopsis thaliana]
  misc_feature (1)..(141): Homolog of NCBI NO: 15236641 NR Description: hypothetical protein; protein id: At4g08910.1
MRSITFDFELHLHTPLPSDWQTKMSLDLELNLSPSGSPSRTTTKKYESSSIHNETVSSSKIKVLTNTSKKSIIGTGLSRSPSWLAFEGGDDNDVDHKGQEMVTTVCMKCHMLVMLCTSTPVCPNCKFMHPHDHSSTKLFKPSNLLRLLC

SEQ ID NO: 70719 - protein, 126 aa, Arabidopsis thaliana
  peptide (1)..(126): Ceres Seq. ID no. 2730633
  misc_feature (1)..(126): Homolog of NCBI NO: 25372722 NR Description: unknown protein T11I11.11 [imported] -
  misc_feature (1)..(126): Homolog of NCBI NO: 30699311 NR Description: expressed protein [Arabidopsis thaliana] unknown protein [Arabidopsis thaliana]
  misc_feature (1)..(126): Homolog of NCBI NO: 30687784 NR Description: expressed protein [Arabidopsis thaliana]
  misc_feature (1)..(118): Homolog of NCBI NO: 15236641 NR Description: hypothetical protein; protein id: At4g08910.1
MSLDLELNLSPSGSPSRTTTKKYESSSIHNETVSSSKIKVLTNTSKKSIIGTGLSRSPSWLAFEGGDDNDVDHKGQEMVTTVCMKCHMLVMLCTSTPVCPNCKFMHPHDHSSTKLFKPSNLLRLLC

SEQ ID NO: 70720 - DNA, 1152 bp, Arabidopsis thaliana
  misc_feature (1)..(1152): Ceres Seq. ID no. 2730931
  misc_feature: MA Experiment ID: 20000180 Result: Down-regulated in Transcription
  misc_feature: MA Experiment 20000180 PARAMETER Experiment Name: At_Germinating_Seeds_P Parameter: Age (hr) Value: 24 vs. 0
  misc_feature: MA Experiment 20000180 PARAMETER Experiment Name: At_Germinating_Seeds_P Parameter: Tissue Value: Germinating Seeds
  misc_feature: MA Experiment ID: 20000234 Result: Up-regulated in Transcription
  misc_feature: MA Experiment 20000234 PARAMETER Experiment Name: At_Siliques_P Parameter: Age (day) Value: 21
  misc_feature: MA Experiment 20000234 PARAMETER Experiment Name: At_Siliques_P Parameter: Organism Value: A. thaliana
  misc_feature: MA Experiment 20000234 PARAMETER Experiment Name: At_Siliques_P Parameter: Plant Line Value: WS
  misc_feature: MA Experiment 20000234 PARAMETER Experiment Name: At_Siliques_P Parameter: Tissue Value: Less Than 5mm Siliques vs. Whole Plant
  misc_feature: MA Experiment ID: 20000265 Result: Up-regulated in Transcription
  misc_feature: MA Experiment 20000265 PARAMETER Experiment Name: At_Open_Flower_P Parameter: Age (day) Value: 21
  misc_feature: MA Experiment 20000265 PARAMETER Experiment Name: At_Open_Flower_P Parameter: Plant Line Value: WS
  misc_feature: MA Experiment 20000265 PARAMETER Experiment Name: At_Open_Flower_P Parameter: Tissue Value: Closed Flower vs. Whole Plant
  misc_feature: MA Experiment ID: 20000437 Result: Down-regulated in Transcription
  misc_feature: MA Experiment 20000437 PARAMETER Experiment Name: At_Drought_P Parameter: Age (day) Value: 8
  misc_feature: MA Experiment 20000437 PARAMETER Experiment Name: At_Drought_P Parameter: Organism Value: A. thaliana
  misc_feature: MA Experiment 20000437 PARAMETER Experiment Name: At_Drought_P Parameter: Plant Line Value: WS
  misc_feature: MA Experiment 20000437 PARAMETER Experiment Name: At_Drought_P Parameter: Timepoint (hr) Value: 24
  misc_feature: MA Experiment 20000437 PARAMETER Experiment Name: At_Drought_P Parameter: Tissue Value: Whole Plant
  misc_feature: MA Experiment 20000437 PARAMETER Experiment Name: At_Drought_P Parameter: Treatment Value: Drought vs. No Drought
  misc_feature: MA Experiment ID: 20000495 Result: Up-regulated in Transcription
  misc_feature: MA Experiment 20000495 PARAMETER Experiment Name: At_Guard_Cells_P Parameter: Harvest Date Value: 8/2/2002
  misc_feature: MA Experiment 20000495 PARAMETER Experiment Name: At_Guard_Cells_P Parameter: Organism Value: A. thaliana
  misc_feature: MA Experiment 20000495 PARAMETER Experiment Name: At_Guard_Cells_P Parameter: Tissue Value: Guard Cells vs. Leaves
atgtcttctccactactctctctcacctcattgccactaattctcctcacctcatcatcccttttgtctccattagaggtcaatcttttaaaactcaaagatttcgcttttgtctttatatcttacttttgtgagattcaaagggatgatctttgttgtgttgagttaacagagaggttgaaagagaagatagaggaaacatttgggtgtgagtatgagctttttattgaattcacaggtttgattagttggtgcaaaggagctagcattggttggcatagtgatgataacagatcatatctaaaacaaagagattttgcggcagtttgttacttgaatagttacgagaaagatttcataggcggtctttttcgttttcagagtggtgaaccagtaaccgttgctccatcggctggtgatgttatcatgtacacagctgatgaccggaatattcactcagttgatgaggtaacagatggagaaagattgactcttgcactctggtttagccgggactcatcacatgacgaagattccaagcttctttctcgtctttcacaatgtacatcacatgaagtgtgcctccctttgcctgcatccactaacatgtactggttctgtcctcatcaagatggttctaatcaaaacataggttttgatgtttgcgttgcgaggttgcatcttcttggttttgatgtacatagcttacaaggcgaagatcattctacggatgcctctgaacaacttatgggaccactacaattagctaaaggaggaaagttactcacccgaaaatttgccaacattcttcatgctcttcaggttgttcagttctaccattggaaagcttctgaactcgtaacttctaatgtcgaaaatgacacattagaagaggtgaaagctatgtcccactctcagttggaaactatcaatgccctgaaatcagttttcctgctagatgagaacctcgtagccacaacttttggatattcgtgctctggtgaggatcgaaaggattcactcgacttgacgggtatagctctcgcggttacctcttgggaagagtatagctgtaagttactcaaggagctattatcatccttgcctcaatggaaaacttatcaaactatacacaaagtggaatctgattag

SEQ ID NO: 70721 - protein, 383 aa, Arabidopsis thaliana
  peptide (1)..(383): Ceres Seq. ID no. 2730932
  misc_feature (104)..(170): Pfam Name: 2OG-Fe(II) oxygenase superfamily Pfam Description: 2OG-Fe(II) oxygenase superfamily
  misc_feature (1)..(383): Homolog of NCBI NO: 15220642 NR Description: hypothetical protein; protein id: At1g68080.1
MSSPLLSLTSLPLILLTSSSLLSPLEVNLLKLKDFAFVFISYFCEIQRDDLCCVELTERLKEKIEETFGCEYELFIEFTGLISWCKGASIGWHSDDNRSYLKQRDFAAVCYLNSYEKDFIGGLFRFQSGEPVTVAPSAGDVIMYTADDRNIHSVDEVTDGERLTLALWFSRDSSHDEDSKLLSRLSQCTSHEVCLPLPASTNMYWFCPHQDGSNQNIGFDVCVARLHLLGFDVHSLQGEDHSTDASEQLMGPLQLAKGGKLLTRKFANILHALQVVQFYHWKASELVTSNVENDTLEEVKAMSHSQLETINALKSVFLLDENLVATTFGYSCSGEDRKDSLDLTGIALAVTSWEEYSCKLLKELLSSLPQWKTYQTIHKVESD

SEQ ID NO: 70722 - protein, 241 aa, Arabidopsis thaliana
  peptide (1)..(241): Ceres Seq. ID no. 2730933
  misc_feature (1)..(241): Homolog of NCBI NO: 15220642 NR Description: hypothetical protein; protein id: At1g68080.1
MYTADDRNIHSVDEVTDGERLTLALWFSRDSSHDEDSKLLSRLSQCTSHEVCLPLPASTNMYWFCPHQDGSNQNIGFDVCVARLHLLGFDVHSLQGEDHSTDASEQLMGPLQLAKGGKLLTRKFANILHALQVVQFYHWKASELVTSNVENDTLEEVKAMSHSQLETINALKSVFLLDENLVATTFGYSCSGEDRKDSLDLTGIALAVTSWEEYSCKLLKELLSSLPQWKTYQTIHKVESD

SEQ ID NO: 70723 - DNA, 1383 bp, Arabidopsis thaliana
  misc_feature (1)..(1383): Ceres Seq. ID no. 2731007
  misc_feature: MA Experiment ID: 108434 Result: Up-regulated in Transcription
  misc_feature: MA Experiment 108434 PARAMETER Experiment Name: At_Root_Tips_cDNA_P Parameter: Tissue Value: Root Tips
  misc_feature: MA Experiment ID: 108573 Result: Up-regulated in Transcription
  misc_feature: MA Experiment 108573 PARAMETER Experiment Name: At_Drought_cDNA_P Parameter: Timepoint (hr) Value: 6
  misc_feature: MA Experiment 108573 PARAMETER Experiment Name: At_Drought_cDNA_P Parameter: Tissue Value: Aerial
  misc_feature: MA Experiment 108573 PARAMETER Experiment Name: At_Drought_cDNA_P Parameter: Treatment Value: Drought vs. No Drought
  misc_feature: MA Experiment ID: 108585 Result: Up-regulated in Transcription
  misc_feature: MA Experiment 108585 PARAMETER Experiment Name: At_5mM_NaNP_cDNA_P Parameter: Timepoint (hr) Value: 6
  misc_feature: MA Experiment 108585 PARAMETER Experiment Name: At_5mM_NaNP_cDNA_P Parameter: Tissue Value: Aerial
  misc_feature: MA Experiment 108585 PARAMETER Experiment Name: At_5mM_NaNP_cDNA_P Parameter: Treatment Value: null
atggaggttttctactacttggtgtttggagtcatggctgccgtagtggcagcgttggagcttagcaagacgaacaaggatcggatcaacacttcgtcttccttcaattcattcaagaacaattacctcctcgttttctctattatgatggctggggattggcttcagggtccttatgtgtattacctttacagcacttatggttttggaaaaggagatattggtcagctattcattgctggttttggttcgtcaatgttgtttggaactattgttggatctctggctgacaaacagggtcgaaagagggcatgtgttacatactgtatagtttacatactaagttgcatcaccaagcactctccacagtacaaagttttgatggttggccgtatcttgggtggtattgctacatctctcttgttttctgctttcgagtcctggctaattgcagagcacaataagaggaactttgagcaacagtggctgtcacttacattctctaaggctgtatttcttggaaacggtctggtggctatcctttcgggattgtttggcaatcttcttgttgacactttttcctttggtcctgttgctccctttgacgccgctgcgtgctttcttgcaattggaatggcgatcatattgggaacatggtctgagaattttggagatccatctgacagcaaagacttgctgactcagttcaaagttgctgccatagcaattgcttcagatgaaaagattgcattgctgggcgctattcagtctctattcgaagcctcgatgtacacctttgttttcctctggacaccagctcttagcccaaacgatgaagaaattccacatggcttcgtctttgcaaccttcatgttagcctcaatgttgggaagctcccttgcagctcgtctcatgtctcgctcatctctcagagtcgaaaactacatgcaaattgtctttctagtctcggctgcttcacttcttcttcccattacaacaagtgtcttggtgacaccgtcaaaggtgaaagacgaaggattgtcgttaactagctccattcagctgcttggtttctgtgtttttgagtcttgtgtcggaatattttggccttcgataatgaagatgaggtcgcagtatatacctgaagaagcacgaagcaccataatgaatttcttccgtgttccactcaacatctttgtctgcatcgtcttgtacaacgtggacgcatttccgatcacaatcatgtttggtatgtgctcaatcttcctcttcgtagcctccatattacaacggcggcttatggtcatctctgaaaagccaaaggcagaagattggagtccgatgaaggagcgaaactcggaagttgatcctcttaccctctga

SEQ ID NO: 70724 - protein, 460 aa, Arabidopsis thaliana
  peptide (1)..(460): Ceres Seq. ID no. 2731008
  misc_feature (4)..(358): Pfam Name: Protein of unknown function (DUF791) Pfam Description: Protein of unknown function (DUF791)
  misc_feature (1)..(460): Homolog of NCBI NO: 30693172 NR Description: expressed protein [Arabidopsis thaliana]
  misc_feature (144)..(460): Homolog of NCBI NO: 11292198 NR Description: hypothetical protein F2K15.170 - Arabidopsis >gi|6723401|emb|CAB66410.1| putative protein [Arabidopsis
  misc_feature (1)..(155): Homolog of NCBI NO: 11292198 NR Description: hypothetical protein F2K15.170 - Arabidopsis >gi|6723401|emb|CAB66410.1| putative protein [Arabidopsis
  misc_feature (1)..(460): Homolog of NCBI NO: 18417054 NR Description: putative protein; protein id: At4g27720.1, by cDNA: 113484., supported by cDNA: gi_13272472, supported by gi_15912260, supported by cDNA: gi_16930438 [Arabidopsis
  misc_feature (1)..(458): Homolog of NCBI NO: 15217708 NR Description: unknown protein; protein id: At1g64650.1
  misc_feature (1)..(458): Homolog of NCBI NO: 6633826 NR Description: F1N19.22 [Arabidopsis thaliana]
  misc_feature (1)..(458): Homolog of NCBI NO: 34902182 NR Description: Putative transporter [Oryza sativa (japonica group)] >gi|27476097|gb|AAO17028.1| Putative transporter [Oryza
  misc_feature (1)..(457): Homolog of NCBI NO: 37536124 NR Description: putative transporter [Oryza sativa (japonica group)] >gi|10122032|gb|AAG13421.1| putative transporter [Oryza
  misc_feature (1)..(343): Homolog of NCBI NO: 7487513 NR Description: hypothetical protein T29A15.210 - Arabidopsis >gi|4469023|emb|CAB38284.1| putative protein [Arabidopsis >gi|7269626|emb|CAB81422.1| putative protein [Arabidopsis
  misc_feature (8)..(438): Homolog of NCBI NO: 39587911 NR Description: Hypothetical protein CBG13530 [Caenorhabditis
MEVFYYLVFGVMAAVVAALELSKTNKDRINTSSSFNSFKNNYLLVFSIMMAGDWLQGPYVYYLYSTYGFGKGDIGQLFIAGFGSSMLFGTIVGSLADKQGRKRACVTYCIVYILSCITKHSPQYKVLMVGRILGGIATSLLFSAFESWLIAEHNKRNFEQQWLSLTFSKAVFLGNGLVAILSGLFGNLLVDTFSFGPVAPFDAAACFLAIGMAIILGTWSENFGDPSDSKDLLTQFKVAAIAIASDEKIALLGAIQSLFEASMYTFVFLWTPALSPNDEEIPHGFVFATFMLASMLGSSLAARLMSRSSLRVENYMQIVFLVSAASLLLPITTSVLVTPSKVKDEGLSLTSSIQLLGFCVFESCVGIFWPSIMKMRSQYIPEEARSTIMNFFRVPLNIFVCIVLYNVDAFPITIMFGMCSIFLFVASILQRRLMVISEKPKAEDWSPMKERNSEVDPLTL

SEQ ID NO: 70725 - protein, 449 aa, Arabidopsis thaliana
  peptide (1)..(449): Ceres Seq. ID no. 2731009
  misc_feature (1)..(347): Pfam Name: Protein of unknown function (DUF791) Pfam Description: Protein of unknown function (DUF791)
  misc_feature (1)..(449): Homolog of NCBI NO: 30693172 NR Description: expressed protein [Arabidopsis thaliana]
  misc_feature (133)..(449): Homolog of NCBI NO: 11292198 NR Description: hypothetical protein F2K15.170 - Arabidopsis >gi|6723401|emb|CAB66410.1| putative protein [Arabidopsis
  misc_feature (1)..(144): Homolog of NCBI NO: 11292198 NR Description: hypothetical protein F2K15.170 - Arabidopsis >gi|6723401|emb|CAB66410.1| putative protein [Arabidopsis
  misc_feature (1)..(449): Homolog of NCBI NO: 18417054 NR Description: putative protein; protein id: At4g27720.1, by cDNA: 113484., supported by cDNA: gi_13272472, supported by gi_15912260, supported by cDNA: gi_16930438 [Arabidopsis
  misc_feature (1)..(447): Homolog of NCBI NO: 15217708 NR Description: unknown protein; protein id: At1g64650.1
  misc_feature (1)..(447): Homolog of NCBI NO: 6633826 NR Description: F1N19.22 [Arabidopsis thaliana]
  misc_feature (1)..(447): Homolog of NCBI NO: 34902182 NR Description: Putative transporter [Oryza sativa (japonica group)] >gi|27476097|gb|AAO17028.1| Putative transporter [Oryza
  misc_feature (1)..(446): Homolog of NCBI NO: 37536124 NR Description: putative transporter [Oryza sativa (japonica group)] >gi|10122032|gb|AAG13421.1| putative transporter [Oryza
  misc_feature (1)..(332): Homolog of NCBI NO: 7487513 NR Description: hypothetical protein T29A15.210 - Arabidopsis >gi|4469023|emb|CAB38284.1| putative protein [Arabidopsis >gi|7269626|emb|CAB81422.1| putative protein [Arabidopsis
  misc_feature (1)..(427): Homolog of NCBI NO: 39587911 NR Description: Hypothetical protein CBG13530 [Caenorhabditis
MAAVVAALELSKTNKDRINTSSSFNSFKNNYLLVFSIMMAGDWLQGPYVYYLYSTYGFGKGDIGQLFIAGFGSSMLFGTIVGSLADKQGRKRACVTYCIVYILSCITKHSPQYKVLMVGRILGGIATSLLFSAFESWLIAEHNKRNFEQQWLSLTFSKAVFLGNGLVAILSGLFGNLLVDTFSFGPVAPFDAAACFLAIGMAIILGTWSENFGDPSDSKDLLTQFKVAAIAIASDEKIALLGAIQSLFEASMYTFVFLWTPALSPNDEEIPHGFVFATFMLASMLGSSLAARLMSRSSLRVENYMQIVFLVSAASLLLPITTSVLVTPSKVKDEGLSLTSSIQLLGFCVFESCVGIFWPSIMKMRSQYIPEEARSTIMNFFRVPLNIFVCIVLYNVDAFPITIMFGMCSIFLFVASILQRRLMVISEKPKAEDWSPMKERNSEVDPLTL

SEQ ID NO: 70726 - protein, 412 aa, Arabidopsis thaliana
  peptide (1)..(412): Ceres Seq. ID no. 2731010
  misc_feature (1)..(310): Pfam Name: Protein of unknown function (DUF791) Pfam Description: Protein of unknown function (DUF791)
  misc_feature (1)..(412): Homolog of NCBI NO: 30693172 NR Description: expressed protein [Arabidopsis thaliana]
  misc_feature (96)..(412): Homolog of NCBI NO: 11292198 NR Description: hypothetical protein F2K15.170 - Arabidopsis >gi|6723401|emb|CAB66410.1| putative protein [Arabidopsis
  misc_feature (1)..(107): Homolog of NCBI NO: 11292198 NR Description: hypothetical protein F2K15.170 - Arabidopsis >gi|6723401|emb|CAB66410.1| putative protein [Arabidopsis
  misc_feature (1)..(412): Homolog of NCBI NO: 18417054 NR Description: putative protein; protein id: At4g27720.1, by cDNA: 113484., supported by cDNA: gi_13272472, supported by gi_15912260, supported by cDNA: gi_16930438 [Arabidopsis
  misc_feature (1)..(410): Homolog of NCBI NO: 15217708 NR Description: unknown protein; protein id: At1g64650.1
  misc_feature (1)..(410): Homolog of NCBI NO: 6633826 NR Description: F1N19.22 [Arabidopsis thaliana]
  misc_feature (1)..(410): Homolog of NCBI NO: 34902182 NR Description: Putative transporter [Oryza sativa (japonica group)] >gi|27476097|gb|AAO17028.1| Putative transporter [Oryza
  misc_feature (1)..(409): Homolog of NCBI NO: 37536124 NR Description: putative transporter [Oryza sativa (japonica group)] >gi|10122032|gb|AAG13421.1| putative transporter [Oryza
  misc_feature (1)..(295): Homolog of NCBI NO: 7487513 NR Description: hypothetical protein T29A15.210 - Arabidopsis >gi|4469023|emb|CAB38284.1| putative protein [Arabidopsis >gi|7269626|emb|CAB81422.1| putative protein [Arabidopsis
  misc_feature (1)..(390): Homolog of NCBI NO: 39587911 NR Description: Hypothetical protein CBG13530 [Caenorhabditis
MMAGDWLQGPYVYYLYSTYGFGKGDIGQLFIAGFGSSMLFGTIVGSLADKQGRKRACVTYCIVYILSCITKHSPQYKVLMVGRILGGIATSLLFSAFESWLIAEHNKRNFEQQWLSLTFSKAVFLGNGLVAILSGLFGNLLVDTFSFGPVAPFDAAACFLAIGMAIILGTWSENFGDPSDSKDLLTQFKVAAIAIASDEKIALLGAIQSLFEASMYTFVFLWTPALSPNDEEIPHGFVFATFMLASMLGSSLAARLMSRSSLRVENYMQIVFLVSAASLLLPITTSVLVTPSKVKDEGLSLTSSIQLLGFCVFESCVGIFWPSIMKMRSQYIPEEARSTIMNFFRVPLNIFVCIVLYNVDAFPITIMFGMCSIFLFVASILQRRLMVISEKPKAEDWSPMKERNSEVDPLTL

SEQ ID NO: 70727 - DNA, 2193 bp, Arabidopsis thaliana
  misc_feature (1)..(2193): Ceres Seq. ID no. 2731141
atggctaccggaaacttggcttctcgtcttcatctcttgatcgatctttgtgttcgccaattccctgaaagagaagaagtaactttgccgacgaaggaaacggaaaaagatctgcttctttctctatctcaggtgttgagagaaattcaatcttggaggagcgaaatttcatgtgataaggcggtggaatcgcgagaggagactgttgttgatcatgatgaatctgctgatgctttatatggtccagactctatagagtatttatgcttagaaagacttgtggcggatcttaatgtgcatgttaaacatttggctggcaacatacttgtggaagtatccggttgtcttgttgaatctggaagtcaatgggatgagttcattcgtttgctttgtgaatgtttgcggttagcagttatctacagtttcccaattcctgctgtaggatctgaaactggatttggaagtctagatcaatgtttcttcggttctgatgttcttaaatgtaagctggaaaaggctaactggtccacggtgtcggatatctttcgagttcttcgtaatatattgaagcgcttgagccaagaagacaatgaggaaatttttgatgtatacttggaatctgtcaactctacacttgcaaaagttccttggtgccgattggatactattttttctcatcagcatggtagtggtgaaagaaatttccaaggtcagagtggaaacagtgaggaagcaactgtatttcttgggagctttgtccagtttctctgttccatggttcagcaggttcatgttgtagaagattctgatgattttgaaccttcatatttgatcctccaaaaaaccatcaagcttattccggatctcctccgttggtgccaaccaaagttgaaaagtcaaagtggctcttgcatgtcaagatacctagggcacaagttactggtgttgatgatcaggcttactgataagtccaaaatcaaatgtaccattcttctttcatggctgcaatatttgcaacgggattctcaaggctttcttcaacacaccctaacaaagtttaaacccgttcaagataattgtttggagggttcgccattctttgtgagtttgtctgatagggaggtcaatgagatgcattctaatcatttgcaaagactctctgtgtttctgttcctacggtgctccttcactttgatttactcaagtagacataacgacaagctatgtgagtttgattgtagaaagaaagggatggcagagatgtttaaatggattgaacgacagattccaggcaatatgttttctgatcacagaatttatagcaagaagaatgttgaattttctgcatccttcgttcggctgttcatgcatgaggatgatctattatttaaagtcctcctgcaattgctgtctgtaccattgcatagacaggaattgcctaacgtggaagggggttcgcttgaagatgaggaacaaattactctcttccgtttatcaaccttgttcaatcctgtaagattattctgtatatttctttcagagctgcattatgatcatcaagtacttcttgattaccttatatctaaagatattggggctagctgcgcagagtacctgctgagatgcttgcgtgcagtatgtgattcatggactctatttgtggaattcccatttgaaggaagtacagatgctccatctccgaagagaagaaaagttttgcctgagacttctgaggttgaacaaaactggagattacatgcccaggcttttgaagacgccaaagattgtctgctttcgttacaaaattcagttgttaagctacatcagaagaaactgtttccatacaacccagaggctcttctacgacgctctgtctatcccatgagtaatatatctggaccaaagcaaaatgttgtgatccttagtttgtgggttgcggtgagattctctgagacagaacagaaggatcagatgccaacacaaagaagtctcctttccagatcaaatttcaaactaatcggctcaccagtagaagtgtatagagatcctacattctttggttggtgcagctgctatgaaacagagagcattatgttcttgcctccacaatccaaatctgaatggtataagatactctctagtcaagctaatgtgaaactgccccagccaattagagtaagcaatgaagtgtag

SEQ ID NO: 70728 - protein, 730 aa, Arabidopsis thaliana
  peptide (1)..(730): Ceres Seq. ID no. 2731142
  misc_feature (164)..(622): Homolog of NCBI NO: 33146559 NR Description: unknown protein [Oryza sativa (japonica
  misc_feature (13)..(369): Homolog of NCBI NO: 34915430 NR Description: hypothetical protein~similar to Arabidopsis
  misc_feature (434)..(622): Homolog of NCBI NO: 34915430 NR Description: hypothetical protein~similar to Arabidopsis
MATGNLASRLHLLIDLCVRQFPEREEVTLPTKETEKDLLLSLSQVLREIQSWRSEISCDKAVESREETVVDHDESADALYGPDSIEYLCLERLVADLNVHVKHLAGNILVEVSGCLVESGSQWDEFIRLLCECLRLAVIYSFPIPAVGSETGFGSLDQCFFGSDVLKCKLEKANWSTVSDIFRVLRNILKRLSQEDNEEIFDVYLESVNSTLAKVPWCRLDTIFSHQHGSGERNFQGQSGNSEEATVFLGSFVQFLCSMVQQVHVVEDSDDFEPSYLILQKTIKLIPDLLRWCQPKLKSQSGSCMSRYLGHKLLVLMIRLTDKSKIKCTILLSWLQYLQRDSQGFLQHTLTKFKPVQDNCLEGSPFFVSLSDREVNEMHSNHLQRLSVFLFLRCSFTLIYSSRHNDKLCEFDCRKKGMAEMFKWIERQIPGNMFSDHRIYSKKNVEFSASFVRLFMHEDDLLFKVLLQLLSVPLHRQELPNVEGGSLEDEEQITLFRLSTLFNPVRLFCIFLSELHYDHQVLLDYLISKDIGASCAEYLLRCLRAVCDSWTLFVEFPFEGSTDAPSPKRRKVLPETSEVEQNWRLHAQAFEDAKDCLLSLQNSVVKLHQKKLFPYNPEALLRRSVYPMSNISGPKQNVVILSLWVAVRFSETEQKDQMPTQRSLLSRSNFKLIGSPVEVYRDPTFFGWCSCYETESIMFLPPQSKSEWYKILSSQANVKLPQPIRVSNEV

SEQ ID NO: 70729 - protein, 472 aa, Arabidopsis thaliana
  peptide (1)..(472): Ceres Seq. ID no. 2731143
  misc_feature (1)..(364): Homolog of NCBI NO: 33146559 NR Description: unknown protein [Oryza sativa (japonica
  misc_feature (1)..(111): Homolog of NCBI NO: 34915430 NR Description: hypothetical protein~similar to Arabidopsis
  misc_feature (176)..(364): Homolog of NCBI NO: 34915430 NR Description: hypothetical protein~similar to Arabidopsis
MVQQVHVVEDSDDFEPSYLILQKTIKLIPDLLRWCQPKLKSQSGSCMSRYLGHKLLVLMIRLTDKSKIKCTILLSWLQYLQRDSQGFLQHTLTKFKPVQDNCLEGSPFFVSLSDREVNEMHSNHLQRLSVFLFLRCSFTLIYSSRHNDKLCEFDCRKKGMAEMFKWIERQIPGNMFSDHRIYSKKNVEFSASFVRLFMHEDDLLFKVLLQLLSVPLHRQELPNVEGGSLEDEEQITLFRLSTLFNPVRLFCIFLSELHYDHQVLLDYLISKDIGASCAEYLLRCLRAVCDSWTLFVEFPFEGSTDAPSPKRRKVLPETSEVEQNWRLHAQAFEDAKDCLLSLQNSVVKLHQKKLFPYNPEALLRRSVYPMSNISGPKQNVVILSLWVAVRFSETEQKDQMPTQRSLLSRSNFKLIGSPVEVYRDPTFFGWCSCYETESIMFLPPQSKSEWYKILSSQANVKLPQPIRVSNEV

SEQ ID NO: 70730 - protein, 426 aa, Arabidopsis thaliana
  peptide (1)..(426): Ceres Seq. ID no. 2731144
  misc_feature (1)..(318): Homolog of NCBI NO: 33146559 NR Description: unknown protein [Oryza sativa (japonica
  misc_feature (1)..(65): Homolog of NCBI NO: 34915430 NR Description: hypothetical protein~similar to Arabidopsis
  misc_feature (130)..(318): Homolog of NCBI NO: 34915430 NR Description: hypothetical protein~similar to Arabidopsis
MSRYLGHKLLVLMIRLTDKSKIKCTILLSWLQYLQRDSQGFLQHTLTKFKPVQDNCLEGSPFFVSLSDREVNEMHSNHLQRLSVFLFLRCSFTLIYSSRHNDKLCEFDCRKKGMAEMFKWIERQIPGNMFSDHRIYSKKNVEFSASFVRLFMHEDDLLFKVLLQLLSVPLHRQELPNVEGGSLEDEEQITLFRLSTLFNPVRLFCIFLSELHYDHQVLLDYLISKDIGASCAEYLLRCLRAVCDSWTLFVEFPFEGSTDAPSPKRRKVLPETSEVEQNWRLHAQAFEDAKDCLLSLQNSVVKLHQKKLFPYNPEALLRRSVYPMSNISGPKQNVVILSLWVAVRFSETEQKDQMPTQRSLLSRSNFKLIGSPVEVYRDPTFFGWCSCYETESIMFLPPQSKSEWYKILSSQANVKLPQPIRVSNEV

SEQ ID NO: 70731 - DNA, 2385 bp, Arabidopsis thaliana
  misc_feature (1)..(2385): Ceres Seq. ID no. 2731145
  misc_feature: MA Experiment ID: 20001247 Result: Down-regulated in Transcription
  misc_feature: MA Experiment 20001247 PARAMETER Experiment Name: At_Far-red-induction_P Parameter: Age (day) Value: 7
  misc_feature: MA Experiment 20001247 PARAMETER Experiment Name: At_Far-red-induction_P Parameter: Light Value: Far-red vs. White
  misc_feature: MA Experiment 20001247 PARAMETER Experiment Name: At_Far-red-induction_P Parameter: Organism Value: A. thaliana
  misc_feature: MA Experiment 20001247 PARAMETER Experiment Name: At_Far-red-induction_P Parameter: Plant Line Value: Columbia
  misc_feature: MA Experiment 20001247 PARAMETER Experiment Name: At_Far-red-induction_P Parameter: Timepoint (hr) Value: 1
  misc_feature: MA Experiment 20001247 PARAMETER Experiment Name: At_Far-red-induction_P Parameter: Tissue Value: Whole Plant
atgacgagaggttcgatgaaacgcagcgtattgtttgtagagacagacgccgctgccgagtatccgtacgcaaataacaatctcatatcgatgtacgtgaggtgtagttcgctggaacaagcacggaaagtgttcgacaaaatgcctcagagaaacattgtaactctattcggacttagtgctgtatttgagtatgtttccatgggatcatcactgcattcgcagattataaagcttggatcttttcagatgatcttttttatgccactgaacgaaatagcttcttccgttgtagaacttacacggaaatgcgtctcgatcacggtactaaaacgggcgcgtcagatccacgctctcgtcctcaccgccggcgctggcgccgctaccgagtctccgtacgcaaataacaatctcatctcaatgtatgtgaggtgtggttcactggaacaagcacggaaagtgttcgacaaaatgcctcacagaaacgtagtttcttataatgcgctttattcggcgtattcccggaacccagattttgcaagttatgcgtttcctctaacaacccatatggcgtttgagtacgtgaagcccaatagttcaactttcactagcttagtgcaagtatgtgctgtgcttgaggatgttttaatggggtcatcattaaactcgcagattataaagcttggttattcagataatgtagttgtccagacatcggttttggggatgtactctagttgcggggacttagaatctgcgaggagaatatttgactgtgtaaataatagagatgcggttgcttggaacacaatgatagttgggagtttgaaaaatgataagatagaagatgggcttatgttctttcgaaacatgttgatgtctggtgttgatccaacgcagttcacgtattcgattgtgttgaatggttgtagtaaattgggaagctattcactggggaaactaatccatgcccggataatagtctctgatagtttagctgatttacctctagataatgctcttcttgacatgtattgcagttgtggagacatgagggaagcattttatgtgtttgggaggattcataacccaaatttggtttcatggaactcgattatttcagggtgctcagaaaacggctttggagagcaagcgatgcttatgtatagaaggttgctgaggatgtccacacctcggccggatgaatatactttctctgctgctatatctgcgacagcggaaccagaaagatttgttcatgggaagcttcttcacggacaagtaacgaaattaggatatgaaaggagtgtttttgttggaacaacactattgtcgatgtacttcaagaacagggaagctgaatctgcacagaaggtgtttgatgtgatgaaggaaagggatgttgttctctggactgagatgatcgtagggcattctagattaggaaacagcgaattagcggtccaattcttcattgaaatgtacagagaaaagaatagaagtgatggtttttccctgagtagtgtcataggagcatgttcagatatggcaatgctaagacaaggtgaagttttccattgtcttgccataaggacgggattcgattgtgttatgtcagtatgtggagcgctagtagacatgtatgggaaaaacggtaaatacgaaactgcagaaacaatattctctcttgcttcaaatccagatttgaaatgttggaattcgatgctaggtgcttatagtcagcatggaatggtagaaaaagctctgagcttcttcgagcaaatactagaaaacggattcatgccagatgctgttacatacttgtctttattagcagcctgtagccacaggggatcaacgttgcaaggtaagttcctatggaaccaaatgaaggaacagggcatcaaagcagggtttaagcactactcttgcatggtgaatttagtatcaaaagctgggttagtagacgaggcactggaactgatagaacaatctcctcccgggaacaaccaagcagagctctggagaactctgctaagcgcatgtgttaacacaagaaacttgcagataggactatatgcagctgagcaaatactgaaacttgatccagaagacactgcaacacacattctactatcaaatttatatgcagtaaatgggagatgggaggatgttgcagagatgagaaggaagattagaggattagcttcatctaaagatccaggattgagctggattgaagtgaacaacaacaatacacaagttttctcctcaggagaccagtcgaacccagaagttgtaagtcaagctcaagatgaattaaatagattaaagagaaatatgttgtgcaaatcatcattcaataaacttgtctgttcaaattaa

SEQ ID NO: 70732 - protein, 794 aa, Arabidopsis thaliana
  peptide (1)..(794): Ceres Seq. ID no. 2731146
  misc_feature (570)..(604): Pfam Name: PPR repeat Pfam Description: PPR repeat
  misc_feature (90)..(787): Homolog of NCBI NO: 32488730 NR Description: OSJNBb0004A17.9 [Oryza sativa (japonica
  misc_feature (26)..(776): Homolog of NCBI NO: 15236324 NR Description: putative protein; protein id: At4g13650.1
  misc_feature (23)..(792): Homolog of NCBI NO: 38423978 NR Description: PPR-repeat protein-like [Oryza sativa (japonica
  misc_feature (33)..(778): Homolog of NCBI NO: 15226200 NR Description: putative selenium-binding protein; protein id:
  misc_feature (28)..(766): Homolog of NCBI NO: 15232006 NR Description: hypothetical protein; protein id: At3g09040.1 thaliana] >gi|5923669|gb|AAD56320.1|AC009326_7 hypothetical
  misc_feature (110)..(782): Homolog of NCBI NO: 15226150 NR Description: hypothetical protein; protein id: At2g33680.1
  misc_feature (23)..(763): Homolog of NCBI NO: 15235115 NR Description: putative protein; protein id: At4g39530.1
  misc_feature (104)..(778): Homolog of NCBI NO: 34896392 NR Description: hypothetical protein [Oryza sativa (japonica group)] >gi|19697432|gb|AAL93067.1| hypothetical protein [Oryza
  misc_feature (100)..(766): Homolog of NCBI NO: 15240583 NR Description: putative protein; protein id: At5g13230.1
  misc_feature (22)..(782): Homolog of NCBI NO: 15226737 NR Description: unknown protein; protein id: At2g40720.1
MTRGSMKRSVLFVETDAAAEYPYANNNLISMYVRCSSLEQARKVFDKMPQRNIVTLFGLSAVFEYVSMGSSLHSQIIKLGSFQMIFFMPLNEIASSVVELTRKCVSITVLKRARQIHALVLTAGAGAATESPYANNNLISMYVRCGSLEQARKVFDKMPHRNVVSYNALYSAYSRNPDFASYAFPLTTHMAFEYVKPNSSTFTSLVQVCAVLEDVLMGSSLNSQIIKLGYSDNVVVQTSVLGMYSSCGDLESARRIFDCVNNRDAVAWNTMIVGSLKNDKIEDGLMFFRNMLMSGVDPTQFTYSIVLNGCSKLGSYSLGKLIHARIIVSDSLADLPLDNALLDMYCSCGDMREAFYVFGRIHNPNLVSWNSIISGCSENGFGEQAMLMYRRLLRMSTPRPDEYTFSAAISATAEPERFVHGKLLHGQVTKLGYERSVFVGTTLLSMYFKNREAESAQKVFDVMKERDVVLWTEMIVGHSRLGNSELAVQFFIEMYREKNRSDGFSLSSVIGACSDMAMLRQGEVFHCLAIRTGFDCVMSVCGALVDMYGKNGKYETAETIFSLASNPDLKCWNSMLGAYSQHGMVEKALSFFEQILENGFMPDAVTYLSLLAACSHRGSTLQGKFLWNQMKEQGIKAGFKHYSCMVNLVSKAGLVDEALELIEQSPPGNNQAELWRTLLSACVNTRNLQIGLYAAEQILKLDPEDTATHILLSNLYAVNGRWEDVAEMRRKIRGLASSKDPGLSWIEVNNNNTQVFSSGDQSNPEVVSQAQDELNRLKRNMLCKSSFNKLVCSN

SEQ ID NO: 70733 - protein, 789 aa, Arabidopsis thaliana
  peptide (1)..(789): Ceres Seq. ID no. 2731147
  misc_feature (565)..(599): Pfam Name: PPR repeat Pfam Description: PPR repeat
  misc_feature (105)..(777): Homolog of NCBI NO: 15226150 NR Description: hypothetical protein; protein id: At2g33680.1
  misc_feature (18)..(758): Homolog of NCBI NO: 15235115 NR Description: putative protein; protein id: At4g39530.1
  misc_feature (99)..(773): Homolog of NCBI NO: 34896392 NR Description: hypothetical protein [Oryza sativa (japonica group)] >gi|19697432|gb|AAL93067.1| hypothetical protein [Oryza
  misc_feature (21)..(771): Homolog of NCBI NO: 15236324 NR Description: putative protein; protein id: At4g13650.1
  misc_feature (28)..(773): Homolog of NCBI NO: 15226200 NR Description: putative selenium-binding protein; protein id:
  misc_feature (23)..(761): Homolog of NCBI NO: 15232006 NR Description: hypothetical protein; protein id: At3g09040.1 thaliana] >gi|5923669|gb|AAD56320.1|AC009326_7 hypothetical
  misc_feature (18)..(787): Homolog of NCBI NO: 38423978 NR Description: PPR-repeat protein-like [Oryza sativa (japonica
  misc_feature (85)..(782): Homolog of NCBI NO: 32488730 NR Description: OSJNBb0004A17.9 [Oryza sativa (japonica
  misc_feature (95)..(761): Homolog of NCBI NO: 15240583 NR Description: putative protein; protein id: At5g13230.1
  misc_feature (17)..(777): Homolog of NCBI NO: 15226737 NR Description: unknown protein; protein id: At2g40720.1
MKRSVLFVETDAAAEYPYANNNLISMYVRCSSLEQARKVFDKMPQRNIVTLFGLSAVFEYVSMGSSLHSQIIKLGSFQMIFFMPLNEIASSVVELTRKCVSITVLKRARQIHALVLTAGAGAATESPYANNNLISMYVRCGSLEQARKVFDKMPHRNVVSYNALYSAYSRNPDFASYAFPLTTHMAFEYVKPNSSTFTSLVQVCAVLEDVLMGSSLNSQIIKLGYSDNVVVQTSVLGMYSSCGDLESARRIFDCVNNRDAVAWNTMIVGSLKNDKIEDGLMFFRNMLMSGVDPTQFTYSIVLNGCSKLGSYSLGKLIHARIIVSDSLADLPLDNALLDMYCSCGDMREAFYVFGRIHNPNLVSWNSIISGCSENGFGEQAMLMYRRLLRMSTPRPDEYTFSAAISATAEPERFVHGKLLHGQVTKLGYERSVFVGTTLLSMYFKNREAESAQKVFDVMKERDVVLWTEMIVGHSRLGNSELAVQFFIEMYREKNRSDGFSLSSVIGACSDMAMLRQGEVFHCLAIRTGFDCVMSVCGALVDMYGKNGKYETAETIFSLASNPDLKCWNSMLGAYSQHGMVEKALSFFEQILENGFMPDAVTYLSLLAACSHRGSTLQGKFLWNQMKEQGIKAGFKHYSCMVNLVSKAGLVDEALELIEQSPPGNNQAELWRTLLSACVNTRNLQIGLYAAEQILKLDPEDTATHILLSNLYAVNGRWEDVAEMRRKIRGLASSKDPGLSWIEVNNNNTQVFSSGDQSNPEVVSQAQDELNRLKRNMLCKSSFNKLVCSN

SEQ ID NO: 70734 - protein, 764 aa, Arabidopsis thaliana
  peptide (1)..(764): Ceres Seq. ID no. 2731148
  misc_feature (540)..(574): Pfam Name: PPR repeat Pfam Description: PPR repeat
  misc_feature (60)..(757): Homolog of NCBI NO: 32488730 NR Description: OSJNBb0004A17.9 [Oryza sativa (japonica
  misc_feature (1)..(746): Homolog of NCBI NO: 15236324 NR Description: putative protein; protein id: At4g13650.1
  misc_feature (1)..(762): Homolog of NCBI NO: 38423978 NR Description: PPR-repeat protein-like [Oryza sativa (japonica
  misc_feature (3)..(748): Homolog of NCBI NO: 15226200 NR Description: putative selenium-binding protein; protein id:
  misc_feature (1)..(736): Homolog of NCBI NO: 15232006 NR Description: hypothetical protein; protein id: At3g09040.1 thaliana] >gi|5923669|gb|AAD56320.1|AC009326_7 hypothetical
  misc_feature (80)..(752): Homolog of NCBI NO: 15226150 NR Description: hypothetical protein; protein id: At2g33680.1
  misc_feature (1)..(733): Homolog of NCBI NO: 15235115 NR Description: putative protein; protein id: At4g39530.1
  misc_feature (74)..(748): Homolog of NCBI NO: 34896392 NR Description: hypothetical protein [Oryza sativa (japonica group)] >gi|19697432|gb|AAL93067.1| hypothetical protein [Oryza
  misc_feature (70)..(736): Homolog of NCBI NO: 15240583 NR Description: putative protein; protein id: At5g13230.1
  misc_feature (1)..(752): Homolog of NCBI NO: 15226737 NR Description: unknown protein; protein id: At2g40720.1
MYVRCSSLEQARKVFDKMPQRNIVTLFGLSAVFEYVSMGSSLHSQIIKLGSFQMIFFMPLNEIASSVVELTRKCVSITVLKRARQIHALVLTAGAGAATESPYANNNLISMYVRCGSLEQARKVFDKMPHRNVVSYNALYSAYSRNPDFASYAFPLTTHMAFEYVKPNSSTFTSLVQVCAVLEDVLMGSSLNSQIIKLGYSDNVVVQTSVLGMYSSCGDLESARRIFDCVNNRDAVAWNTMIVGSLKNDKIEDGLMFFRNMLMSGVDPTQFTYSIVLNGCSKLGSYSLGKLIHARIIVSDSLADLPLDNALLDMYCSCGDMREAFYVFGRIHNPNLVSWNSIISGCSENGFGEQAMLMYRRLLRMSTPRPDEYTFSAAISATAEPERFVHGKLLHGQVTKLGYERSVFVGTTLLSMYFKNREAESAQKVFDVMKERDVVLWTEMIVGHSRLGNSELAVQFFIEMYREKNRSDGFSLSSVIGACSDMAMLRQGEVFHCLAIRTGFDCVMSVCGALVDMYGKNGKYETAETIFSLASNPDLKCWNSMLGAYSQHGMVEKALSFFEQILENGFMPDAVTYLSLLAACSHRGSTLQGKFLWNQMKEQGIKAGFKHYSCMVNLVSKAGLVDEALELIEQSPPGNNQAELWRTLLSACVNTRNLQIGLYAAEQILKLDPEDTATHILLSNLYAVNGRWEDVAEMRRKIRGLASSKDPGLSWIEVNNNNTQVFSSGDQSNPEVVSQAQDELNRLKRNMLCKSSFNKLVCSN

SEQ ID NO: 70735 - DNA, 678 bp, Arabidopsis thaliana
  misc_feature (1)..(678): Ceres Seq. ID no. 2992353
  misc_feature: MA Experiment ID: 20000185 Result: Up-regulated in Transcription
  misc_feature: MA Experiment 20000185 PARAMETER Experiment Name: At_Roots__P Parameter: Age (day) Value: 7 vs. 21
  misc_feature: MA Experiment 20000185 PARAMETER Experiment Name: At_Roots__P Parameter: Organism Value: A. thaliana
  misc_feature: MA Experiment 20000185 PARAMETER Experiment Name: At_Roots__P Parameter: Tissue Value: Roots vs. Whole Plant
  misc_feature: MA Experiment ID: 20000234 Result: Up-regulated in Transcription
  misc_feature: MA Experiment 20000234 PARAMETER Experiment Name: At_Siliques_P Parameter: Age (day) Value: 21
  misc_feature: MA Experiment 20000234 PARAMETER Experiment Name: At_Siliques_P Parameter: Organism Value: A. thaliana
  misc_feature: MA Experiment 20000234 PARAMETER Experiment Name: At_Siliques_P Parameter: Plant Line Value: WS
  misc_feature: MA Experiment 20000234 PARAMETER Experiment Name: At_Siliques_P Parameter: Tissue Value: Less Than 5mm Siliques vs. Whole Plant
  misc_feature: MA Experiment ID: 20000235 Result: Up-regulated in Transcription
  misc_feature: MA Experiment 20000235 PARAMETER Experiment Name: At_Siliques_P Parameter: Age (day) Value: 21
  misc_feature: MA Experiment 20000235 PARAMETER Experiment Name: At_Siliques_P Parameter: Organism Value: A. thaliana
  misc_feature: MA Experiment 20000235 PARAMETER Experiment Name: At_Siliques_P Parameter: Plant Line Value: WS
  misc_feature: MA Experiment 20000235 PARAMETER Experiment Name: At_Siliques_P Parameter: Tissue Value: 5-10mm Siliques vs. Whole Plant
  misc_feature: MA Experiment ID: 20000265 Result: Up-regulated in Transcription
  misc_feature: MA Experiment 20000265 PARAMETER Experiment Name: At_Open_Flower_P Parameter: Age (day) Value: 21
  misc_feature: MA Experiment 20000265 PARAMETER Experiment Name: At_Open_Flower_P Parameter: Plant Line Value: WS
  misc_feature: MA Experiment 20000265 PARAMETER Experiment Name: At_Open_Flower_P Parameter: Tissue Value: Closed Flower vs. Whole Plant
  misc_feature: MA Experiment ID: 20000439 Result: Up-regulated in Transcription
  misc_feature: MA Experiment 20000439 PARAMETER Experiment Name: At_Roots__P Parameter: Age (day) Value: 14 vs. 21
  misc_feature: MA Experiment 20000439 PARAMETER Experiment Name: At_Roots__P Parameter: Organism Value: A. thaliana
  misc_feature: MA Experiment 20000439 PARAMETER Experiment Name: At_Roots__P Parameter: Tissue Value: Roots vs. Whole Plant
  misc_feature: MA Experiment ID: 20001557 Result: Up-regulated in Transcription
  misc_feature: MA Experiment 20001557 PARAMETER Experiment Name: At_Drought_Soil_Dry_P Parameter: Age (day) Value: 27
  misc_feature: MA Experiment 20001557 PARAMETER Experiment Name: At_Drought_Soil_Dry_P Parameter: Organism Value: A. thaliana
  misc_feature: MA Experiment 20001557 PARAMETER Experiment Name: At_Drought_Soil_Dry_P Parameter: Plant Line Value: WS
  misc_feature: MA Experiment 20001557 PARAMETER Experiment Name: At_Drought_Soil_Dry_P Parameter: Post Timepoint (hr) Value: 3
  misc_feature: MA Experiment 20001557 PARAMETER Experiment Name: At_Drought_Soil_Dry_P Parameter: Post-Treatment Value: Re-Water vs. No Drought
  misc_feature: MA Experiment 20001557 PARAMETER Experiment Name: At_Drought_Soil_Dry_P Parameter: Timepoint (day) Value: 13
  misc_feature: MA Experiment 20001557 PARAMETER Experiment Name: At_Drought_Soil_Dry_P Parameter: Treatment Value: Drought vs. No Drought
  misc_feature: MA Experiment ID: 20001560 Result: Up-regulated in Transcription
  misc_feature: MA Experiment 20001560 PARAMETER Experiment Name: At_Drought_Soil_Dry_P Parameter: Age (day) Value: 28
  misc_feature: MA Experiment 20001560 PARAMETER Experiment Name: At_Drought_Soil_Dry_P Parameter: Organism Value: A. thaliana
  misc_feature: MA Experiment 20001560 PARAMETER Experiment Name: At_Drought_Soil_Dry_P Parameter: Plant Line Value: WS
  misc_feature: MA Experiment 20001560 PARAMETER Experiment Name: At_Drought_Soil_Dry_P Parameter: Post Timepoint (hr) Value: None
  misc_feature: MA Experiment 20001560 PARAMETER Experiment Name: At_Drought_Soil_Dry_P Parameter: Post-Treatment Value: None
  misc_feature: MA Experiment 20001560 PARAMETER Experiment Name: At_Drought_Soil_Dry_P Parameter: Timepoint (day) Value: 14
  misc_feature: MA Experiment 20001560 PARAMETER Experiment Name: At_Drought_Soil_Dry_P Parameter: Treatment Value: Drought vs. No Drought
atggcggctgctgcaagaaattatcaaaaggaagttcttgcaaatgagaaggcgcaaggatcaaatcctgttaatgaagaggttgatcttgatgaacttatggatgatccagagctagaaagattgcacgcagataggattgcagcactaaagagagaggttgagaagagagaatcgtttaaaagacaagggcatggtgaatatcgagaggtgagtgaaggagatttcttgggtgaagtcaccaggagtgagaaagtgatatgtcatttctaccataaggaattttaccggtgcaagattatggacaagcatctgaaaactcttgcacctagacatgtggacacaaagttcattaaagtggacgcagagaatgctcctttctttgtcacgaagcttgcaataaagactttgccttgcgttgtgcttttcagcaagggagttgcgatggataggctagttgggttccaggatctgggaaccaaggacgatttcacaacgaataaactagagaacgttcttcttaaaaaggttagagaatttttgcttaaagagtgcaaatctttaacaggaatgctcagcaagaagaagaaagaggaagatgatgaagacgccgaatatcaagagagcatacggaggtctgttaggtcttcagagaatctggactctgattctgactga

SEQ ID NO: 70736 - protein, 225 aa, Arabidopsis thaliana
  peptide (1)..(225): Ceres Seq. ID no. 2992354
  misc_feature (1)..(225): Homolog of NCBI NO: 7485705 NR Description: hypothetical protein F18B3.240 - Arabidopsis >gi|4835247|emb|CAB42925.1| putative tRNA synthetase [Arabidopsis
  misc_feature (1)..(225): Homolog of NCBI NO: 30693386 NR Description: expressed protein [Arabidopsis thaliana]
  misc_feature (1)..(225): Homolog of NCBI NO: 10177522 NR Description: contains similarity to ATP binding protein
  misc_feature (1)..(225): Homolog of NCBI NO: 18425069 NR Description: putative protein; protein id: At5g66410.1,
  misc_feature (11)..(170): Homolog of NCBI NO: 25286717 NR Description: ATP binding protein associated with cell [Mus musculus] >gi|12833213|dbj|BAB22438.1| unnamed protein [Mus musculus] >gi|12839124|dbj|BAB24440.1| unnamed protein
  misc_feature (11)..(170): Homolog of NCBI NO: 25282435 NR Description: ES cell-related protein; ATP binding protein
  misc_feature (2)..(170): Homolog of NCBI NO: 18104959 NR Description: ATP binding protein associated with cell
  misc_feature (2)..(170): Homolog of NCBI NO: 19683948 NR Description: Similar to ATP binding protein associated with
  misc_feature (1)..(170): Homolog of NCBI NO: 28277604 NR Description: Similar to ATP binding protein associated with
  misc_feature (2)..(170): Homolog of NCBI NO: 2342477 NR Description: ATP binding protein [Homo sapiens]
MAAAARNYQKEVLANEKAQGSNPVNEEVDLDELMDDPELERLHADRIAALKREVEKRESFKRQGHGEYREVSEGDFLGEVTRSEKVICHFYHKEFYRCKIMDKHLKTLAPRHVDTKFIKVDAENAPFFVTKLAIKTLPCVVLFSKGVAMDRLVGFQDLGTKDDFTTNKLENVLLKKVREFLLKECKSLTGMLSKKKKEEDDEDAEYQESIRRSVRSSENLDSDSD

SEQ ID NO: 70737 - protein, 192 aa, Arabidopsis thaliana
  peptide (1)..(192): Ceres Seq. ID no. 2992355
  misc_feature (1)..(192): Homolog of NCBI NO: 7485705 NR Description: hypothetical protein F18B3.240 - Arabidopsis >gi|4835247|emb|CAB42925.1| putative tRNA synthetase [Arabidopsis
  misc_feature (1)..(192): Homolog of NCBI NO: 30693386 NR Description: expressed protein [Arabidopsis thaliana]
  misc_feature (1)..(192): Homolog of NCBI NO: 10177522 NR Description: contains similarity to ATP binding protein
  misc_feature (1)..(192): Homolog of NCBI NO: 18425069 NR Description: putative protein; protein id: At5g66410.1,
  misc_feature (1)..(137): Homolog of NCBI NO: 25286717 NR Description: ATP binding protein associated with cell [Mus musculus] >gi|12833213|dbj|BAB22438.1| unnamed protein [Mus musculus] >gi|12839124|dbj|BAB24440.1| unnamed protein
  misc_feature (1)..(137): Homolog of NCBI NO: 25282435 NR Description: ES cell-related protein; ATP binding protein
  misc_feature (1)..(137): Homolog of NCBI NO: 18104959 NR Description: ATP binding protein associated with cell
  misc_feature (1)..(137): Homolog of NCBI NO: 19683948 NR Description: Similar to ATP binding protein associated with
  misc_feature (1)..(137): Homolog of NCBI NO: 28277604 NR Description: Similar to ATP binding protein associated with
  misc_feature (1)..(137): Homolog of NCBI NO: 2342477 NR Description: ATP binding protein [Homo sapiens]
MDDPELERLHADRIAALKREVEKRESFKRQGHGEYREVSEGDFLGEVTRSEKVICHFYHKEFYRCKIMDKHLKTLAPRHVDTKFIKVDAENAPFFVTKLAIKTLPCVVLFSKGVAMDRLVGFQDLGTKDDFTTNKLENVLLKKVREFLLKECKSLTGMLSKKKKEEDDEDAEYQESIRRSVRSSENLDSDSD

SEQ ID NO: 70738 - protein, 125 aa, Arabidopsis thaliana
  peptide (1)..(125): Ceres Seq. ID no. 2992356
  misc_feature (1)..(125): Homolog of NCBI NO: 7485705 NR Description: hypothetical protein F18B3.240 - Arabidopsis >gi|4835247|emb|CAB42925.1| putative tRNA synthetase [Arabidopsis
  misc_feature (1)..(125): Homolog of NCBI NO: 30693386 NR Description: expressed protein [Arabidopsis thaliana]
  misc_feature (1)..(125): Homolog of NCBI NO: 10177522 NR Description: contains similarity to ATP binding protein
  misc_feature (1)..(125): Homolog of NCBI NO: 18425069 NR Description: putative protein; protein id: At5g66410.1,
  misc_feature (1)..(70): Homolog of NCBI NO: 25286717 NR Description: ATP binding protein associated with cell [Mus musculus] >gi|12833213|dbj|BAB22438.1| unnamed protein [Mus musculus] >gi|12839124|dbj|BAB24440.1| unnamed protein
  misc_feature (1)..(70): Homolog of NCBI NO: 25282435 NR Description: ES cell-related protein; ATP binding protein
  misc_feature (1)..(70): Homolog of NCBI NO: 18104959 NR Description: ATP binding protein associated with cell
  misc_feature (1)..(70): Homolog of NCBI NO: 19683948 NR Description: Similar to ATP binding protein associated with
  misc_feature (1)..(70): Homolog of NCBI NO: 28277604 NR Description: Similar to ATP binding protein associated with
  misc_feature (1)..(70): Homolog of NCBI NO: 2342477 NR Description: ATP binding protein [Homo sapiens]
MDKHLKTLAPRHVDTKFIKVDAENAPFFVTKLAIKTLPCVVLFSKGVAMDRLVGFQDLGTKDDFTTNKLENVLLKKVREFLLKECKSLTGMLSKKKKEEDDEDAEYQESIRRSVRSSENLDSDSD

SEQ ID NO: 70739 - DNA, 639 bp, Arabidopsis thaliana
  misc_feature (1)..(639): Ceres Seq. ID no. 2993897
  misc_feature: MA Experiment ID: 20000179 Result: Up-regulated in Transcription
  misc_feature: MA Experiment 20000179 PARAMETER Experiment Name: At_Germinating_Seeds_P Parameter: Age (hr) Value: 6 vs. 0
  misc_feature: MA Experiment 20000179 PARAMETER Experiment Name: At_Germinating_Seeds_P Parameter: Tissue Value: Germinating Seeds
  misc_feature: MA Experiment ID: 20000180 Result: Up-regulated in Transcription
  misc_feature: MA Experiment 20000180 PARAMETER Experiment Name: At_Germinating_Seeds_P Parameter: Age (hr) Value: 24 vs. 0
  misc_feature: MA Experiment 20000180 PARAMETER Experiment Name: At_Germinating_Seeds_P Parameter: Tissue Value: Germinating Seeds
  misc_feature: MA Experiment ID: 20001451 Result: Down-regulated in Transcription
  misc_feature: MA Experiment 20001451 PARAMETER Experiment Name: At_Far-red-induction_P Parameter: Age (day) Value: 7
  misc_feature: MA Experiment 20001451 PARAMETER Experiment Name: At_Far-red-induction_P Parameter: Light Value: Far-red vs. White
  misc_feature: MA Experiment 20001451 PARAMETER Experiment Name: At_Far-red-induction_P Parameter: Organism Value: A. thaliana
  misc_feature: MA Experiment 20001451 PARAMETER Experiment Name: At_Far-red-induction_P Parameter: Plant Line Value: Columbia
  misc_feature: MA Experiment 20001451 PARAMETER Experiment Name: At_Far-red-induction_P Parameter: Timepoint (hr) Value: 24
  misc_feature: MA Experiment 20001451 PARAMETER Experiment Name: At_Far-red-induction_P Parameter: Tissue Value: Whole Plant
atgtataaagacttgaacatcaatatagtgtgtcctggaaaagattcaactcttggggttgagagtgttggcacagttcctgcatcactcgtgacttatgcttccattctagcaattcaaccagacttaatcattaatgcgggaaccgctggtggctttaaggccaaaggagcatgtattagcgatgtttatgttgtctctactgttgctttccatgacagaagaatacctgttcctgtccttgatatatatggtgttggtatgcggaacaccttccccacacccaaccttataaaggagctgaacctaaaggtgggaagattatccactggcgattctatggatatgtctccacatgacgaagaatccatcacagcaaatgatgctacagttaaagatatggagttactacgacttatttacggattcttggcatttcagggagcagcagtggcctatgtggctgatatctttaaagtgcctacgattctaataaaaggtgtgactgatattgtggatggcaatagaccaacttctgaagaatttttggagaacttagctgcagtcactgccaaacttgatgagtcacttaccaaagtgattgacttcatcagtgggaaatgtctctcagacctctaa

SEQ ID NO: 70740 - protein, 212 aa, Arabidopsis thaliana
  peptide (1)..(212): Ceres Seq. ID no. 2993898
  misc_feature (2)..(196): Pfam Name: Phosphorylase family Pfam Description: Phosphorylase family
  misc_feature (1)..(212): Homolog of NCBI NO: 7486865 NR Description: hypothetical protein T11I11.80 - Arabidopsis >gi|5123701|emb|CAB45445.1| putative protein [Arabidopsis >gi|7270435|emb|CAB80201.1| putative protein [Arabidopsis
  misc_feature (1)..(212): Homolog of NCBI NO: 30690140 NR Description: expressed protein [Arabidopsis thaliana]
  misc_feature (2)..(212): Homolog of NCBI NO: 18087497 NR Description: methylthioadenosine/S-adenosyl homocysteine
  misc_feature (2)..(212): Homolog of NCBI NO: 34897892 NR Description: ESTs C28489(C61317),AU031689(R0560) correspond to region of the predicted gene.~Similar to Arabidopsis thaliana DNA
  misc_feature (1)..(212): Homolog of NCBI NO: 7406708 NR Description: putative ripening-related protein [Vitis vinifera]
  misc_feature (1)..(212): Homolog of NCBI NO: 15234791 NR Description: putative protein; protein id: At4g38800.1, by cDNA: gi_13878068 [Arabidopsis thaliana]
  misc_feature (13)..(193): Homolog of NCBI NO: 23037085 NR Description: hypothetical protein [Oenococcus oeni MCW]
  misc_feature (13)..(177): Homolog of NCBI NO: 24372900 NR Description: 5-methylthioadenosine
  misc_feature (13)..(199): Homolog of NCBI NO: 15793935 NR Description: putative nucleosidase [Neisseria meningitidis Z2491]
  misc_feature (13)..(204): Homolog of NCBI NO: 27364020 NR Description: Nucleoside phosphorylase [Vibrio vulnificus >gi|27360137|gb|AAO09075.1|AE016798_235 Nucleoside phosphorylase
MYKDLNINIVCPGKDSTLGVESVGTVPASLVTYASILAIQPDLIINAGTAGGFKAKGACISDVYVVSTVAFHDRRIPVPVLDIYGVGMRNTFPTPNLIKELNLKVGRLSTGDSMDMSPHDEESITANDATVKDMELLRLIYGFLAFQGAAVAYVADIFKVPTILIKGVTDIVDGNRPTSEEFLENLAAVTAKLDESLTKVIDFISGKCLSDL

SEQ ID NO: 70741 - protein, 125 aa, Arabidopsis thaliana
  peptide (1)..(125): Ceres Seq. ID no. 2993899
  misc_feature (1)..(109): Pfam Name: Phosphorylase family Pfam Description: Phosphorylase family
  misc_feature (1)..(125): Homolog of NCBI NO: 7486865 NR Description: hypothetical protein T11I11.80 - Arabidopsis >gi|5123701|emb|CAB45445.1| putative protein [Arabidopsis >gi|7270435|emb|CAB80201.1| putative protein [Arabidopsis
  misc_feature (1)..(125): Homolog of NCBI NO: 30690140 NR Description: expressed protein [Arabidopsis thaliana]
  misc_feature (1)..(125): Homolog of NCBI NO: 18087497 NR Description: methylthioadenosine/S-adenosyl homocysteine
  misc_feature (1)..(125): Homolog of NCBI NO: 34897892 NR Description: ESTs C28489(C61317),AU031689(R0560) correspond to region of the predicted gene.~Similar to Arabidopsis thaliana DNA
  misc_feature (1)..(125): Homolog of NCBI NO: 7406708 NR Description: putative ripening-related protein [Vitis vinifera]
  misc_feature (1)..(125): Homolog of NCBI NO: 15234791 NR Description: putative protein; protein id: At4g38800.1, by cDNA: gi_13878068 [Arabidopsis thaliana]
  misc_feature (1)..(106): Homolog of NCBI NO: 23037085 NR Description: hypothetical protein [Oenococcus oeni MCW]
  misc_feature (1)..(90): Homolog of NCBI NO: 24372900 NR Description: 5-methylthioadenosine
  misc_feature (1)..(112): Homolog of NCBI NO: 15793935 NR Description: putative nucleosidase [Neisseria meningitidis Z2491]
  misc_feature (1)..(117): Homolog of NCBI NO: 27364020 NR Description: Nucleoside phosphorylase [Vibrio vulnificus >gi|27360137|gb|AAO09075.1|AE016798_235 Nucleoside phosphorylase
MRNTFPTPNLIKELNLKVGRLSTGDSMDMSPHDEESITANDATVKDMELLRLIYGFLAFQGAAVAYVADIFKVPTILIKGVTDIVDGNRPTSEEFLENLAAVTAKLDESLTKVIDFISGKCLSDL

SEQ ID NO: 70742 - DNA, 825 bp, Arabidopsis thaliana
  misc_feature (1)..(825): Ceres Seq. ID no. 2996468
  misc_feature: MA Experiment ID: 20000184 Result: Down-regulated in Transcription
  misc_feature: MA Experiment 20000184 PARAMETER Experiment Name: At_Shoots__P Parameter: Age (day) Value: 7
  misc_feature: MA Experiment 20000184 PARAMETER Experiment Name: At_Shoots__P Parameter: Tissue Value: Shoots vs. Whole Plant
atgggaggaagtgctagtctccagtcagactcgatggaagcagcagcagcagcagattcttcgattcccagagacaaagactttggcaaattccaattcggatgcgagcactacaagagacgatgtaaaatcagagctccttgctgcaatctcatcttctcatgccgccattgccacaacgactctgcgaattctcttcctgatcctaaagaacgtcatgatttggtccgccaaaacgtcaaacaggttgtttgttcaatttgtcaaactgagcaagaggttgctaaagtctgctcgaattgtggcgtcaatatgggagaatacttttgcgatatctgcaaattctttgacgacgatatttcgaaagaacagtttcattgtgatgactgtggaatttgtagagttggtgggcgtgacaaattctttcattgccagaactgtggagcttgctacggaatgggcttgcgcgataaacactcgtgcattgagaactctacaaaaaattcttgtcctgtctgttatgagtatctatttgattcggtaaaggccgcacatgtgatgaaatgtggtcatacaatgcatatggattgctttgaacaaatgatcaatgaaaaccagtaccgatgcccaatttgtgccaagtcaatggtggatatgtctccttcgtggcacctattagatttcgaggtttcaattctctgcaatgactgcaacaaggggagtaaagctatgttccacattttgggacacaagtgcagtgattgcggttcatacaacactcggagaatctcaacgccacaagatccagtgagtgaaacagagtga

SEQ ID NO: 70743 - protein, 274 aa, Arabidopsis thaliana
  peptide (1)..(274): Ceres Seq. ID no. 2996469
  misc_feature (35)..(117): Pfam Name: CHY zinc finger Pfam Description: CHY zinc finger
  misc_feature (1)..(274): Homolog of NCBI NO: 11358168 NR Description: hypothetical protein T20O10.70 - Arabidopsis >gi|7573426|emb|CAB87742.1| putative protein [Arabidopsis
  misc_feature (1)..(274): Homolog of NCBI NO: 30695702 NR Description: expressed protein [Arabidopsis thaliana]
  misc_feature (12)..(274): Homolog of NCBI NO: 30102616 NR Description: At3g62970 [Arabidopsis thaliana]
  misc_feature (23)..(269): Homolog of NCBI NO: 15238890 NR Description: putative protein; protein id: At5g18650.1, by cDNA: gi_17381207, supported by cDNA: gi_20465812 [Arabidopsis >gi|17381208|gb|AAL36416.1| unknown protein [Arabidopsis
  misc_feature (6)..(263): Homolog of NCBI NO: 34910658 NR Description: putative PGPD14 protein (pollen germination
  misc_feature (27)..(268): Homolog of NCBI NO: 15237169 NR Description: PGPD14 protein; protein id: At5g22920.1, by cDNA: 41666., supported by cDNA: gi_15450520 [Arabidopsis >gi|10177239|dbj|BAB10613.1| PGPD14 protein [Arabidopsis
  misc_feature (27)..(268): Homolog of NCBI NO: 21593716 NR Description: PGPD14 protein [Arabidopsis thaliana]
  misc_feature (7)..(262): Homolog of NCBI NO: 4105798 NR Description: PGPD14 [Petunia x hybrida]
  misc_feature (32)..(261): Homolog of NCBI NO: 37535002 NR Description: putative PGPD14 protein (pollen germination
  misc_feature (34)..(260): Homolog of NCBI NO: 13925695 NR Description: zinc finger protein [Danio rerio]
MGGSASLQSDSMEAAAAADSSIPRDKDFGKFQFGCEHYKRRCKIRAPCCNLIFSCRHCHNDSANSLPDPKERHDLVRQNVKQVVCSICQTEQEVAKVCSNCGVNMGEYFCDICKFFDDDISKEQFHCDDCGICRVGGRDKFFHCQNCGACYGMGLRDKHSCIENSTKNSCPVCYEYLFDSVKAAHVMKCGHTMHMDCFEQMINENQYRCPICAKSMVDMSPSWHLLDFEVSILCNDCNKGSKAMFHILGHKCSDCGSYNTRRISTPQDPVSETE

SEQ ID NO: 70744 - protein, 263 aa, Arabidopsis thaliana
  peptide (1)..(263): Ceres Seq. ID no. 2996470
  misc_feature (24)..(106): Pfam Name: CHY zinc finger Pfam Description: CHY zinc finger
  misc_feature (1)..(263): Homolog of NCBI NO: 11358168 NR Description: hypothetical protein T20O10.70 - Arabidopsis >gi|7573426|emb|CAB87742.1| putative protein [Arabidopsis
  misc_feature (1)..(263): Homolog of NCBI NO: 30695702 NR Description: expressed protein [Arabidopsis thaliana]
  misc_feature (1)..(263): Homolog of NCBI NO: 30102616 NR Description: At3g62970 [Arabidopsis thaliana]
  misc_feature (12)..(258): Homolog of NCBI NO: 15238890 NR Description: putative protein; protein id: At5g18650.1, by cDNA: gi_17381207, supported by cDNA: gi_20465812 [Arabidopsis >gi|17381208|gb|AAL36416.1| unknown protein [Arabidopsis
  misc_feature (1)..(252): Homolog of NCBI NO: 34910658 NR Description: putative PGPD14 protein (pollen germination
  misc_feature (16)..(257): Homolog of NCBI NO: 15237169 NR Description: PGPD14 protein; protein id: At5g22920.1, by cDNA: 41666., supported by cDNA: gi_15450520 [Arabidopsis >gi|10177239|dbj|BAB10613.1| PGPD14 protein [Arabidopsis
  misc_feature (16)..(257): Homolog of NCBI NO: 21593716 NR Description: PGPD14 protein [Arabidopsis thaliana]
  misc_feature (1)..(251): Homolog of NCBI NO: 4105798 NR Description: PGPD14 [Petunia x hybrida]
  misc_feature (21)..(250): Homolog of NCBI NO: 37535002 NR Description: putative PGPD14 protein (pollen germination
  misc_feature (23)..(249): Homolog of NCBI NO: 13925695 NR Description: zinc finger protein [Danio rerio]
MEAAAAADSSIPRDKDFGKFQFGCEHYKRRCKIRAPCCNLIFSCRHCHNDSANSLPDPKERHDLVRQNVKQVVCSICQTEQEVAKVCSNCGVNMGEYFCDICKFFDDDISKEQFHCDDCGICRVGGRDKFFHCQNCGACYGMGLRDKHSCIENSTKNSCPVCYEYLFDSVKAAHVMKCGHTMHMDCFEQMINENQYRCPICAKSMVDMSPSWHLLDFEVSILCNDCNKGSKAMFHILGHKCSDCGSYNTRRISTPQDPVSETE

SEQ ID NO: 70745 - protein, 180 aa, Arabidopsis thaliana
  peptide (1)..(180): Ceres Seq. ID no. 2996471
WEEVLVSSQTRWKQQQQQILRFPETKTLANSNSDASTTRDDVKSELLAAISSSHAAIATTTLRILFLILKNVMIWSAKTSNRLFVQFVKLSKRLLKSARIVASIWENTFAISANSLTTIFRKNSFIVMTVEFVELVGVTNSFIARTVELATEWACAINTRALRTLQKILVLSVMSIYLIR

SEQ ID NO: 70746 - DNA, 732 bp, Arabidopsis thaliana
  misc_feature (1)..(732): Ceres Seq. ID no. 2996700
  misc_feature: MA Experiment ID: 20000315 Result: Down-regulated in Transcription
  misc_feature: MA Experiment 20000315 PARAMETER Experiment Name: At_14day_Shoots-Roots_Sub_P Parameter: Age (day) Value: 14
  misc_feature: MA Experiment 20000315 PARAMETER Experiment Name: At_14day_Shoots-Roots_Sub_P Parameter: Organism Value: A. thaliana
  misc_feature: MA Experiment 20000315 PARAMETER Experiment Name: At_14day_Shoots-Roots_Sub_P Parameter: Plant Line Value: WS
  misc_feature: MA Experiment 20000315 PARAMETER Experiment Name: At_14day_Shoots-Roots_Sub_P Parameter: Tissue Value: Shoots vs. Whole Plant
atggtggcgcaaaacagtcggcgggagcttctagcagcttccctgatcctaactttagctctaattcgtctaacggaagcaaactccgaaggggacgctcttcacgcgcttcgccggagcttatcagatccagacaatgttgttcagagttgggatccaactcttgttaatccttgtacttggtttcatgtcacttgtaatcaacaccatcaagtcactcgtctggatttggggaattcaaacttatctggacatctagtacctgaacttgggaagcttgaacatttacaatatctgtatggaatcatcactcttttgccttttgattatctgaaaacatttacattatcagtcacacatataacattttgctttgagtcatatagtgaactctacaaaaacgagattcaaggaactataccttctgagcttggaaatctgaagagtctaatcagtttggatctgtacaacaacaatctcaccgggaaaatcccatcttctttgggaaaattgaagcggcttaacgaaaaccgattgaccggtcctattcctagagaactcacagttatttcaagccttaaagttgttgatgtctcagggaatgatttgtgtggaacaattccagtagaaggaccttttgaacacattcctatgcaaaactttgagaacaacctgagattggagggaccagaactactaggtcttgcgagctatgacaccaattgcacttaa

SEQ ID NO: 70747 - protein, 243 aa, Arabidopsis thaliana
  peptide (1)..(243): Ceres Seq. ID no. 2996701
  misc_feature (192)..(224): Pfam Name: Leucine Rich Repeat Pfam Description: Leucine Rich Repeat
  misc_feature (1)..(243): Homolog of NCBI NO: 15229760 NR Description: leucine-rich repeat protein LRP -like; protein id:
  misc_feature (1)..(186): Homolog of NCBI NO: 34146800 NR Description: At3g43740 [Arabidopsis thaliana]
  misc_feature (128)..(243): Homolog of NCBI NO: 34146800 NR Description: At3g43740 [Arabidopsis thaliana]
  misc_feature (128)..(243): Homolog of NCBI NO: 15242153 NR Description: leucine-rich repeat protein; protein id: supported by cDNA: gi_13358181, supported by cDNA: gi_13899096, by cDNA: gi_20148426 [Arabidopsis thaliana]
  misc_feature (1)..(184): Homolog of NCBI NO: 15242153 NR Description: leucine-rich repeat protein; protein id: supported by cDNA: gi_13358181, supported by cDNA: gi_13899096, by cDNA: gi_20148426 [Arabidopsis thaliana]
  misc_feature (128)..(243): Homolog of NCBI NO: 7489030 NR Description: leucine-rich repeat protein LRP - tomato
  misc_feature (128)..(243): Homolog of NCBI NO: 30385250 NR Description: leucine-rich repeat protein [x Citrofortunella
  misc_feature (128)..(242): Homolog of NCBI NO: 27497122 NR Description: floral organ regulator 1 [Oryza sativa (japonica
  misc_feature (128)..(242): Homolog of NCBI NO: 29468120 NR Description: leucine-rich repeat protein [Oryza sativa]
  misc_feature (128)..(242): Homolog of NCBI NO: 34903344 NR Description: unnamed protein product [Oryza sativa (japonica group)] >gi|6498429|dbj|BAA87832.1| unnamed protein product
MVAQNSRRELLAASLILTLALIRLTEANSEGDALHALRRSLSDPDNVVQSWDPTLVNPCTWFHVTCNQHHQVTRLDLGNSNLSGHLVPELGKLEHLQYLYGIITLLPFDYLKTFTLSVTHITFCFESYSELYKNEIQGTIPSELGNLKSLISLDLYNNNLTGKIPSSLGKLKRLNENRLTGPIPRELTVISSLKVVDVSGNDLCGTIPVEGPFEHIPMQNFENNLRLEGPELLGLASYDTNCT

SEQ ID NO: 70748 - DNA, 1440 bp, Arabidopsis thaliana
  misc_feature (1)..(1440): Ceres Seq. ID no. 2996710
  misc_feature: MA Experiment ID: 20000173 Result: Down-regulated in Transcription
  misc_feature: MA Experiment 20000173 PARAMETER Experiment Name: At_42deg_Heat_P Parameter: Age (day) Value: 14
  misc_feature: MA Experiment 20000173 PARAMETER Experiment Name: At_42deg_Heat_P Parameter: Organism Value: A. thaliana
  misc_feature: MA Experiment 20000173 PARAMETER Experiment Name: At_42deg_Heat_P Parameter: Plant Line Value: WS
  misc_feature: MA Experiment 20000173 PARAMETER Experiment Name: At_42deg_Heat_P Parameter: Temperature (deg C) Value: 42 vs. 22
  misc_feature: MA Experiment 20000173 PARAMETER Experiment Name: At_42deg_Heat_P Parameter: Timepoint (hr) Value: 6
  misc_feature: MA Experiment 20000173 PARAMETER Experiment Name: At_42deg_Heat_P Parameter: Tissue Value: Aerial
  misc_feature: MA Experiment ID: 20000184 Result: Down-regulated in Transcription
  misc_feature: MA Experiment 20000184 PARAMETER Experiment Name: At_Shoots__P Parameter: Age (day) Value: 7
  misc_feature: MA Experiment 20000184 PARAMETER Experiment Name: At_Shoots__P Parameter: Tissue Value: Shoots vs. Whole Plant
  misc_feature: MA Experiment ID: 20000227 Result: Down-regulated in Transcription
  misc_feature: MA Experiment 20000227 PARAMETER Experiment Name: At_Root-Tips-vs-Tops_P Parameter: Tissue Value: Root Tips vs. Root Tops
  misc_feature: MA Experiment ID: 20000234 Result: Down-regulated in Transcription
  misc_feature: MA Experiment 20000234 PARAMETER Experiment Name: At_Siliques_P Parameter: Age (day) Value: 21
  misc_feature: MA Experiment 20000234 PARAMETER Experiment Name: At_Siliques_P Parameter: Organism Value: A. thaliana
  misc_feature: MA Experiment 20000234 PARAMETER Experiment Name: At_Siliques_P Parameter: Plant Line Value: WS
  misc_feature: MA Experiment 20000234 PARAMETER Experiment Name: At_Siliques_P Parameter: Tissue Value: Less Than 5mm Siliques vs. Whole Plant
  misc_feature: MA Experiment ID: 20000235 Result: Down-regulated in Transcription
  misc_feature: MA Experiment 20000235 PARAMETER Experiment Name: At_Siliques_P Parameter: Age (day) Value: 21
  misc_feature: MA Experiment 20000235 PARAMETER Experiment Name: At_Siliques_P Parameter: Organism Value: A. thaliana
  misc_feature: MA Experiment 20000235 PARAMETER Experiment Name: At_Siliques_P Parameter: Plant Line Value: WS
  misc_feature: MA Experiment 20000235 PARAMETER Experiment Name: At_Siliques_P Parameter: Tissue Value: 5-10mm Siliques vs. Whole Plant
  misc_feature: MA Experiment ID: 20000265 Result: Down-regulated in Transcription
  misc_feature: MA Experiment 20000265 PARAMETER Experiment Name: At_Open_Flower_P Parameter: Age (day) Value: 21
  misc_feature: MA Experiment 20000265 PARAMETER Experiment Name: At_Open_Flower_P Parameter: Plant Line Value: WS
  misc_feature: MA Experiment 20000265 PARAMETER Experiment Name: At_Open_Flower_P Parameter: Tissue Value: Closed Flower vs. Whole Plant
  misc_feature: MA Experiment ID: 20000438 Result: Down-regulated in Transcription
  misc_feature: MA Experiment 20000438 PARAMETER Experiment Name: At_Shoots__P Parameter: Age (day) Value: 14
  misc_feature: MA Experiment 20000438 PARAMETER Experiment Name: At_Shoots__P Parameter: Tissue Value: Shoots vs. Whole Plant
  misc_feature: MA Experiment ID: 20001560 Result: Down-regulated in Transcription
  misc_feature: MA Experiment 20001560 PARAMETER Experiment Name: At_Drought_Soil_Dry_P Parameter: Age (day) Value: 28
  misc_feature: MA Experiment 20001560 PARAMETER Experiment Name: At_Drought_Soil_Dry_P Parameter: Organism Value: A. thaliana
  misc_feature: MA Experiment 20001560 PARAMETER Experiment Name: At_Drought_Soil_Dry_P Parameter: Plant Line Value: WS
  misc_feature: MA Experiment 20001560 PARAMETER Experiment Name: At_Drought_Soil_Dry_P Parameter: Post Timepoint (hr) Value: None
  misc_feature: MA Experiment 20001560 PARAMETER Experiment Name: At_Drought_Soil_Dry_P Parameter: Post-Treatment Value: None
  misc_feature: MA Experiment 20001560 PARAMETER Experiment Name: At_Drought_Soil_Dry_P Parameter: Timepoint (day) Value: 14
  misc_feature: MA Experiment 20001560 PARAMETER Experiment Name: At_Drought_Soil_Dry_P Parameter: Treatment Value: Drought vs. No Drought
  misc_feature: MA Experiment ID: 20001905 Result: Down-regulated in Transcription
  misc_feature: MA Experiment 20001905 PARAMETER Experiment Name: At_Drought_Reproduction_P Parameter: Age (day) Value: 40
  misc_feature: MA Experiment 20001905 PARAMETER Experiment Name: At_Drought_Reproduction_P Parameter: Organism Value: A. thaliana
  misc_feature: MA Experiment 20001905 PARAMETER Experiment Name: At_Drought_Reproduction_P Parameter: Plant Line Value: WS
  misc_feature: MA Experiment 20001905 PARAMETER Experiment Name: At_Drought_Reproduction_P Parameter: Timepoint (day) Value: 10
  misc_feature: MA Experiment 20001905 PARAMETER Experiment Name: At_Drought_Reproduction_P Parameter: Tissue Value: Rosettes
  misc_feature: MA Experiment 20001905 PARAMETER Experiment Name: At_Drought_Reproduction_P Parameter: Treatment Value: Drought vs. No Drought
  misc_feature: Pfam Name: MFS_1 Pfam Description: Major Facilitator Superfamily
atggccgatgatgagtcaagaaccatcctgttggagaagaacgaagactgccctggctgtatcattgatcgaaccaagcaacagcaacgaggcgttccttacttgcacctctccttcatctggctcgtgtcactctgcactgagaatgaccaatatgtattgtggcagatcagagacttccatatagcaaaacaagaagaagatattggtttctatgctggttttgttggatcatcattcatgattggaagagctttgacatctattttctgggggaaattagctgatcgttatggtcgcaaacctattattctcattgggacattctcagtgatcatattcaataccctctttggtctaagcacaagtttctggcttgcaatttccgttagatttcttcttggctgcttcaattgtttacttggagttataagagcatatgcttcagaagtcgttagcgaagagtataacgctcttagtctttctgtcgtgagtacatcaagaggtataggattgatactaggtcctgctattggaggttatcttgctcagcctgcagaaaagtacccaaatatattttcccagagttcagtttttgggaggtttccatattttctgccgagcttagttatatccgtctatgctactgcggttctcatcgcttgctggtggcttcctgaaactcttcatacacgttgtagaattgcacaagggagacttaatccaacagagctaaacgatgatgaaagtagaggaggaggacttgatgaacagaaaataattaataagccaagtctcttgaggaatcgtccattgatggctatcatcattgtttattgtgttttttccctccaagagatagcatacaatgagatattctcactctgggctgttagtgaccgaagctatggaggattgagcttctcatctcaagatgttggtgaagttttagctatatcaggacttgggcttctggtgtttcaacttttggtatacccgccattggagaaatccgtgggactccttgcggttatacgtctttctgcggtattgctgataccgctgctttcgtgttacccctatatagctttgctttctggggtgactctccatttggtgataaattgtgcatccatcataaaaaacgctttgtctatctcacttgtcacaggactgtttatcatgttgaacaaagctgtgcctcagaatcagagaggtgctgctaatggcatttctatgaccgcgatgtctgttttcaaatcatttggccctgccggtggaggggtcttattctcatgggcgcaaaagagacaagacgctacattccttccaggtcaaatttttgcaccatgtgatgagatggtgttcttggtgttgaatttggtacagctcgtaggattgatactaacgttcataccttacatttcccaaatccagtaa

SEQ ID NO: 70749 - protein, 479 aa, Arabidopsis thaliana
  peptide (1)..(479): Ceres Seq. ID no. 2996711
  misc_feature: Pfam Name: MFS_1 Pfam Description: Major Facilitator Superfamily
  misc_feature (1)..(479): Homolog of NCBI NO: 15229781 NR Description: transporter-like protein; protein id: At3g43790.1
  misc_feature (4)..(476): Homolog of NCBI NO: 22326785 NR Description: transporter-like protein; protein id:
  misc_feature (4)..(479): Homolog of NCBI NO: 30684565 NR Description: transporter-related protein [Arabidopsis >gi|14517414|gb|AAK62597.1| AT5g13750/MXE10_2 [Arabidopsis
  misc_feature (26)..(476): Homolog of NCBI NO: 20260160 NR Description: transporter-like protein [Arabidopsis thaliana]
  misc_feature (14)..(476): Homolog of NCBI NO: 23452823 NR Description: major facilitator superfamily antiporter [Oryza
  misc_feature (26)..(447): Homolog of NCBI NO: 10177340 NR Description: transporter-like protein [Arabidopsis thaliana]
  misc_feature (17)..(476): Homolog of NCBI NO: 23452821 NR Description: major facilitator superfamily antiporter [Oryza
  misc_feature (81)..(477): Homolog of NCBI NO: 34903136 NR Description: unnamed protein product [Oryza sativa (japonica group)] >gi|6630695|dbj|BAA88541.1| unnamed protein product
  misc_feature (81)..(479): Homolog of NCBI NO: 30684567 NR Description: transporter-related protein [Arabidopsis thaliana]
  misc_feature (81)..(479): Homolog of NCBI NO: 21555230 NR Description: transporter-like protein [Arabidopsis thaliana]
MADDESRTILLEKNEDCPGCIIDRTKQQQRGVPYLHLSFIWLVSLCTENDQYVLWQIRDFHIAKQEEDIGFYAGFVGSSFMIGRALTSIFWGKLADRYGRKPIILIGTFSVIIFNTLFGLSTSFWLAISVRFLLGCFNCLLGVIRAYASEVVSEEYNALSLSVVSTSRGIGLILGPAIGGYLAQPAEKYPNIFSQSSVFGRFPYFLPSLVISVYATAVLIACWWLPETLHTRCRIAQGRLNPTELNDDESRGGGLDEQKIINKPSLLRNRPLMAIIIVYCVFSLQEIAYNEIFSLWAVSDRSYGGLSFSSQDVGEVLAISGLGLLVFQLLVYPPLEKSVGLLAVIRLSAVLLIPLLSCYPYIALLSGVTLHLVINCASIIKNALSISLVTGLFIMLNKAVPQNQRGAANGISMTAMSVFKSFGPAGGGVLFSWAQKRQDATFLPGQIFAPCDEMVFLVLNLVQLVGLILTFIPYISQIQ

SEQ ID NO: 70750 - protein, 399 aa, Arabidopsis thaliana
  peptide (1)..(399): Ceres Seq. ID no. 2996712
  misc_feature: Pfam Name: MFS_1 Pfam Description: Major Facilitator Superfamily
  misc_feature (1)..(399): Homolog of NCBI NO: 15229781 NR Description: transporter-like protein; protein id: At3g43790.1
  misc_feature (1)..(396): Homolog of NCBI NO: 22326785 NR Description: transporter-like protein; protein id:
  misc_feature (1)..(399): Homolog of NCBI NO: 30684565 NR Description: transporter-related protein [Arabidopsis >gi|14517414|gb|AAK62597.1| AT5g13750/MXE10_2 [Arabidopsis
  misc_feature (1)..(396): Homolog of NCBI NO: 20260160 NR Description: transporter-like protein [Arabidopsis thaliana]
  misc_feature (1)..(396): Homolog of NCBI NO: 23452823 NR Description: major facilitator superfamily antiporter [Oryza
  misc_feature (1)..(367): Homolog of NCBI NO: 10177340 NR Description: transporter-like protein [Arabidopsis thaliana]
  misc_feature (1)..(396): Homolog of NCBI NO: 23452821 NR Description: major facilitator superfamily antiporter [Oryza
  misc_feature (1)..(397): Homolog of NCBI NO: 34903136 NR Description: unnamed protein product [Oryza sativa (japonica group)] >gi|6630695|dbj|BAA88541.1| unnamed protein product
  misc_feature (1)..(399): Homolog of NCBI NO: 30684567 NR Description: transporter-related protein [Arabidopsis thaliana]
  misc_feature (1)..(399): Homolog of NCBI NO: 21555230 NR Description: transporter-like protein [Arabidopsis thaliana]
MIGRALTSIFWGKLADRYGRKPIILIGTFSVIIFNTLFGLSTSFWLAISVRFLLGCFNCLLGVIRAYASEVVSEEYNALSLSVVSTSRGIGLILGPAIGGYLAQPAEKYPNIFSQSSVFGRFPYFLPSLVISVYATAVLIACWWLPETLHTRCRIAQGRLNPTELNDDESRGGGLDEQKIINKPSLLRNRPLMAIIIVYCVFSLQEIAYNEIFSLWAVSDRSYGGLSFSSQDVGEVLAISGLGLLVFQLLVYPPLEKSVGLLAVIRLSAVLLIPLLSCYPYIALLSGVTLHLVINCASIIKNALSISLVTGLFIMLNKAVPQNQRGAANGISMTAMSVFKSFGPAGGGVLFSWAQKRQDATFLPGQIFAPCDEMVFLVLNLVQLVGLILTFIPYISQIQ

SEQ ID NO: 70751 - DNA, 1023 bp, Arabidopsis thaliana
  misc_feature (1)..(1023): Ceres Seq. ID no. 2996845
  misc_feature: MA Experiment ID: 20000179 Result: Down-regulated in Transcription
  misc_feature: MA Experiment 20000179 PARAMETER Experiment Name: At_Germinating_Seeds_P Parameter: Age (hr) Value: 6 vs. 0
  misc_feature: MA Experiment 20000179 PARAMETER Experiment Name: At_Germinating_Seeds_P Parameter: Tissue Value: Germinating Seeds
  misc_feature: MA Experiment ID: 20000180 Result: Down-regulated in Transcription
  misc_feature: MA Experiment 20000180 PARAMETER Experiment Name: At_Germinating_Seeds_P Parameter: Age (hr) Value: 24 vs. 0
  misc_feature: MA Experiment 20000180 PARAMETER Experiment Name: At_Germinating_Seeds_P Parameter: Tissue Value: Germinating Seeds
atggagaaaggtgaggattcaagcacattcaaaatggggaattctgcacaagagaggagtttaccgtatgtacctgactgttacgtcgtcccgccttctagcaaaccatgtgactcaaattccggaatcgtacccactatcgatgtttctcggctgaaagggggagatgatgaacgtcgagggatagtgaaccatggaatcaaccagaacatactagatgacgccttggaggttgcgaatagcttcttcgagctgccggcgaaggagaagaaacagtttatgtcaaacgatgtctacgcaccggttcggtacagtacgagtctcaaggacggtttggacacgatccaattctggaggatttttctaaagcactatgcacatcctcttcatcgttggattcatctttggccagagaatccacccggatacagggaaaaaatgggaaagttctgcgaggaagtgaggaaactatcgatagagttaatgggagcaataacggaaagcctaggtctagggagagactacctgtcgtctcggatggacgaaaacggcatgcaagtcatgacagttaactgctatccaccctgtccggaccctgagacggcgctaggcctgccgccgcattcagactatagttgcatcaccctccttctacagaacttggacggtctcaagatcttcgatccaatggctcacggtggatctggccgttgggttggtgtcccacaagtcacaggtgtacttaaggtccatattggtgaccatgtggaagttctaagcaatggattatacaagagcatcgttcataaagtcactttgaatgaagagaagacgagaatctctctcgcgagcttgcatagcttgggtatggacgataagatgagtgtaccgcgcgaattggttaacgatgaaaatccggttcggtataaagagagcagctttaacgattttcttgattttcttgtcaaaaatgacatttctcaaggggataggtttattgacactctcagaatcaaggactga

SEQ ID NO: 70752 - protein, 340 aa, Arabidopsis thaliana
  peptide (1)..(340): Ceres Seq. ID no. 2996846
  misc_feature (184)..(288): Pfam Name: 2OG-Fe(II) oxygenase superfamily Pfam Description: 2OG-Fe(II) oxygenase superfamily
  misc_feature (62)..(337): Homolog of NCBI NO: 7433240 NR Description: probable flavonol synthase [imported] - thaliana >gi|20197022|gb|AAM14878.1| putative flavonol synthase
  misc_feature (62)..(337): Homolog of NCBI NO: 30689834 NR Description: flavonol synthase family [Arabidopsis thaliana]
  misc_feature (62)..(338): Homolog of NCBI NO: 32488371 NR Description: OSJNBa0043A12.1 [Oryza sativa (japonica
  misc_feature (62)..(338): Homolog of NCBI NO: 32488372 NR Description: OSJNBa0043A12.2 [Oryza sativa (japonica
  misc_feature (128)..(340): Homolog of NCBI NO: 15232291 NR Description: SRG1 - like protein; protein id: At3g60290.1
  misc_feature (1)..(340): Homolog of NCBI NO: 15240797 NR Description: putative protein; protein id: At5g07480.1
  misc_feature (62)..(103): Homolog of NCBI NO: 15232291 NR Description: SRG1 - like protein; protein id: At3g60290.1
  misc_feature (62)..(338): Homolog of NCBI NO: 15228020 NR Description: putative giberellin beta-hydroxylase; protein id: [Arabidopsis thaliana] >gi|25285698|pir||E84783 probable
  misc_feature (62)..(317): Homolog of NCBI NO: 37536444 NR Description: unknown protein [Oryza sativa (japonica
  misc_feature (32)..(319): Homolog of NCBI NO: 38345873 NR Description: OSJNBa0064M23.15 [Oryza sativa (japonica
MEKGEDSSTFKMGNSAQERSLPYVPDCYVVPPSSKPCDSNSGIVPTIDVSRLKGGDDERRGIVNHGINQNILDDALEVANSFFELPAKEKKQFMSNDVYAPVRYSTSLKDGLDTIQFWRIFLKHYAHPLHRWIHLWPENPPGYREKMGKFCEEVRKLSIELMGAITESLGLGRDYLSSRMDENGMQVMTVNCYPPCPDPETALGLPPHSDYSCITLLLQNLDGLKIFDPMAHGGSGRWVGVPQVTGVLKVHIGDHVEVLSNGLYKSIVHKVTLNEEKTRISLASLHSLGMDDKMSVPRELVNDENPVRYKESSFNDFLDFLVKNDISQGDRFIDTLRIKD

SEQ ID NO: 70753 - protein, 329 aa, Arabidopsis thaliana
  peptide (1)..(329): Ceres Seq. ID no. 2996847
  misc_feature (173)..(277): Pfam Name: 2OG-Fe(II) oxygenase superfamily Pfam Description: 2OG-Fe(II) oxygenase superfamily
  misc_feature (1)..(329): Homolog of NCBI NO: 15240797 NR Description: putative protein; protein id: At5g07480.1
  misc_feature (51)..(326): Homolog of NCBI NO: 7433240 NR Description: probable flavonol synthase [imported] - thaliana >gi|20197022|gb|AAM14878.1| putative flavonol synthase
  misc_feature (51)..(326): Homolog of NCBI NO: 30689834 NR Description: flavonol synthase family [Arabidopsis thaliana]
  misc_feature (51)..(327): Homolog of NCBI NO: 32488371 NR Description: OSJNBa0043A12.1 [Oryza sativa (japonica
  misc_feature (51)..(327): Homolog of NCBI NO: 32488372 NR Description: OSJNBa0043A12.2 [Oryza sativa (japonica
  misc_feature (117)..(329): Homolog of NCBI NO: 15232291 NR Description: SRG1 - like protein; protein id: At3g60290.1
  misc_feature (51)..(92): Homolog of NCBI NO: 15232291 NR Description: SRG1 - like protein; protein id: At3g60290.1
  misc_feature (51)..(327): Homolog of NCBI NO: 15228020 NR Description: putative giberellin beta-hydroxylase; protein id: [Arabidopsis thaliana] >gi|25285698|pir||E84783 probable
  misc_feature (51)..(306): Homolog of NCBI NO: 37536444 NR Description: unknown protein [Oryza sativa (japonica
  misc_feature (21)..(308): Homolog of NCBI NO: 38345873 NR Description: OSJNBa0064M23.15 [Oryza sativa (japonica
MGNSAQERSLPYVPDCYVVPPSSKPCDSNSGIVPTIDVSRLKGGDDERRGIVNHGINQNILDDALEVANSFFELPAKEKKQFMSNDVYAPVRYSTSLKDGLDTIQFWRIFLKHYAHPLHRWIHLWPENPPGYREKMGKFCEEVRKLSIELMGAITESLGLGRDYLSSRMDENGMQVMTVNCYPPCPDPETALGLPPHSDYSCITLLLQNLDGLKIFDPMAHGGSGRWVGVPQVTGVLKVHIGDHVEVLSNGLYKSIVHKVTLNEEKTRISLASLHSLGMDDKMSVPRELVNDENPVRYKESSFNDFLDFLVKNDISQGDRFIDTLRIKD

SEQ ID NO: 70754 - protein, 247 aa, Arabidopsis thaliana
  peptide (1)..(247): Ceres Seq. ID no. 2996848
  misc_feature (91)..(195): Pfam Name: 2OG-Fe(II) oxygenase superfamily Pfam Description: 2OG-Fe(II) oxygenase superfamily
  misc_feature (1)..(247): Homolog of NCBI NO: 15240797 NR Description: putative protein; protein id: At5g07480.1
  misc_feature (1)..(244): Homolog of NCBI NO: 7433240 NR Description: probable flavonol synthase [imported] - thaliana >gi|20197022|gb|AAM14878.1| putative flavonol synthase
  misc_feature (1)..(244): Homolog of NCBI NO: 30689834 NR Description: flavonol synthase family [Arabidopsis thaliana]
  misc_feature (1)..(245): Homolog of NCBI NO: 32488371 NR Description: OSJNBa0043A12.1 [Oryza sativa (japonica
  misc_feature (1)..(245): Homolog of NCBI NO: 32488372 NR Description: OSJNBa0043A12.2 [Oryza sativa (japonica
  misc_feature (35)..(247): Homolog of NCBI NO: 15232291 NR Description: SRG1 - like protein; protein id: At3g60290.1
  misc_feature (1)..(245): Homolog of NCBI NO: 15228020 NR Description: putative giberellin beta-hydroxylase; protein id: [Arabidopsis thaliana] >gi|25285698|pir||E84783 probable
  misc_feature (1)..(224): Homolog of NCBI NO: 37536444 NR Description: unknown protein [Oryza sativa (japonica
  misc_feature (1)..(226): Homolog of NCBI NO: 38345873 NR Description: OSJNBa0064M23.15 [Oryza sativa (japonica
  misc_feature (1)..(224): Homolog of NCBI NO: 15238567 NR Description: flavanone 3-hydroxylase-like protein; protein id: supported by cDNA: 149654., supported by cDNA: gi_14423475,
MSNDVYAPVRYSTSLKDGLDTIQFWRIFLKHYAHPLHRWIHLWPENPPGYREKMGKFCEEVRKLSIELMGAITESLGLGRDYLSSRMDENGMQVMTVNCYPPCPDPETALGLPPHSDYSCITLLLQNLDGLKIFDPMAHGGSGRWVGVPQVTGVLKVHIGDHVEVLSNGLYKSIVHKVTLNEEKTRISLASLHSLGMDDKMSVPRELVNDENPVRYKESSFNDFLDFLVKNDISQGDRFIDTLRIKD

SEQ ID NO: 70755 - DNA, 2469 bp, Arabidopsis thaliana
  misc_feature (1)..(2469): Ceres Seq. ID no. 2996861
  misc_feature: MA Experiment ID: 20000307 Result: Down-regulated in Transcription
  misc_feature: MA Experiment 20000307 PARAMETER Experiment Name: At_Germinating_Seeds_Sub_P Parameter: Age (hr) Value: 24 vs. 0
  misc_feature: MA Experiment 20000307 PARAMETER Experiment Name: At_Germinating_Seeds_Sub_P Parameter: Organism Value: A. thaliana
  misc_feature: MA Experiment 20000307 PARAMETER Experiment Name: At_Germinating_Seeds_Sub_P Parameter: Plant Line Value: WS
  misc_feature: MA Experiment 20000307 PARAMETER Experiment Name: At_Germinating_Seeds_Sub_P Parameter: Tissue Value: Germinating Seeds
atgatcgtgttcatgagaataattcatgttgcgcagactcgcagattgatgatccgatgcaatcgcattcgacaatgtgggttttctgtgaaaactgcggcattggatttagaatcgtcggattcgataatcccaggcttagactctcatgcttacggtgcaatgctccgtcgctgcattcagaagaacgacccaatttcagcaaaggctattcattgcgacatcttgaagaaaggaagctgcttagaccttttcgccacaaacattctactcaacgcttatgtgaaagctggctttgacaaagatgcgttaaacctgttcgacgaaatgcctgagagaaataatgtctcttttgttactcttgcgcaagggtatgcgtgtcaagatcccattggtttgtattccaggttgcatcgagagggtcatgagcttaatccacacgtcttcacttctttcttgaagttgtttgttagtttggacaaagctgagatttgtccatggttgcattctcctatcgttaagctcggttatgattctaatgcttttgttggagctgcgcttattaatgcttactctgtctgtggttctgttgatagtgcaagaactgtttttgaagggattttgtgcaaagacattgttgtttgggcaggaattgtatcttgctatgtagaaaatggatatttcgaggattctcttaagctgctatcttgtatgaggatggctggtttcatgcccaacaactacacctttgacacggcgcttaaggctagtattgggctaggcgcatttgatttcgcgaaaggtgttcatggccaaatcttaaaaacatgttatgtgttggatcctcgtgtgggtgttggtttgcttcagttgtatacacaactcggagacatgtctgatgctttcaaagtgtttaatgagatgccaaagaatgatgtggtaccttggagttttatgattgctcgtttttgtcaaaacggtttctgcaacgaggcggttgatctttttattcgaatgagggaagcttttgttgtccctaacgagtttactttaagcagtattttgaatggctgtgccatcggaaagtgttctggcttaggtgagcaactccatggtcttgtagtcaaagttggctttgatttggatatctatgtctcaaatgctcttattgatgtatatgccaaatgtgagaaaatggataccgctgtgaagttatttgctgagttatcaagtaaaaatgaggtaagctggaacacagtcattgtcgggtatgagaatctaggcgaaggaggaaaagcgttcagcatgtttcgtgaagcgctcagaaatcaggtgtcggtaactgaagtaactttctcaagtgctcttggagcttgtgcttcattggcgagcatggacctcggtgtccaagttcatggactggcgataaaaaccaataatgccaaaaaagttgcagtgagtaactcattgatagatatgtatgcaaaatgtggtgatatcaaattcgcacaatcggtgttcaacgagatggaaacgatagatgtcgcttcatggaatgcgttgatctcaggctattccacacatggactgggtagacaggcattgagaatcctcgacattatgaaggatagagattgcaagccaaatggtttaacatttcttggtgttctttctggatgcagcaatgcaggattaatagatcaaggtcaagaatgttttgaatcaatgattcgtgatcatggtattgaaccatgtttggaacattatacgtgtatggtcaggcttttgggaagatcagggcagcttgacaaagcaatgaagctgattgaagggattccatatgagcctagcgttatgatctggagggcaatgcttagtgcctctatgaatcagaacaatgaagagtttgcaaggagatcggcagaggaaatactaaagatcaatccaaaggacgaggcgacatatgttctggtatcaaacatgtacgcaggtgcaaaacaatgggcaaacgtagcttccattaggaaaagcatgaaggaaatgggtgtcaagaaggaacctggtttaagttggatagaacatcaaggtgatgtgcattacttcagtgtggggttatcagatcatccggatatgaagctcataaatggaatgttggaatggcttaacatgaaagcaactcgagctggttacgttcctgatcggaatgcggtcctgctcgatatggatgatgaagaaaaggataagagattgtgggttcatagcgagaggttggctttggcgtatgggcttgttcgaatgccatcatcaagaaatcgcatactgatcatgaagaatctacggatatgttcagattgccacagtgctatgaaagtgatttcaagtatcgtacagcgagatctggttataagagatatgaaccggttccatcattttcatgcaggagtctgctcttgcggcgaccactggtga

SEQ ID NO: 70756 - protein, 822 aa, Arabidopsis thaliana
  peptide (1)..(822): Ceres Seq. ID no. 2996862
  misc_feature (314)..(348): Pfam Name: PPR repeat Pfam Description: PPR repeat
  misc_feature (27)..(802): Homolog of NCBI NO: 34896392 NR Description: hypothetical protein [Oryza sativa (japonica group)] >gi|19697432|gb|AAL93067.1| hypothetical protein [Oryza
  misc_feature (47)..(822): Homolog of NCBI NO: 15226200 NR Description: putative selenium-binding protein; protein id:
  misc_feature (71)..(822): Homolog of NCBI NO: 34915012 NR Description: P0458A05.10 [Oryza sativa (japonica
  misc_feature (50)..(822): Homolog of NCBI NO: 15236324 NR Description: putative protein; protein id: At4g13650.1
  misc_feature (86)..(822): Homolog of NCBI NO: 15232837 NR Description: hypothetical protein; protein id: At3g02010.1 thaliana] >gi|6091739|gb|AAF03451.1|AC010797_27 hypothetical [Arabidopsis thaliana] >gi|6513930|gb|AAF14834.1|AC011664_16
  misc_feature (54)..(125): Homolog of NCBI NO: 15232837 NR Description: hypothetical protein; protein id: At3g02010.1 thaliana] >gi|6091739|gb|AAF03451.1|AC010797_27 hypothetical [Arabidopsis thaliana] >gi|6513930|gb|AAF14834.1|AC011664_16
  misc_feature (50)..(822): Homolog of NCBI NO: 15242550 NR Description: selenium-binding protein-like; protein id:
  misc_feature (288)..(822): Homolog of NCBI NO: 15223099 NR Description: unknown protein; protein id: At1g08070.1 thaliana] >gi|8778839|gb|AAF79838.1|AC026875_18 T6D22.15
  misc_feature (168)..(336): Homolog of NCBI NO: 15223099 NR Description: unknown protein; protein id: At1g08070.1 thaliana] >gi|8778839|gb|AAF79838.1|AC026875_18 T6D22.15
  misc_feature (312)..(822): Homolog of NCBI NO: 21741755 NR Description: OSJNBa0060B20.9 [Oryza sativa (japonica
MIVFMRIIHVAQTRRLMIRCNRIRQCGFSVKTAALDLESSDSIIPGLDSHAYGAMLRRCIQKNDPISAKAIHCDILKKGSCLDLFATNILLNAYVKAGFDKDALNLFDEMPERNNVSFVTLAQGYACQDPIGLYSRLHREGHELNPHVFTSFLKLFVSLDKAEICPWLHSPIVKLGYDSNAFVGAALINAYSVCGSVDSARTVFEGILCKDIVVWAGIVSCYVENGYFEDSLKLLSCMRMAGFMPNNYTFDTALKASIGLGAFDFAKGVHGQILKTCYVLDPRVGVGLLQLYTQLGDMSDAFKVFNEMPKNDVVPWSFMIARFCQNGFCNEAVDLFIRMREAFVVPNEFTLSSILNGCAIGKCSGLGEQLHGLVVKVGFDLDIYVSNALIDVYAKCEKMDTAVKLFAELSSKNEVSWNTVIVGYENLGEGGKAFSMFREALRNQVSVTEVTFSSALGACASLASMDLGVQVHGLAIKTNNAKKVAVSNSLIDMYAKCGDIKFAQSVFNEMETIDVASWNALISGYSTHGLGRQALRILDIMKDRDCKPNGLTFLGVLSGCSNAGLIDQGQECFESMIRDHGIEPCLEHYTCMVRLLGRSGQLDKAMKLIEGIPYEPSVMIWRAMLSASMNQNNEEFARRSAEEILKINPKDEATYVLVSNMYAGAKQWANVASIRKSMKEMGVKKEPGLSWIEHQGDVHYFSVGLSDHPDMKLINGMLEWLNMKATRAGYVPDRNAVLLDMDDEEKDKRLWVHSERLALAYGLVRMPSSRNRILIMKNLRICSDCHSAMKVISSIVQRDLVIRDMNRFHHFHAGVCSCGDHW

SEQ ID NO: 70757 - protein, 818 aa, Arabidopsis thaliana
  peptide (1)..(818): Ceres Seq. ID no. 2996863
  misc_feature (310)..(344): Pfam Name: PPR repeat Pfam Description: PPR repeat
  misc_feature (23)..(798): Homolog of NCBI NO: 34896392 NR Description: hypothetical protein [Oryza sativa (japonica group)] >gi|19697432|gb|AAL93067.1| hypothetical protein [Oryza
  misc_feature (43)..(818): Homolog of NCBI NO: 15226200 NR Description: putative selenium-binding protein; protein id:
  misc_feature (67)..(818): Homolog of NCBI NO: 34915012 NR Description: P0458A05.10 [Oryza sativa (japonica
  misc_feature (46)..(818): Homolog of NCBI NO: 15236324 NR Description: putative protein; protein id: At4g13650.1
  misc_feature (82)..(818): Homolog of NCBI NO: 15232837 NR Description: hypothetical protein; protein id: At3g02010.1 thaliana] >gi|6091739|gb|AAF03451.1|AC010797_27 hypothetical [Arabidopsis thaliana] >gi|6513930|gb|AAF14834.1|AC011664_16
  misc_feature (50)..(121): Homolog of NCBI NO: 15232837 NR Description: hypothetical protein; protein id: At3g02010.1 thaliana] >gi|6091739|gb|AAF03451.1|AC010797_27 hypothetical [Arabidopsis thaliana] >gi|6513930|gb|AAF14834.1|AC011664_16
  misc_feature (46)..(818): Homolog of NCBI NO: 15242550 NR Description: selenium-binding protein-like; protein id:
  misc_feature (284)..(818): Homolog of NCBI NO: 15223099 NR Description: unknown protein; protein id: At1g08070.1 thaliana] >gi|8778839|gb|AAF79838.1|AC026875_18 T6D22.15
  misc_feature (164)..(332): Homolog of NCBI NO: 15223099 NR Description: unknown protein; protein id: At1g08070.1 thaliana] >gi|8778839|gb|AAF79838.1|AC026875_18 T6D22.15
  misc_feature (308)..(818): Homolog of NCBI NO: 21741755 NR Description: OSJNBa0060B20.9 [Oryza sativa (japonica
MRIIHVAQTRRLMIRCNRIRQCGFSVKTAALDLESSDSIIPGLDSHAYGAMLRRCIQKNDPISAKAIHCDILKKGSCLDLFATNILLNAYVKAGFDKDALNLFDEMPERNNVSFVTLAQGYACQDPIGLYSRLHREGHELNPHVFTSFLKLFVSLDKAEICPWLHSPIVKLGYDSNAFVGAALINAYSVCGSVDSARTVFEGILCKDIVVWAGIVSCYVENGYFEDSLKLLSCMRMAGFMPNNYTFDTALKASIGLGAFDFAKGVHGQILKTCYVLDPRVGVGLLQLYTQLGDMSDAFKVFNEMPKNDVVPWSFMIARFCQNGFCNEAVDLFIRMREAFVVPNEFTLSSILNGCAIGKCSGLGEQLHGLVVKVGFDLDIYVSNALIDVYAKCEKMDTAVKLFAELSSKNEVSWNTVIVGYENLGEGGKAFSMFREALRNQVSVTEVTFSSALGACASLASMDLGVQVHGLAIKTNNAKKVAVSNSLIDMYAKCGDIKFAQSVFNEMETIDVASWNALISGYSTHGLGRQALRILDIMKDRDCKPNGLTFLGVLSGCSNAGLIDQGQECFESMIRDHGIEPCLEHYTCMVRLLGRSGQLDKAMKLIEGIPYEPSVMIWRAMLSASMNQNNEEFARRSAEEILKINPKDEATYVLVSNMYAGAKQWANVASIRKSMKEMGVKKEPGLSWIEHQGDVHYFSVGLSDHPDMKLINGMLEWLNMKATRAGYVPDRNAVLLDMDDEEKDKRLWVHSERLALAYGLVRMPSSRNRILIMKNLRICSDCHSAMKVISSIVQRDLVIRDMNRFHHFHAGVCSCGDHW

SEQ ID NO: 70758 - protein, 806 aa, Arabidopsis thaliana
  peptide (1)..(806): Ceres Seq. ID no. 2996864
  misc_feature (298)..(332): Pfam Name: PPR repeat Pfam Description: PPR repeat
  misc_feature (11)..(786): Homolog of NCBI NO: 34896392 NR Description: hypothetical protein [Oryza sativa (japonica group)] >gi|19697432|gb|AAL93067.1| hypothetical protein [Oryza
  misc_feature (31)..(806): Homolog of NCBI NO: 15226200 NR Description: putative selenium-binding protein; protein id:
  misc_feature (55)..(806): Homolog of NCBI NO: 34915012 NR Description: P0458A05.10 [Oryza sativa (japonica
  misc_feature (34)..(806): Homolog of NCBI NO: 15236324 NR Description: putative protein; protein id: At4g13650.1
  misc_feature (70)..(806): Homolog of NCBI NO: 15232837 NR Description: hypothetical protein; protein id: At3g02010.1 thaliana] >gi|6091739|gb|AAF03451.1|AC010797_27 hypothetical [Arabidopsis thaliana] >gi|6513930|gb|AAF14834.1|AC011664_16
  misc_feature (38)..(109): Homolog of NCBI NO: 15232837 NR Description: hypothetical protein; protein id: At3g02010.1 thaliana] >gi|6091739|gb|AAF03451.1|AC010797_27 hypothetical [Arabidopsis thaliana] >gi|6513930|gb|AAF14834.1|AC011664_16
  misc_feature (34)..(806): Homolog of NCBI NO: 15242550 NR Description: selenium-binding protein-like; protein id:
  misc_feature (272)..(806): Homolog of NCBI NO: 15223099 NR Description: unknown protein; protein id: At1g08070.1 thaliana] >gi|8778839|gb|AAF79838.1|AC026875_18 T6D22.15
  misc_feature (152)..(320): Homolog of NCBI NO: 15223099 NR Description: unknown protein; protein id: At1g08070.1 thaliana] >gi|8778839|gb|AAF79838.1|AC026875_18 T6D22.15
  misc_feature (296)..(806): Homolog of NCBI NO: 21741755 NR Description: OSJNBa0060B20.9 [Oryza sativa (japonica
MIRCNRIRQCGFSVKTAALDLESSDSIIPGLDSHAYGAMLRRCIQKNDPISAKAIHCDILKKGSCLDLFATNILLNAYVKAGFDKDALNLFDEMPERNNVSFVTLAQGYACQDPIGLYSRLHREGHELNPHVFTSFLKLFVSLDKAEICPWLHSPIVKLGYDSNAFVGAALINAYSVCGSVDSARTVFEGILCKDIVVWAGIVSCYVENGYFEDSLKLLSCMRMAGFMPNNYTFDTALKASIGLGAFDFAKGVHGQILKTCYVLDPRVGVGLLQLYTQLGDMSDAFKVFNEMPKNDVVPWSFMIARFCQNGFCNEAVDLFIRMREAFVVPNEFTLSSILNGCAIGKCSGLGEQLHGLVVKVGFDLDIYVSNALIDVYAKCEKMDTAVKLFAELSSKNEVSWNTVIVGYENLGEGGKAFSMFREALRNQVSVTEVTFSSALGACASLASMDLGVQVHGLAIKTNNAKKVAVSNSLIDMYAKCGDIKFAQSVFNEMETIDVASWNALISGYSTHGLGRQALRILDIMKDRDCKPNGLTFLGVLSGCSNAGLIDQGQECFESMIRDHGIEPCLEHYTCMVRLLGRSGQLDKAMKLIEGIPYEPSVMIWRAMLSASMNQNNEEFARRSAEEILKINPKDEATYVLVSNMYAGAKQWANVASIRKSMKEMGVKKEPGLSWIEHQGDVHYFSVGLSDHPDMKLINGMLEWLNMKATRAGYVPDRNAVLLDMDDEEKDKRLWVHSERLALAYGLVRMPSSRNRILIMKNLRICSDCHSAMKVISSIVQRDLVIRDMNRFHHFHAGVCSCGDHW

SEQ ID NO: 70759 - DNA, 2253 bp, Arabidopsis thaliana
  misc_feature (1)..(2253): Ceres Seq. ID no. 2996881
  misc_feature: MA Experiment ID: 20001451 Result: Down-regulated in Transcription
  misc_feature: MA Experiment 20001451 PARAMETER Experiment Name: At_Far-red-induction_P Parameter: Age (day) Value: 7
  misc_feature: MA Experiment 20001451 PARAMETER Experiment Name: At_Far-red-induction_P Parameter: Light Value: Far-red vs. White
  misc_feature: MA Experiment 20001451 PARAMETER Experiment Name: At_Far-red-induction_P Parameter: Organism Value: A. thaliana
  misc_feature: MA Experiment 20001451 PARAMETER Experiment Name: At_Far-red-induction_P Parameter: Plant Line Value: Columbia
  misc_feature: MA Experiment 20001451 PARAMETER Experiment Name: At_Far-red-induction_P Parameter: Timepoint (hr) Value: 24
  misc_feature: MA Experiment 20001451 PARAMETER Experiment Name: At_Far-red-induction_P Parameter: Tissue Value: Whole Plant
atggaggagagcgcagaaatattgcgggaaagaagtctcaagttttacaaaggatgccggaaatacactgaaggactaggcgaggcatacgatggggacattgctttcgcaagtgcacttgaaacatttggtggaggccataatgatccaataagtgtggcttttggaggaccggtaatgacgaaatttacaattgcgttgagggaaattgggacttataaggaagttcttcggtcacaggtggaacatatactgaatgacagattacttcagtttgccaatatggacttgcatgaagttaaggcccgtgagaagtttttatctttgaggaaaggtacaaaaagtgacgttgctgctgctttagaacaggaacttcatacttcgaggtctatgtttgagcaagctcggttcaaccttgtgactgctctatcaaatgttgaagctaagaaaaggtttgaatttttggaagcagtcagtggaacaatggatgcacatcttcggtacttcaaacagggttacgaattactgcatcagatggaaccatatatcaatcaggtcttgacatatgcgcaacaatccagagaaagatcaaattatgaacaagcagcacttaatgaaaagatgcaggagtacaaaagacaggttgatcgagagagcaggtggggttcaaatggttctaatggatcaccaaatggagatggcatacaagcaatcggtagaagctctcacaaaatgatagacgccgtaatgcaatctgctgcaagaggaaaggggtctggaagccagctttctggacagagaaatagctccgagcttgggtctggactgcttagtaggtggctttcttcgaataatcatggacatggtggtgtccatgatgagaagtctgtagctcgtcatacagtgaacttactcacctcaacaattaaagtcgacgctgatcaatcagatctgaggttttgctttaggatcatatcacctacaaaaaactacacgttgcaggctgagagtgcactcgatcaaatggattggatagaaaagatcactggggttattgcatcactacttagttctcaggtccctgaacagcgtcttcctggtagtcccatgggaagtggccaccatcgatctgctagtgaaagtagctcatatgaaagttctgaatatgatcatcctactactgaagaatttgtatgtgagaggagctttttggggtacaatgaaaggccatcaagaagttttcagccgcaacggtccattagaaagggtgagaagcccattgatgctcttcgaaaggtctgtgggaatgacaaatgtgcggattgtggagctccagaaccagactgggcttctttaaatctgggggttcttgtctgtatcgaatgttctggtgttcaccgtaatcttggtgtgcatatatctaaggttaggtcactcactctcgacgtgaaagtatgggagccatctgttataagtttgttccaagctcttggaaatactttcgcaaacacagtttgggaggaattgcttcattcaaggagcgccatccattttgaccccggcttaacagtgtctgataaatccagggtgatggtcactggaaaacccagctatgctgatatgatatctatcaaggagaagtatatacaagctaagtatgcggagaagttatttgttcggagatcaagagacagcgatttcccacaatcagctgcacaacaaatgtgggacgcagtgagtggcaatgataaaaaagctgtttaccggctcattgtcaatggtgatgcggatgtgaattatgtgtatgaccaaacttccagttcttcgttaacactttccagagtaatattagtaccagaaaggccaaagcgtgaggatgttctactcagattaagaaatgagttacttgatagaacaggtagttcttcaaatatatctcctgagggaagcggaggttcctctctgcttcactgtgcttgtgagaaggcagaccttgggatggtagagcttttgctgcagtatggtgcaaatgtaaacgcctcagattcaagtggtcaaacgccgctgcactgttgtcttctcagaggaaaagtgacaatagcaagattgcttctcactaggggagcagacccggaagctatgaacagagaaggcaaaaccgctcttgatattgctgcagagtcaaattttactgatccagaagttcttgctctcctttcagacacaaatggatacaatcacagacagtgctga

SEQ ID NO: 70760 - protein, 750 aa, Arabidopsis thaliana
  peptide (1)..(750): Ceres Seq. ID no. 2996882
  misc_feature (424)..(566): Pfam Name: Putative GTPase activating protein for Arf Pfam Description: Putative GTPase activating protein for Arf
  misc_feature (1)..(741): Homolog of NCBI NO: 38175545 NR Description: putative ARF GTPase-activating domain-containing
  misc_feature (258)..(742): Homolog of NCBI NO: 15240398 NR Description: GCN4-complementing protein - like; protein id:
  misc_feature (1)..(171): Homolog of NCBI NO: 15240398 NR Description: GCN4-complementing protein - like; protein id:
  misc_feature (136)..(280): Homolog of NCBI NO: 15240398 NR Description: GCN4-complementing protein - like; protein id:
  misc_feature (417)..(741): Homolog of NCBI NO: 15219822 NR Description: GCN4-complementing protein, putative; protein id:
  misc_feature (1)..(287): Homolog of NCBI NO: 15219822 NR Description: GCN4-complementing protein, putative; protein id:
  misc_feature (255)..(363): Homolog of NCBI NO: 15219822 NR Description: GCN4-complementing protein, putative; protein id:
  misc_feature (1)..(304): Homolog of NCBI NO: 30681946 NR Description: ARF GTPase-activating domain-containing protein
  misc_feature (423)..(741): Homolog of NCBI NO: 30681946 NR Description: ARF GTPase-activating domain-containing protein
  misc_feature (423)..(741): Homolog of NCBI NO: 25402625 NR Description: hypothetical protein [imported] - Arabidopsis
MEESAEILRERSLKFYKGCRKYTEGLGEAYDGDIAFASALETFGGGHNDPISVAFGGPVMTKFTIALREIGTYKEVLRSQVEHILNDRLLQFANMDLHEVKAREKFLSLRKGTKSDVAAALEQELHTSRSMFEQARFNLVTALSNVEAKKRFEFLEAVSGTMDAHLRYFKQGYELLHQMEPYINQVLTYAQQSRERSNYEQAALNEKMQEYKRQVDRESRWGSNGSNGSPNGDGIQAIGRSSHKMIDAVMQSAARGKGSGSQLSGQRNSSELGSGLLSRWLSSNNHGHGGVHDEKSVARHTVNLLTSTIKVDADQSDLRFCFRIISPTKNYTLQAESALDQMDWIEKITGVIASLLSSQVPEQRLPGSPMGSGHHRSASESSSYESSEYDHPTTEEFVCERSFLGYNERPSRSFQPQRSIRKGEKPIDALRKVCGNDKCADCGAPEPDWASLNLGVLVCIECSGVHRNLGVHISKVRSLTLDVKVWEPSVISLFQALGNTFANTVWEELLHSRSAIHFDPGLTVSDKSRVMVTGKPSYADMISIKEKYIQAKYAEKLFVRRSRDSDFPQSAAQQMWDAVSGNDKKAVYRLIVNGDADVNYVYDQTSSSSLTLSRVILVPERPKREDVLLRLRNELLDRTGSSSNISPEGSGGSSLLHCACEKADLGMVELLLQYGANVNASDSSGQTPLHCCLLRGKVTIARLLLTRGADPEAMNREGKTALDIAAESNFTDPEVLALLSDTNGYNHRQC

SEQ ID NO: 70761 - protein, 691 aa, Arabidopsis thaliana
  peptide (1)..(691): Ceres Seq. ID no. 2996883
  misc_feature (365)..(507): Pfam Name: Putative GTPase activating protein for Arf Pfam Description: Putative GTPase activating protein for Arf
  misc_feature (1)..(682): Homolog of NCBI NO: 38175545 NR Description: putative ARF GTPase-activating domain-containing
  misc_feature (199)..(683): Homolog of NCBI NO: 15240398 NR Description: GCN4-complementing protein - like; protein id:
  misc_feature (1)..(112): Homolog of NCBI NO: 15240398 NR Description: GCN4-complementing protein - like; protein id:
  misc_feature (77)..(221): Homolog of NCBI NO: 15240398 NR Description: GCN4-complementing protein - like; protein id:
  misc_feature (358)..(682): Homolog of NCBI NO: 15219822 NR Description: GCN4-complementing protein, putative; protein id:
  misc_feature (1)..(228): Homolog of NCBI NO: 15219822 NR Description: GCN4-complementing protein, putative; protein id:
  misc_feature (196)..(304): Homolog of NCBI NO: 15219822 NR Description: GCN4-complementing protein, putative; protein id:
  misc_feature (1)..(245): Homolog of NCBI NO: 30681946 NR Description: ARF GTPase-activating domain-containing protein
  misc_feature (364)..(682): Homolog of NCBI NO: 30681946 NR Description: ARF GTPase-activating domain-containing protein
  misc_feature (364)..(682): Homolog of NCBI NO: 25402625 NR Description: hypothetical protein [imported] - Arabidopsis
MTKFTIALREIGTYKEVLRSQVEHILNDRLLQFANMDLHEVKAREKFLSLRKGTKSDVAAALEQELHTSRSMFEQARFNLVTALSNVEAKKRFEFLEAVSGTMDAHLRYFKQGYELLHQMEPYINQVLTYAQQSRERSNYEQAALNEKMQEYKRQVDRESRWGSNGSNGSPNGDGIQAIGRSSHKMIDAVMQSAARGKGSGSQLSGQRNSSELGSGLLSRWLSSNNHGHGGVHDEKSVARHTVNLLTSTIKVDADQSDLRFCFRIISPTKNYTLQAESALDQMDWIEKITGVIASLLSSQVPEQRLPGSPMGSGHHRSASESSSYESSEYDHPTTEEFVCERSFLGYNERPSRSFQPQRSIRKGEKPIDALRKVCGNDKCADCGAPEPDWASLNLGVLVCIECSGVHRNLGVHISKVRSLTLDVKVWEPSVISLFQALGNTFANTVWEELLHSRSAIHFDPGLTVSDKSRVMVTGKPSYADMISIKEKYIQAKYAEKLFVRRSRDSDFPQSAAQQMWDAVSGNDKKAVYRLIVNGDADVNYVYDQTSSSSLTLSRVILVPERPKREDVLLRLRNELLDRTGSSSNISPEGSGGSSLLHCACEKADLGMVELLLQYGANVNASDSSGQTPLHCCLLRGKVTIARLLLTRGADPEAMNREGKTALDIAAESNFTDPEVLALLSDTNGYNHRQC

SEQ ID NO: 70762 - protein, 656 aa, Arabidopsis thaliana
  peptide (1)..(656): Ceres Seq. ID no. 2996884
  misc_feature (330)..(472): Pfam Name: Putative GTPase activating protein for Arf Pfam Description: Putative GTPase activating protein for Arf
  misc_feature (1)..(647): Homolog of NCBI NO: 38175545 NR Description: putative ARF GTPase-activating domain-containing
  misc_feature (164)..(648): Homolog of NCBI NO: 15240398 NR Description: GCN4-complementing protein - like; protein id:
  misc_feature (1)..(77): Homolog of NCBI NO: 15240398 NR Description: GCN4-complementing protein - like; protein id:
  misc_feature (42)..(186): Homolog of NCBI NO: 15240398 NR Description: GCN4-complementing protein - like; protein id:
  misc_feature (323)..(647): Homolog of NCBI NO: 15219822 NR Description: GCN4-complementing protein, putative; protein id:
  misc_feature (1)..(193): Homolog of NCBI NO: 15219822 NR Description: GCN4-complementing protein, putative; protein id:
  misc_feature (161)..(269): Homolog of NCBI NO: 15219822 NR Description: GCN4-complementing protein, putative; protein id:
  misc_feature (1)..(210): Homolog of NCBI NO: 30681946 NR Description: ARF GTPase-activating domain-containing protein
  misc_feature (329)..(647): Homolog of NCBI NO: 30681946 NR Description: ARF GTPase-activating domain-containing protein
  misc_feature (329)..(647): Homolog of NCBI NO: 25402625 NR Description: hypothetical protein [imported] - Arabidopsis
MDLHEVKAREKFLSLRKGTKSDVAAALEQELHTSRSMFEQARFNLVTALSNVEAKKRFEFLEAVSGTMDAHLRYFKQGYELLHQMEPYINQVLTYAQQSRERSNYEQAALNEKMQEYKRQVDRESRWGSNGSNGSPNGDGIQAIGRSSHKMIDAVMQSAARGKGSGSQLSGQRNSSELGSGLLSRWLSSNNHGHGGVHDEKSVARHTVNLLTSTIKVDADQSDLRFCFRIISPTKNYTLQAESALDQMDWIEKITGVIASLLSSQVPEQRLPGSPMGSGHHRSASESSSYESSEYDHPTTEEFVCERSFLGYNERPSRSFQPQRSIRKGEKPIDALRKVCGNDKCADCGAPEPDWASLNLGVLVCIECSGVHRNLGVHISKVRSLTLDVKVWEPSVISLFQALGNTFANTVWEELLHSRSAIHFDPGLTVSDKSRVMVTGKPSYADMISIKEKYIQAKYAEKLFVRRSRDSDFPQSAAQQMWDAVSGNDKKAVYRLIVNGDADVNYVYDQTSSSSLTLSRVILVPERPKREDVLLRLRNELLDRTGSSSNISPEGSGGSSLLHCACEKADLGMVELLLQYGANVNASDSSGQTPLHCCLLRGKVTIARLLLTRGADPEAMNREGKTALDIAAESNFTDPEVLALLSDTNGYNHRQC

SEQ ID NO: 70763 - DNA, 1386 bp, Arabidopsis thaliana
  misc_feature (1)..(1386): Ceres Seq. ID no. 2997079
  misc_feature: MA Experiment ID: 20000355 Result: Up-regulated in Transcription
  misc_feature: MA Experiment 20000355 PARAMETER Experiment Name: At_Siliques_Sub_P Parameter: Age (day) Value: 21
  misc_feature: MA Experiment 20000355 PARAMETER Experiment Name: At_Siliques_Sub_P Parameter: Organism Value: A. thaliana
  misc_feature: MA Experiment 20000355 PARAMETER Experiment Name: At_Siliques_Sub_P Parameter: Plant Line Value: WS
  misc_feature: MA Experiment 20000355 PARAMETER Experiment Name: At_Siliques_Sub_P Parameter: Tissue Value: Less Than 5mm Siliques vs. Whole Plant
  misc_feature: MA Experiment ID: 20000440 Result: Up-regulated in Transcription
  misc_feature: MA Experiment 20000440 PARAMETER Experiment Name: At_Closed-Flower__Sub_P Parameter: Tissue Value: Closed Flower vs. Whole Plant
  misc_feature: MA Experiment ID: 20001807 Result: Down-regulated in Transcription
  misc_feature: MA Experiment 20001807 PARAMETER Experiment Name: At_50mM_NH4NO3_L-to-H_Sub_P Parameter: Timepoint (hr) Value: 6
  misc_feature: MA Experiment 20001807 PARAMETER Experiment Name: At_50mM_NH4NO3_L-to-H_Sub_P Parameter: Tissue Value: Leaf
  misc_feature: MA Experiment 20001807 PARAMETER Experiment Name: At_50mM_NH4NO3_L-to-H_Sub_P Parameter: Treatment Value: 50mM NH4NO3 vs 100mM Mannitol
atggcggaagaatctttattaccatctcatacagaagatgtatcagcttctcctaataaatcttcatcacttctgtctgaaatatcaaatgcttccacgagaccttttgttcttgctttcactgttggttcttgtggtgccttgagctttggatgcattttttcattttttggatcgatattgacagtggggctaatccttggagcattaatttgtgggaaattggcagatttggttggtcgtgtctatacgatatggattacaaacattcttgttttaatcggctggttagctattgcatttgccaaggatgttcggctactcgatcttggaaggttattgcaagggatctcggtcggaattagctcatatttgggacctatttacattagcgagttagcaccaagaaatttgcgaggagctgcttcttcgttgatgcagttatttgtcggtgtgggtctatcggccttttatgctctcggaacagccgttgcttggcgcagtttagccattttaggatctataccttctctagtggttctgcctcttcttttcttcatccccgaatctcctagatggctagctaaagttgggagggaaaaggaggttgaaggggttttattaagcttgcgaggagcaaaatctgatgtatcagatgaagcagcaacgatattagaatatacaaaacatgtcgaacaacaagacatcgatagccgcggtttcttcaagttgttccagcgaaaatacgcgttgccactaactattggagttgtccttatatctatgcctcagcttggaggtcttaatggttatactttttacaccgataccattttcacctctaccggtgtatcaagtgacattggattcatattgacatctattgttcagatgactggaggcgttttaggtgttttgcttgtggatatatccggaagacgttctctcctactgttttctcaagctggaatgttcttgggttgtctagcaacagccatttcattcttcttgcagaagaacaattgctgggaaacaggaacaccaataatggctctcattagtgttatggtgtattttggatcatacggattaggcatgggaccaataccatggatcatagcatcagagatttaccctgtagacgtgaaaggagcagcaggaacagtgtgtaacttggtcacctctataagctcatggctcgttacttactccttcaattttttgcttcaatggagttctacaggaacgtttatgatgtttgccactgtgatgggtcttggatttgtgttcacagccaagcttgttccagagaccaaaggcaaatctttagaagaaattcaatctgcttttactgattctacttctgaagattctacaattttctaa

SEQ ID NO: 70764 - protein, 461 aa, Arabidopsis thaliana
  peptide (1)..(461): Ceres Seq. ID no. 2997080
  misc_feature (16)..(450): Pfam Name: Sugar (and other) transporter Pfam Description: Sugar (and other) transporter
  misc_feature (1)..(461): Homolog of NCBI NO: 15234444 NR Description: putative sugar transporter; protein id: [Arabidopsis thaliana] >gi|25308950|pir||G85059 probable sugar
  misc_feature (1)..(461): Homolog of NCBI NO: 15234445 NR Description: putative sugar transporter; protein id: [Arabidopsis thaliana] >gi|25308951|pir||H85059 probable sugar
  misc_feature (89)..(284): Homolog of NCBI NO: 4115940 NR Description: contains similarity to sugar (and other)
  misc_feature (355)..(461): Homolog of NCBI NO: 4115940 NR Description: contains similarity to sugar (and other)
  misc_feature (1)..(56): Homolog of NCBI NO: 4115940 NR Description: contains similarity to sugar (and other)
  misc_feature (288)..(461): Homolog of NCBI NO: 4115950 NR Description: contains similarity to sugar (and other)
  misc_feature (90)..(225): Homolog of NCBI NO: 4115950 NR Description: contains similarity to sugar (and other)
  misc_feature (1)..(87): Homolog of NCBI NO: 4115950 NR Description: contains similarity to sugar (and other)
  misc_feature (84)..(103): Homolog of NCBI NO: 4115950 NR Description: contains similarity to sugar (and other)
  misc_feature (146)..(282): Homolog of NCBI NO: 26451427 NR Description: putative sugar transporter [Arabidopsis thaliana]
MAEESLLPSHTEDVSASPNKSSSLLSEISNASTRPFVLAFTVGSCGALSFGCIFSFFGSILTVGLILGALICGKLADLVGRVYTIWITNILVLIGWLAIAFAKDVRLLDLGRLLQGISVGISSYLGPIYISELAPRNLRGAASSLMQLFVGVGLSAFYALGTAVAWRSLAILGSIPSLVVLPLLFFIPESPRWLAKVGREKEVEGVLLSLRGAKSDVSDEAATILEYTKHVEQQDIDSRGFFKLFQRKYALPLTIGVVLISMPQLGGLNGYTFYTDTIFTSTGVSSDIGFILTSIVQMTGGVLGVLLVDISGRRSLLLFSQAGMFLGCLATAISFFLQKNNCWETGTPIMALISVMVYFGSYGLGMGPIPWIIASEIYPVDVKGAAGTVCNLVTSISSWLVTYSFNFLLQWSSTGTFMMFATVMGLGFVFTAKLVPETKGKSLEEIQSAFTDSTSEDSTIF

SEQ ID NO: 70765 - protein, 316 aa, Arabidopsis thaliana
  peptide (1)..(316): Ceres Seq. ID no. 2997081
  misc_feature (1)..(305): Pfam Name: Sugar (and other) transporter Pfam Description: Sugar (and other) transporter
  misc_feature (1)..(316): Homolog of NCBI NO: 15234444 NR Description: putative sugar transporter; protein id: [Arabidopsis thaliana] >gi|25308950|pir||G85059 probable sugar
  misc_feature (1)..(316): Homolog of NCBI NO: 15234445 NR Description: putative sugar transporter; protein id: [Arabidopsis thaliana] >gi|25308951|pir||H85059 probable sugar
  misc_feature (1)..(139): Homolog of NCBI NO: 4115940 NR Description: contains similarity to sugar (and other)
  misc_feature (210)..(316): Homolog of NCBI NO: 4115940 NR Description: contains similarity to sugar (and other)
  misc_feature (143)..(316): Homolog of NCBI NO: 4115950 NR Description: contains similarity to sugar (and other)
  misc_feature (1)..(80): Homolog of NCBI NO: 4115950 NR Description: contains similarity to sugar (and other)
  misc_feature (1)..(137): Homolog of NCBI NO: 26451427 NR Description: putative sugar transporter [Arabidopsis thaliana]
  misc_feature (1)..(308): Homolog of NCBI NO: 23504385 NR Description: putative sugar transporter [Lycopersicon
  misc_feature (1)..(302): Homolog of NCBI NO: 30695810 NR Description: sugar transporter, putative [Arabidopsis thaliana]
  misc_feature (1)..(306): Homolog of NCBI NO: 15231145 NR Description: sugar transporter, putative; protein id:
MQLFVGVGLSAFYALGTAVAWRSLAILGSIPSLVVLPLLFFIPESPRWLAKVGREKEVEGVLLSLRGAKSDVSDEAATILEYTKHVEQQDIDSRGFFKLFQRKYALPLTIGVVLISMPQLGGLNGYTFYTDTIFTSTGVSSDIGFILTSIVQMTGGVLGVLLVDISGRRSLLLFSQAGMFLGCLATAISFFLQKNNCWETGTPIMALISVMVYFGSYGLGMGPIPWIIASEIYPVDVKGAAGTVCNLVTSISSWLVTYSFNFLLQWSSTGTFMMFATVMGLGFVFTAKLVPETKGKSLEEIQSAFTDSTSEDSTIF

SEQ ID NO: 70766 - DNA, 2196 bp, Arabidopsis thaliana
  misc_feature (1)..(2196): Ceres Seq. ID no. 2997082
  misc_feature: MA Experiment ID: 20001558 Result: Up-regulated in Transcription
  misc_feature: MA Experiment 20001558 PARAMETER Experiment Name: At_Drought_Soil_Dry_P Parameter: Age (day) Value: 27
  misc_feature: MA Experiment 20001558 PARAMETER Experiment Name: At_Drought_Soil_Dry_P Parameter: Organism Value: A. thaliana
  misc_feature: MA Experiment 20001558 PARAMETER Experiment Name: At_Drought_Soil_Dry_P Parameter: Plant Line Value: WS
  misc_feature: MA Experiment 20001558 PARAMETER Experiment Name: At_Drought_Soil_Dry_P Parameter: Post Timepoint (hr) Value: 6
  misc_feature: MA Experiment 20001558 PARAMETER Experiment Name: At_Drought_Soil_Dry_P Parameter: Post-Treatment Value: Re-Water vs. No Drought
  misc_feature: MA Experiment 20001558 PARAMETER Experiment Name: At_Drought_Soil_Dry_P Parameter: Timepoint (day) Value: 13
  misc_feature: MA Experiment 20001558 PARAMETER Experiment Name: At_Drought_Soil_Dry_P Parameter: Treatment Value: Drought vs. No Drought
atggttgtctcaaaggttaacaaaagcttattaagttcagtcttcaaatcccgtattagacccaccggcgaatcttcaattgcttccggcaacaaagacatcgccggaacttctcaagctgtcaaagatcttctctcttccaaaaactcttcctcagtaacaacatcagataaaagctctttggagaagaacttatttttaaagataccaagtttcaccactaagatcccttatgatatttcgttaagaacgaaagagttgtctcgtgaaaggaaagagagacgtgtttacaagcagaacggtctgtcacggcgtttcgctaagatatttagagactctgctcagaaattaggcactgaggctatgtttggtgcttttgatagagtagctaaagagatgagtgtgacagagtacaatgcaatgattggtgtttacttagagcatgctgagaaaagcaatgatctagattatgctcttggccatattgagaaggcttttgagcttttgaaatctatgagagatcgtggatttttgattgaagaaagagtttatggtcctcttcttggttatttgattggtatggatatggtagatgagtttcatagtttcaaggatgtgattagggaggctagtcccggttccgttgagagacttggttactatgaaatgcttctttggatccatcttggtgatggagagaagattgaggaactttgcagtacaattgatggtgataacggtgaaagcttatcagtcttgcaagatgaaggagtgaagaacgtttctgatctcatctctatctattctacttgcaccccaaatccaacggttgaggatacaatcttaaaatttaacaagatgcatgaagaacttgatgttatgccttcatctacatcgtacgaaaagcttgttaagtatagctgtgactcgaatgaggtagtcactgctcttgatgtagttgaaaaaatgggtgaagcaggtttgatgatatccgcagatatcctacattcattgttacatgccattgatgaagttcttgagtttgatttgtttgaaggtgcatataatatgcttggtaatttaaagaacttcaatttggaaccaaactctagcatgttcaattgtatattggctggatattttagggagaaaaatgtgagtagtgcgttaatggtcgtcaagcaaatgaaggaagctggcgttaaacctgattccataacttttggttatctaataaacaactgtacccaggaggacgctattactaagtactatgaggagatgaagcaagcaggagttcaagctactaagcgaatttacatgtccctgatagatgcatatgcagcatctgggaagtttgagaaggcgaaacaggtgctcgtagatccagatgttccggctataaaccaaaatgaactgaaaagtgtgcttatttcggctcttgcatcacgtggaaaatgggcagatgccttacatatatatgaagaaatgaggaaagccgaatgccacgtagacccgaaatcgattatatctcttatagaatactctgattcaaagggagagttaagtacgctagttcaactggctgatgacctacaagatgatactagttggatcgacggtttcttcagaatgattttgttcgctgtccgcaataaaaagtcaagcgatattgttgatctgctgaaacggaacaaggtccggttgttaaagaaaggcatacctgtggaagctcattttgacgaggtgttttgggcaatcgcagagacagagccatccaaagtgcatctaggaatggatttgctaagatttatgaaagatgagctcgggtttgttccttcaagaaaatgtctagattttctcttacatgcatgtgttaatgccaaggacctggagcacggtctattggtgtggaaagagtaccaatctgcagcattcccttgcaacgtcctgagctttctgaggatgtatcaggttctactagctgcaggggattcagaaggtgccaaggcattggtgtcaaaaattccaaaagatgataaagatgtacaacatatcatcgaagaaagtcagtctgcattttctcaagcacccaacaagaagaaaccaaaaaagaaaatgattgttttatcaacaaagatgtatcaggttctactagctgcaggggattcagaaggtgccaaggcattgatataa

SEQ ID NO: 70767 - protein, 731 aa, Arabidopsis thaliana
  peptide (1)..(731): Ceres Seq. ID no. 2997083
  misc_feature (472)..(506): Pfam Name: PPR repeat Pfam Description: PPR repeat
  misc_feature (351)..(655): Homolog of NCBI NO: 30685606 NR Description: pentatricopeptide (PPR) repeat-containing protein
  misc_feature (6)..(607): Homolog of NCBI NO: 30685606 NR Description: pentatricopeptide (PPR) repeat-containing protein
  misc_feature (1)..(609): Homolog of NCBI NO: 4115946 NR Description: contains similarity to Ipomoea nil leaf protein
  misc_feature (354)..(731): Homolog of NCBI NO: 4115946 NR Description: contains similarity to Ipomoea nil leaf protein
  misc_feature (709)..(731): Homolog of NCBI NO: 34849885 NR Description: At4g04790 [Arabidopsis thaliana]
  misc_feature (351)..(655): Homolog of NCBI NO: 7487835 NR Description: hypothetical protein T8O5.90 - Arabidopsis >gi|2894566|emb|CAA17155.1| putative protein [Arabidopsis >gi|7269033|emb|CAB79143.1| putative protein [Arabidopsis
  misc_feature (1)..(509): Homolog of NCBI NO: 34849885 NR Description: At4g04790 [Arabidopsis thaliana]
  misc_feature (351)..(713): Homolog of NCBI NO: 34849885 NR Description: At4g04790 [Arabidopsis thaliana]
  misc_feature (81)..(607): Homolog of NCBI NO: 7487835 NR Description: hypothetical protein T8O5.90 - Arabidopsis >gi|2894566|emb|CAA17155.1| putative protein [Arabidopsis >gi|7269033|emb|CAB79143.1| putative protein [Arabidopsis
  misc_feature (279)..(661): Homolog of NCBI NO: 15221691 NR Description: unknown protein; protein id: At1g63130.1
MVVSKVNKSLLSSVFKSRIRPTGESSIASGNKDIAGTSQAVKDLLSSKNSSSVTTSDKSSLEKNLFLKIPSFTTKIPYDISLRTKELSRERKERRVYKQNGLSRRFAKIFRDSAQKLGTEAMFGAFDRVAKEMSVTEYNAMIGVYLEHAEKSNDLDYALGHIEKAFELLKSMRDRGFLIEERVYGPLLGYLIGMDMVDEFHSFKDVIREASPGSVERLGYYEMLLWIHLGDGEKIEELCSTIDGDNGESLSVLQDEGVKNVSDLISIYSTCTPNPTVEDTILKFNKMHEELDVMPSSTSYEKLVKYSCDSNEVVTALDVVEKMGEAGLMISADILHSLLHAIDEVLEFDLFEGAYNMLGNLKNFNLEPNSSMFNCILAGYFREKNVSSALMVVKQMKEAGVKPDSITFGYLINNCTQEDAITKYYEEMKQAGVQATKRIYMSLIDAYAASGKFEKAKQVLVDPDVPAINQNELKSVLISALASRGKWADALHIYEEMRKAECHVDPKSIISLIEYSDSKGELSTLVQLADDLQDDTSWIDGFFRMILFAVRNKKSSDIVDLLKRNKVRLLKKGIPVEAHFDEVFWAIAETEPSKVHLGMDLLRFMKDELGFVPSRKCLDFLLHACVNAKDLEHGLLVWKEYQSAAFPCNVLSFLRMYQVLLAAGDSEGAKALVSKIPKDDKDVQHIIEESQSAFSQAPNKKKPKKKMIVLSTKMYQVLLAAGDSEGAKALI

SEQ ID NO: 70768 - protein, 610 aa, Arabidopsis thaliana
  peptide (1)..(610): Ceres Seq. ID no. 2997084
  misc_feature (351)..(385): Pfam Name: PPR repeat Pfam Description: PPR repeat
  misc_feature (1)..(488): Homolog of NCBI NO: 4115946 NR Description: contains similarity to Ipomoea nil leaf protein
  misc_feature (230)..(592): Homolog of NCBI NO: 34849885 NR Description: At4g04790 [Arabidopsis thaliana]
  misc_feature (233)..(610): Homolog of NCBI NO: 4115946 NR Description: contains similarity to Ipomoea nil leaf protein
  misc_feature (1)..(388): Homolog of NCBI NO: 34849885 NR Description: At4g04790 [Arabidopsis thaliana]
  misc_feature (588)..(610): Homolog of NCBI NO: 34849885 NR Description: At4g04790 [Arabidopsis thaliana]
  misc_feature (230)..(534): Homolog of NCBI NO: 7487835 NR Description: hypothetical protein T8O5.90 - Arabidopsis >gi|2894566|emb|CAA17155.1| putative protein [Arabidopsis >gi|7269033|emb|CAB79143.1| putative protein [Arabidopsis
  misc_feature (230)..(534): Homolog of NCBI NO: 30685606 NR Description: pentatricopeptide (PPR) repeat-containing protein
  misc_feature (1)..(486): Homolog of NCBI NO: 30685606 NR Description: pentatricopeptide (PPR) repeat-containing protein
  misc_feature (1)..(486): Homolog of NCBI NO: 7487835 NR Description: hypothetical protein T8O5.90 - Arabidopsis >gi|2894566|emb|CAA17155.1| putative protein [Arabidopsis >gi|7269033|emb|CAB79143.1| putative protein [Arabidopsis
  misc_feature (158)..(540): Homolog of NCBI NO: 15221691 NR Description: unknown protein; protein id: At1g63130.1
MFGAFDRVAKEMSVTEYNAMIGVYLEHAEKSNDLDYALGHIEKAFELLKSMRDRGFLIEERVYGPLLGYLIGMDMVDEFHSFKDVIREASPGSVERLGYYEMLLWIHLGDGEKIEELCSTIDGDNGESLSVLQDEGVKNVSDLISIYSTCTPNPTVEDTILKFNKMHEELDVMPSSTSYEKLVKYSCDSNEVVTALDVVEKMGEAGLMISADILHSLLHAIDEVLEFDLFEGAYNMLGNLKNFNLEPNSSMFNCILAGYFREKNVSSALMVVKQMKEAGVKPDSITFGYLINNCTQEDAITKYYEEMKQAGVQATKRIYMSLIDAYAASGKFEKAKQVLVDPDVPAINQNELKSVLISALASRGKWADALHIYEEMRKAECHVDPKSIISLIEYSDSKGELSTLVQLADDLQDDTSWIDGFFRMILFAVRNKKSSDIVDLLKRNKVRLLKKGIPVEAHFDEVFWAIAETEPSKVHLGMDLLRFMKDELGFVPSRKCLDFLLHACVNAKDLEHGLLVWKEYQSAAFPCNVLSFLRMYQVLLAAGDSEGAKALVSKIPKDDKDVQHIIEESQSAFSQAPNKKKPKKKMIVLSTKMYQVLLAAGDSEGAKALI

SEQ ID NO: 70769 - protein, 599 aa, Arabidopsis thaliana
  peptide (1)..(599): Ceres Seq. ID no. 2997085
  misc_feature (340)..(374): Pfam Name: PPR repeat Pfam Description: PPR repeat
  misc_feature (1)..(477): Homolog of NCBI NO: 4115946 NR Description: contains similarity to Ipomoea nil leaf protein
  misc_feature (219)..(581): Homolog of NCBI NO: 34849885 NR Description: At4g04790 [Arabidopsis thaliana]
  misc_feature (222)..(599): Homolog of NCBI NO: 4115946 NR Description: contains similarity to Ipomoea nil leaf protein
  misc_feature (1)..(377): Homolog of NCBI NO: 34849885 NR Description: At4g04790 [Arabidopsis thaliana]
  misc_feature (577)..(599): Homolog of NCBI NO: 34849885 NR Description: At4g04790 [Arabidopsis thaliana]
  misc_feature (219)..(523): Homolog of NCBI NO: 7487835 NR Description: hypothetical protein T8O5.90 - Arabidopsis >gi|2894566|emb|CAA17155.1| putative protein [Arabidopsis >gi|7269033|emb|CAB79143.1| putative protein [Arabidopsis
  misc_feature (219)..(523): Homolog of NCBI NO: 30685606 NR Description: pentatricopeptide (PPR) repeat-containing protein
  misc_feature (1)..(475): Homolog of NCBI NO: 30685606 NR Description: pentatricopeptide (PPR) repeat-containing protein
  misc_feature (1)..(475): Homolog of NCBI NO: 7487835 NR Description: hypothetical protein T8O5.90 - Arabidopsis >gi|2894566|emb|CAA17155.1| putative protein [Arabidopsis >gi|7269033|emb|CAB79143.1| putative protein [Arabidopsis
  misc_feature (147)..(529): Homolog of NCBI NO: 15221691 NR Description: unknown protein; protein id: At1g63130.1
MSVTEYNAMIGVYLEHAEKSNDLDYALGHIEKAFELLKSMRDRGFLIEERVYGPLLGYLIGMDMVDEFHSFKDVIREASPGSVERLGYYEMLLWIHLGDGEKIEELCSTIDGDNGESLSVLQDEGVKNVSDLISIYSTCTPNPTVEDTILKFNKMHEELDVMPSSTSYEKLVKYSCDSNEVVTALDVVEKMGEAGLMISADILHSLLHAIDEVLEFDLFEGAYNMLGNLKNFNLEPNSSMFNCILAGYFREKNVSSALMVVKQMKEAGVKPDSITFGYLINNCTQEDAITKYYEEMKQAGVQATKRIYMSLIDAYAASGKFEKAKQVLVDPDVPAINQNELKSVLISALASRGKWADALHIYEEMRKAECHVDPKSIISLIEYSDSKGELSTLVQLADDLQDDTSWIDGFFRMILFAVRNKKSSDIVDLLKRNKVRLLKKGIPVEAHFDEVFWAIAETEPSKVHLGMDLLRFMKDELGFVPSRKCLDFLLHACVNAKDLEHGLLVWKEYQSAAFPCNVLSFLRMYQVLLAAGDSEGAKALVSKIPKDDKDVQHIIEESQSAFSQAPNKKKPKKKMIVLSTKMYQVLLAAGDSEGAKALI

SEQ ID NO: 70770 - DNA, 933 bp, Arabidopsis thaliana
  misc_feature (1)..(933): Ceres Seq. ID no. 2997185
  misc_feature: MA Experiment ID: 20000307 Result: Down-regulated in Transcription
  misc_feature: MA Experiment 20000307 PARAMETER Experiment Name: At_Germinating_Seeds_Sub_P Parameter: Age (hr) Value: 24 vs. 0
  misc_feature: MA Experiment 20000307 PARAMETER Experiment Name: At_Germinating_Seeds_Sub_P Parameter: Organism Value: A. thaliana
  misc_feature: MA Experiment 20000307 PARAMETER Experiment Name: At_Germinating_Seeds_Sub_P Parameter: Plant Line Value: WS
  misc_feature: MA Experiment 20000307 PARAMETER Experiment Name: At_Germinating_Seeds_Sub_P Parameter: Tissue Value: Germinating Seeds
atgtttactgattgctcctcctccacaacgtcgcgtctcatccatttatacaaccgcaatggtgttttcctcccccgcccgagcgtcagccaattcagcttacggacaactgcgtctacttggcgctgcactctctccattcgctcctcttcttctccatctgcgattgtaattgatggaaaggctgaggccaaaaagattagagatgatatcaaaatcgaagtttcaagaatgaaggaatcaatcggtgtggttcctgctgaagattcatcagaagaagaggtgttgaaatatgtatcaggattcaatgatgatccttctgttcacggagtccttgttcagttgcctctaccatcgcatatggatgaacagaacatattgaatgcggttagtatagagaaggacgttgatggatttcacccgctaaatattggacggcttgccatgcgtggtagagaacctttattcgttccatgtactccaaaaggatgcatcgagttgttgcacagatacaacattgaattcaaaggcaaaagagcagttgttattggaaggagtaacattgttggtatgccagctgctctgttgctgcagaaggaggatgcaaccgttagcattatccattcaagaaccatgaaccctgaagaactcacaagacaagctgatatcctaatctcagctgttgggaaaccaaacatggtcagaggaagctggataaaaccgggtgcagtcctcatcgatgttgggattaaacctgttgaggatccaagtgctgccggtggagagcggttggttggagacatttgctatgtggaggctagcaaaattgcatcagccatcacacctgttcctggtgatgtaggaccaatgaccatagccatgcttctatccaacactttaacatcagccaagagaattcacaacttccagtga

SEQ ID NO: 70771 - protein, 310 aa, Arabidopsis thaliana
  peptide (1)..(310): Ceres Seq. ID no. 2997186
  misc_feature (139)..(307): Pfam Name: Tetrahydrofolate dehydrogenase/cyclohydrolase, Pfam Description: Tetrahydrofolate dehydrogenase/cyclohydrolase,
  misc_feature (1)..(310): Homolog of NCBI NO: 15236884 NR Description: putative tetrahydrofolate synthase; protein id:
  misc_feature (56)..(310): Homolog of NCBI NO: 15236888 NR Description: putative tetrahydrofolate synthase; protein id: supported by cDNA: gi_16649148 [Arabidopsis thaliana]
  misc_feature (1)..(86): Homolog of NCBI NO: 15236888 NR Description: putative tetrahydrofolate synthase; protein id: supported by cDNA: gi_16649148 [Arabidopsis thaliana]
  misc_feature (55)..(306): Homolog of NCBI NO: 25284864 NR Description: methylenetetrahydrofolate dehydrogenase - Arabidopsis thaliana >gi|3786006|gb|AAC67352.1|
  misc_feature (55)..(306): Homolog of NCBI NO: 30687594 NR Description: tetrahydrofolate dehydrogenase/cyclohydrolase,
  misc_feature (45)..(306): Homolog of NCBI NO: 21553669 NR Description: 5,10-methylenetetrahydrofolate methenyltetrahydrofolate cyclohydrolase, putative [Arabidopsis
  misc_feature (45)..(306): Homolog of NCBI NO: 15230449 NR Description: 5,10-methylenetetrahydrofolate methenyltetrahydrofolate cyclohydrolase, putative; protein id: supported by cDNA: 156450. [Arabidopsis thaliana]
  misc_feature (88)..(305): Homolog of NCBI NO: 11252953 NR Description: methylenetetrahydrofolate dehydrogenase (NADP)
  misc_feature (81)..(305): Homolog of NCBI NO: 12083525 NR Description: similar to Pisum sativum
  misc_feature (133)..(292): Homolog of NCBI NO: 17017267 NR Description: methylenetetrahydrofolate
MFTDCSSSTTSRLIHLYNRNGVFLPRPSVSQFSLRTTASTWRCTLSIRSSSSPSAIVIDGKAEAKKIRDDIKIEVSRMKESIGVVPAEDSSEEEVLKYVSGFNDDPSVHGVLVQLPLPSHMDEQNILNAVSIEKDVDGFHPLNIGRLAMRGREPLFVPCTPKGCIELLHRYNIEFKGKRAVVIGRSNIVGMPAALLLQKEDATVSIIHSRTMNPEELTRQADILISAVGKPNMVRGSWIKPGAVLIDVGIKPVEDPSAAGGERLVGDICYVEASKIASAITPVPGDVGPMTIAMLLSNTLTSAKRIHNFQ

SEQ ID NO: 70772 - protein, 233 aa, Arabidopsis thaliana
  peptide (1)..(233): Ceres Seq. ID no. 2997187
  misc_feature (62)..(230): Pfam Name: Tetrahydrofolate dehydrogenase/cyclohydrolase, Pfam Description: Tetrahydrofolate dehydrogenase/cyclohydrolase,
  misc_feature (1)..(233): Homolog of NCBI NO: 15236884 NR Description: putative tetrahydrofolate synthase; protein id:
  misc_feature (1)..(233): Homolog of NCBI NO: 15236888 NR Description: putative tetrahydrofolate synthase; protein id: supported by cDNA: gi_16649148 [Arabidopsis thaliana]
  misc_feature (1)..(229): Homolog of NCBI NO: 25284864 NR Description: methylenetetrahydrofolate dehydrogenase - Arabidopsis thaliana >gi|3786006|gb|AAC67352.1|
  misc_feature (1)..(229): Homolog of NCBI NO: 30687594 NR Description: tetrahydrofolate dehydrogenase/cyclohydrolase,
  misc_feature (1)..(229): Homolog of NCBI NO: 21553669 NR Description: 5,10-methylenetetrahydrofolate methenyltetrahydrofolate cyclohydrolase, putative [Arabidopsis
  misc_feature (1)..(229): Homolog of NCBI NO: 15230449 NR Description: 5,10-methylenetetrahydrofolate methenyltetrahydrofolate cyclohydrolase, putative; protein id: supported by cDNA: 156450. [Arabidopsis thaliana]
  misc_feature (11)..(228): Homolog of NCBI NO: 11252953 NR Description: methylenetetrahydrofolate dehydrogenase (NADP)
  misc_feature (4)..(228): Homolog of NCBI NO: 12083525 NR Description: similar to Pisum sativum
  misc_feature (56)..(215): Homolog of NCBI NO: 17017267 NR Description: methylenetetrahydrofolate
  misc_feature (11)..(228): Homolog of NCBI NO: 9992889 NR Description: C1-THFS protein [Yarrowia lipolytica]
MKESIGVVPAEDSSEEEVLKYVSGFNDDPSVHGVLVQLPLPSHMDEQNILNAVSIEKDVDGFHPLNIGRLAMRGREPLFVPCTPKGCIELLHRYNIEFKGKRAVVIGRSNIVGMPAALLLQKEDATVSIIHSRTMNPEELTRQADILISAVGKPNMVRGSWIKPGAVLIDVGIKPVEDPSAAGGERLVGDICYVEASKIASAITPVPGDVGPMTIAMLLSNTLTSAKRIHNFQ

SEQ ID NO: 70773 - protein, 190 aa, Arabidopsis thaliana
  peptide (1)..(190): Ceres Seq. ID no. 2997188
  misc_feature (19)..(187): Pfam Name: Tetrahydrofolate dehydrogenase/cyclohydrolase, Pfam Description: Tetrahydrofolate dehydrogenase/cyclohydrolase,
  misc_feature (1)..(190): Homolog of NCBI NO: 15236884 NR Description: putative tetrahydrofolate synthase; protein id:
  misc_feature (1)..(190): Homolog of NCBI NO: 15236888 NR Description: putative tetrahydrofolate synthase; protein id: supported by cDNA: gi_16649148 [Arabidopsis thaliana]
  misc_feature (1)..(186): Homolog of NCBI NO: 25284864 NR Description: methylenetetrahydrofolate dehydrogenase - Arabidopsis thaliana >gi|3786006|gb|AAC67352.1|
  misc_feature (1)..(186): Homolog of NCBI NO: 30687594 NR Description: tetrahydrofolate dehydrogenase/cyclohydrolase,
  misc_feature (1)..(186): Homolog of NCBI NO: 21553669 NR Description: 5,10-methylenetetrahydrofolate methenyltetrahydrofolate cyclohydrolase, putative [Arabidopsis
  misc_feature (1)..(186): Homolog of NCBI NO: 15230449 NR Description: 5,10-methylenetetrahydrofolate methenyltetrahydrofolate cyclohydrolase, putative; protein id: supported by cDNA: 156450. [Arabidopsis thaliana]
  misc_feature (1)..(185): Homolog of NCBI NO: 11252953 NR Description: methylenetetrahydrofolate dehydrogenase (NADP)
  misc_feature (1)..(185): Homolog of NCBI NO: 12083525 NR Description: similar to Pisum sativum
  misc_feature (13)..(172): Homolog of NCBI NO: 17017267 NR Description: methylenetetrahydrofolate
  misc_feature (1)..(185): Homolog of NCBI NO: 9992889 NR Description: C1-THFS protein [Yarrowia lipolytica]
MDEQNILNAVSIEKDVDGFHPLNIGRLAMRGREPLFVPCTPKGCIELLHRYNIEFKGKRAVVIGRSNIVGMPAALLLQKEDATVSIIHSRTMNPEELTRQADILISAVGKPNMVRGSWIKPGAVLIDVGIKPVEDPSAAGGERLVGDICYVEASKIASAITPVPGDVGPMTIAMLLSNTLTSAKRIHNFQ

SEQ ID NO: 70774 - DNA, 1296 bp, Arabidopsis thaliana
  misc_feature (1)..(1296): Ceres Seq. ID no. 2997336
  misc_feature: MA Experiment ID: 20000184 Result: Up-regulated in Transcription
  misc_feature: MA Experiment 20000184 PARAMETER Experiment Name: At_Shoots__P Parameter: Age (day) Value: 7
  misc_feature: MA Experiment 20000184 PARAMETER Experiment Name: At_Shoots__P Parameter: Tissue Value: Shoots vs. Whole Plant
atgatccgttcttcgattgtaattttatctctgttactaatttcacacttggtttctgcaaaagttctgttgatcggtaacagcacatctctctccttcgacgacgtcgaagccactttcactccgatgattaagagatcggatcaaggcggtgtgttgtatgtagcagagccactcgatgcttgttcggatttggtgaatacggtgaatgtgaaaaatggaactactgtgtctcctccgtatgtgttgattatccgcggtggttgtagtttcgaagataagattaggaatgctcaaaaggctggttataaagctgctattgtttatgactatgaagattttgggttcttagtatcaacaactggggaagtacttaaagagtatgcgggtcgtaccgattttgaagtgtggctcatgccaagtttcgagacttcagcatggtcaatcatggctatttctttcatatctctcctcgccatgtcggctgtgctcgctacttgcttctttgtccgtaggcatcgagttaggcgtcggcgtattctggctcttaatggcaatgactttcatcgtatgcccaaaagcatgataatacgtatgcctactaccatatttaacggtatttgtgatgaagcaactacatctatattgtgctgcatatgccttgagaattatgagaaaggggacaagctaaggatcctaccttgccatcacaaatttcatgttgcttgtgtagacttgtggcttggccagaggaaatccttttgcccggtttgcaaacgcgatgcaagaagcatcagtaccgacaagcccccatcagagcacacaccctttctttctcggactcctagcatgaccccgacgtcatcgtttctcttatcatcatcctccacaaccccattgcagtcatctcatgagctaccaatatccatcagagtagacccttctttaccatccacctcaatgcagccacacacagttcctatgtatctctcccactctcgctcccacacaagcttccaaaatggatcaaaccgattttcccggcctataccagttagccggagttcagcagatctcaggaacgccgtttcccaaagatcttacaactcaccccaccaggtttctttgcctcgtttcctccactcaagatatacgcacatacttggcccgggaaatgcatcaagaagccaggttgttgggttgttaacaagccagcgcgagcattcacttcatcaaaatgactcgcgcaggtctttcattcactttgcatctgcgagctccttaccaggctggtaa

SEQ ID NO: 70775 - protein, 431 aa, Arabidopsis thaliana
  peptide (1)..(431): Ceres Seq. ID no. 2997337
  misc_feature (43)..(129): Pfam Name: PA domain Pfam Description: PA domain
  misc_feature (1)..(431): Homolog of NCBI NO: 15233945 NR Description: putative protein; protein id: At4g09560.1
  misc_feature (116)..(426): Homolog of NCBI NO: 19071633 NR Description: putative integral membrane protein [Oryza sativa
  misc_feature (13)..(138): Homolog of NCBI NO: 19071633 NR Description: putative integral membrane protein [Oryza sativa
  misc_feature (1)..(429): Homolog of NCBI NO: 22330577 NR Description: unknown protein; protein id: At1g71980.1, by cDNA: gi_17529199 [Arabidopsis thaliana] unknown protein [Arabidopsis thaliana]
  misc_feature (4)..(315): Homolog of NCBI NO: 25403460 NR Description: protein F15O4.19 [imported] - Arabidopsis >gi|8778343|gb|AAF79351.1|AC007887_10 F15O4.19 [Arabidopsis
  misc_feature (6)..(429): Homolog of NCBI NO: 6942149 NR Description: ReMembR-H2 protein JR702 [Arabidopsis thaliana]
  misc_feature (27)..(429): Homolog of NCBI NO: 25406132 NR Description: unknown protein F17M19.13 [imported] -
  misc_feature (11)..(392): Homolog of NCBI NO: 38637053 NR Description: putative ReMembR-H2 protein [Oryza sativa
  misc_feature (42)..(312): Homolog of NCBI NO: 15219668 NR Description: integral membrane protein, putative; protein id:
  misc_feature (4)..(312): Homolog of NCBI NO: 15219670 NR Description: integral membrane protein, putative; protein id:
MIRSSIVILSLLLISHLVSAKVLLIGNSTSLSFDDVEATFTPMIKRSDQGGVLYVAEPLDACSDLVNTVNVKNGTTVSPPYVLIIRGGCSFEDKIRNAQKAGYKAAIVYDYEDFGFLVSTTGEVLKEYAGRTDFEVWLMPSFETSAWSIMAISFISLLAMSAVLATCFFVRRHRVRRRRILALNGNDFHRMPKSMIIRMPTTIFNGICDEATTSILCCICLENYEKGDKLRILPCHHKFHVACVDLWLGQRKSFCPVCKRDARSISTDKPPSEHTPFLSRTPSMTPTSSFLLSSSSTTPLQSSHELPISIRVDPSLPSTSMQPHTVPMYLSHSRSHTSFQNGSNRFSRPIPVSRSSADLRNAVSQRSYNSPHQVSLPRFLHSRYTHILGPGNASRSQVVGLLTSQREHSLHQNDSRRSFIHFASASSLPGW

SEQ ID NO: 70776 - protein, 389 aa, Arabidopsis thaliana
  peptide (1)..(389): Ceres Seq. ID no. 2997338
  misc_feature (1)..(87): Pfam Name: PA domain Pfam Description: PA domain
  misc_feature (1)..(389): Homolog of NCBI NO: 15233945 NR Description: putative protein; protein id: At4g09560.1
  misc_feature (74)..(384): Homolog of NCBI NO: 19071633 NR Description: putative integral membrane protein [Oryza sativa
  misc_feature (1)..(96): Homolog of NCBI NO: 19071633 NR Description: putative integral membrane protein [Oryza sativa
  misc_feature (1)..(387): Homolog of NCBI NO: 22330577 NR Description: unknown protein; protein id: At1g71980.1, by cDNA: gi_17529199 [Arabidopsis thaliana] unknown protein [Arabidopsis thaliana]
  misc_feature (1)..(273): Homolog of NCBI NO: 25403460 NR Description: protein F15O4.19 [imported] - Arabidopsis >gi|8778343|gb|AAF79351.1|AC007887_10 F15O4.19 [Arabidopsis
  misc_feature (1)..(387): Homolog of NCBI NO: 6942149 NR Description: ReMembR-H2 protein JR702 [Arabidopsis thaliana]
  misc_feature (1)..(387): Homolog of NCBI NO: 25406132 NR Description: unknown protein F17M19.13 [imported] -
  misc_feature (1)..(350): Homolog of NCBI NO: 38637053 NR Description: putative ReMembR-H2 protein [Oryza sativa
  misc_feature (1)..(270): Homolog of NCBI NO: 15219668 NR Description: integral membrane protein, putative; protein id:
  misc_feature (1)..(270): Homolog of NCBI NO: 15219670 NR Description: integral membrane protein, putative; protein id:
MIKRSDQGGVLYVAEPLDACSDLVNTVNVKNGTTVSPPYVLIIRGGCSFEDKIRNAQKAGYKAAIVYDYEDFGFLVSTTGEVLKEYAGRTDFEVWLMPSFETSAWSIMAISFISLLAMSAVLATCFFVRRHRVRRRRILALNGNDFHRMPKSMIIRMPTTIFNGICDEATTSILCCICLENYEKGDKLRILPCHHKFHVACVDLWLGQRKSFCPVCKRDARSISTDKPPSEHTPFLSRTPSMTPTSSFLLSSSSTTPLQSSHELPISIRVDPSLPSTSMQPHTVPMYLSHSRSHTSFQNGSNRFSRPIPVSRSSADLRNAVSQRSYNSPHQVSLPRFLHSRYTHILGPGNASRSQVVGLLTSQREHSLHQNDSRRSFIHFASASSLPGW

SEQ ID NO: 70777 - protein, 293 aa, Arabidopsis thaliana
  peptide (1)..(293): Ceres Seq. ID no. 2997339
  misc_feature (79)..(120): Pfam Name: Zinc finger, C3HC4 type (RING finger) Pfam Description: Zinc finger, C3HC4 type (RING finger)
  misc_feature (1)..(293): Homolog of NCBI NO: 15233945 NR Description: putative protein; protein id: At4g09560.1
  misc_feature (1)..(288): Homolog of NCBI NO: 19071633 NR Description: putative integral membrane protein [Oryza sativa
  misc_feature (1)..(291): Homolog of NCBI NO: 22330577 NR Description: unknown protein; protein id: At1g71980.1, by cDNA: gi_17529199 [Arabidopsis thaliana] unknown protein [Arabidopsis thaliana]
  misc_feature (1)..(177): Homolog of NCBI NO: 25403460 NR Description: protein F15O4.19 [imported] - Arabidopsis >gi|8778343|gb|AAF79351.1|AC007887_10 F15O4.19 [Arabidopsis
  misc_feature (1)..(291): Homolog of NCBI NO: 6942149 NR Description: ReMembR-H2 protein JR702 [Arabidopsis thaliana]
  misc_feature (1)..(291): Homolog of NCBI NO: 25406132 NR Description: unknown protein F17M19.13 [imported] -
  misc_feature (1)..(254): Homolog of NCBI NO: 38637053 NR Description: putative ReMembR-H2 protein [Oryza sativa
  misc_feature (1)..(174): Homolog of NCBI NO: 15219668 NR Description: integral membrane protein, putative; protein id:
  misc_feature (1)..(174): Homolog of NCBI NO: 15219670 NR Description: integral membrane protein, putative; protein id:
  misc_feature (1)..(110): Homolog of NCBI NO: 25403460 NR Description: protein F15O4.19 [imported] - Arabidopsis >gi|8778343|gb|AAF79351.1|AC007887_10 F15O4.19 [Arabidopsis
MPSFETSAWSIMAISFISLLAMSAVLATCFFVRRHRVRRRRILALNGNDFHRMPKSMIIRMPTTIFNGICDEATTSILCCICLENYEKGDKLRILPCHHKFHVACVDLWLGQRKSFCPVCKRDARSISTDKPPSEHTPFLSRTPSMTPTSSFLLSSSSTTPLQSSHELPISIRVDPSLPSTSMQPHTVPMYLSHSRSHTSFQNGSNRFSRPIPVSRSSADLRNAVSQRSYNSPHQVSLPRFLHSRYTHILGPGNASRSQVVGLLTSQREHSLHQNDSRRSFIHFASASSLPGW

SEQ ID NO: 70778 - DNA, 1671 bp, Arabidopsis thaliana
  misc_feature (1)..(1671): Ceres Seq. ID no. 2997408
  misc_feature: MA Experiment ID: 20000184 Result: Up-regulated in Transcription
  misc_feature: MA Experiment 20000184 PARAMETER Experiment Name: At_Shoots__P Parameter: Age (day) Value: 7
  misc_feature: MA Experiment 20000184 PARAMETER Experiment Name: At_Shoots__P Parameter: Tissue Value: Shoots vs. Whole Plant
  misc_feature: MA Experiment ID: 20000185 Result: Up-regulated in Transcription
  misc_feature: MA Experiment 20000185 PARAMETER Experiment Name: At_Roots__P Parameter: Age (day) Value: 7 vs. 21
  misc_feature: MA Experiment 20000185 PARAMETER Experiment Name: At_Roots__P Parameter: Organism Value: A. thaliana
  misc_feature: MA Experiment 20000185 PARAMETER Experiment Name: At_Roots__P Parameter: Tissue Value: Roots vs. Whole Plant
  misc_feature: MA Experiment ID: 20000227 Result: Down-regulated in Transcription
  misc_feature: MA Experiment 20000227 PARAMETER Experiment Name: At_Root-Tips-vs-Tops_P Parameter: Tissue Value: Root Tips vs. Root Tops
  misc_feature: MA Experiment ID: 20000437 Result: Down-regulated in Transcription
  misc_feature: MA Experiment 20000437 PARAMETER Experiment Name: At_Drought_P Parameter: Age (day) Value: 8
  misc_feature: MA Experiment 20000437 PARAMETER Experiment Name: At_Drought_P Parameter: Organism Value: A. thaliana
  misc_feature: MA Experiment 20000437 PARAMETER Experiment Name: At_Drought_P Parameter: Plant Line Value: WS
  misc_feature: MA Experiment 20000437 PARAMETER Experiment Name: At_Drought_P Parameter: Timepoint (hr) Value: 24
  misc_feature: MA Experiment 20000437 PARAMETER Experiment Name: At_Drought_P Parameter: Tissue Value: Whole Plant
  misc_feature: MA Experiment 20000437 PARAMETER Experiment Name: At_Drought_P Parameter: Treatment Value: Drought vs. No Drought
  misc_feature: MA Experiment ID: 20000439 Result: Up-regulated in Transcription
  misc_feature: MA Experiment 20000439 PARAMETER Experiment Name: At_Roots__P Parameter: Age (day) Value: 14 vs. 21
  misc_feature: MA Experiment 20000439 PARAMETER Experiment Name: At_Roots__P Parameter: Organism Value: A. thaliana
  misc_feature: MA Experiment 20000439 PARAMETER Experiment Name: At_Roots__P Parameter: Tissue Value: Roots vs. Whole Plant
atggctgattcaaaatctggtgacacggaagtagcgcatcgctctagcgatccaagcgaaaagcgtggtggctggatcactttaccgttcatgctaggcatgtccataacttctttcggatggggaatgaacttgatcgtcttcttgatcgaggaattccacatcaagaacatcgctgctgctcagatttcaaatgttgtcaatggagttgtcaacatgttacctgttgttgcagccatcctagctgattccttttttgggaacattcccgtcatctccacctccactttcatttctctggctggaacctctctcttgaccttaatcacatctttgaactacttgatgcctagaccgtgtgaaacggggtcaattctatgccagtcgccatcaaaactacagcttgggatcttgtatgtagccttagctctagtgatcattggatcagctgggacgcggttcaccttggcagccgcgggtgcgaaccaatataagaagcctaaagaacaaggaagattcttcaactggttcttccttgcactgtatattggagctattactggcacgacagcgattgtatatacacaagacaatgctagctggaaacttgggttcggtctatgtgccgttgctaacttgatcagtttcatcgttttcatcgccggggttagattctacaagcatgacaaacccttgggaagtccttatacaagcctgatccgtgttttagttgctgctacaatgaaaagaaaggcagtgatttcatcaaaagacgaagactatcatcaatatggtctcgggaaagaggccaagacttatactacaatgccctccaagagctttaggttcttgaaccgtgcagcattaaagaacaaagaagatttaaacacgagtggtgactcaagtaataacatgtggaggctatgctctgttcaggaagtagaagacttcaaagccattctccgacttgtacctctctgggcagccgtcatgttcctcagcactcccgtggcagtacaaatgagcatgacggttctccaagctttggtcatggaccgcaaacttagcccgcacttcgaagtctctgccgggtctctacaagtcatagtactcgtctttggttgtgtctttatcatgctcaacaactggatcatctatcccatgtaccaaaagctaatcggcaaaccactgacaccacttcaacaagttgggatcggtcacgttttcaccatcctaagcatggcgatatcagctgttgtggaagcaaagagactgaaaacagttgaaaatggaggccatcccatgtcagtgctatggctagttcctgctcttgtgatggttggaataggcgaggcgtttcattttcccgcgaatgttgcagtattctatggagaattccctgagtctctgaagaacaccgcaacttcattgacctcagtggtgattggaatctctttctatctgagcacagctgttatcgacgtgatccaaagaaccacctcgtggttaccaaatgacataaaccatggaagagttgacaatgtttactgggttgtagtcataggaggagtcttgaatctcggctatttccttgtctgctcttggttttacaaatacagaaacctcaaggatgatgatcatgaacaagatcctaaagatgttaaaacctag

SEQ ID NO: 70779 - protein, 556 aa, Arabidopsis thaliana
  peptide (1)..(556): Ceres Seq. ID no. 2997409
  misc_feature (89)..(482): Pfam Name: POT family Pfam Description: POT family
  misc_feature (1)..(556): Homolog of NCBI NO: 11358696 NR Description: probable transporter protein - Arabidopsis >gi|7019637|emb|CAB75784.1| putative transporter protein
  misc_feature (1)..(556): Homolog of NCBI NO: 30692629 NR Description: transporter protein -related [Arabidopsis
  misc_feature (1)..(554): Homolog of NCBI NO: 15231217 NR Description: putative transporter protein; protein id:
  misc_feature (1)..(554): Homolog of NCBI NO: 26449486 NR Description: putative transporter protein [Arabidopsis
  misc_feature (1)..(553): Homolog of NCBI NO: 15231215 NR Description: putative transporter protein; protein id:
  misc_feature (1)..(553): Homolog of NCBI NO: 26450397 NR Description: putative transporter protein [Arabidopsis
  misc_feature (6)..(554): Homolog of NCBI NO: 15231221 NR Description: putative transporter protein; protein id:
  misc_feature (4)..(449): Homolog of NCBI NO: 15231216 NR Description: putative transporter protein; protein id:
  misc_feature (477)..(556): Homolog of NCBI NO: 15231216 NR Description: putative transporter protein; protein id:
  misc_feature (1)..(549): Homolog of NCBI NO: 15231199 NR Description: putative protein; protein id: At3g45650.1
MADSKSGDTEVAHRSSDPSEKRGGWITLPFMLGMSITSFGWGMNLIVFLIEEFHIKNIAAAQISNVVNGVVNMLPVVAAILADSFFGNIPVISTSTFISLAGTSLLTLITSLNYLMPRPCETGSILCQSPSKLQLGILYVALALVIIGSAGTRFTLAAAGANQYKKPKEQGRFFNWFFLALYIGAITGTTAIVYTQDNASWKLGFGLCAVANLISFIVFIAGVRFYKHDKPLGSPYTSLIRVLVAATMKRKAVISSKDEDYHQYGLGKEAKTYTTMPSKSFRFLNRAALKNKEDLNTSGDSSNNMWRLCSVQEVEDFKAILRLVPLWAAVMFLSTPVAVQMSMTVLQALVMDRKLSPHFEVSAGSLQVIVLVFGCVFIMLNNWIIYPMYQKLIGKPLTPLQQVGIGHVFTILSMAISAVVEAKRLKTVENGGHPMSVLWLVPALVMVGIGEAFHFPANVAVFYGEFPESLKNTATSLTSVVIGISFYLSTAVIDVIQRTTSWLPNDINHGRVDNVYWVVVIGGVLNLGYFLVCSWFYKYRNLKDDDHEQDPKDVKT

SEQ ID NO: 70780 - protein, 526 aa, Arabidopsis thaliana
  peptide (1)..(526): Ceres Seq. ID no. 2997410
  misc_feature (59)..(452): Pfam Name: POT family Pfam Description: POT family
  misc_feature (1)..(526): Homolog of NCBI NO: 11358696 NR Description: probable transporter protein - Arabidopsis >gi|7019637|emb|CAB75784.1| putative transporter protein
  misc_feature (1)..(526): Homolog of NCBI NO: 30692629 NR Description: transporter protein -related [Arabidopsis
  misc_feature (1)..(524): Homolog of NCBI NO: 15231217 NR Description: putative transporter protein; protein id:
  misc_feature (1)..(524): Homolog of NCBI NO: 26449486 NR Description: putative transporter protein [Arabidopsis
  misc_feature (1)..(523): Homolog of NCBI NO: 15231215 NR Description: putative transporter protein; protein id:
  misc_feature (1)..(523): Homolog of NCBI NO: 26450397 NR Description: putative transporter protein [Arabidopsis
  misc_feature (1)..(524): Homolog of NCBI NO: 15231221 NR Description: putative transporter protein; protein id:
  misc_feature (1)..(419): Homolog of NCBI NO: 15231216 NR Description: putative transporter protein; protein id:
  misc_feature (447)..(526): Homolog of NCBI NO: 15231216 NR Description: putative transporter protein; protein id:
  misc_feature (1)..(519): Homolog of NCBI NO: 15231199 NR Description: putative protein; protein id: At3g45650.1
MLGMSITSFGWGMNLIVFLIEEFHIKNIAAAQISNVVNGVVNMLPVVAAILADSFFGNIPVISTSTFISLAGTSLLTLITSLNYLMPRPCETGSILCQSPSKLQLGILYVALALVIIGSAGTRFTLAAAGANQYKKPKEQGRFFNWFFLALYIGAITGTTAIVYTQDNASWKLGFGLCAVANLISFIVFIAGVRFYKHDKPLGSPYTSLIRVLVAATMKRKAVISSKDEDYHQYGLGKEAKTYTTMPSKSFRFLNRAALKNKEDLNTSGDSSNNMWRLCSVQEVEDFKAILRLVPLWAAVMFLSTPVAVQMSMTVLQALVMDRKLSPHFEVSAGSLQVIVLVFGCVFIMLNNWIIYPMYQKLIGKPLTPLQQVGIGHVFTILSMAISAVVEAKRLKTVENGGHPMSVLWLVPALVMVGIGEAFHFPANVAVFYGEFPESLKNTATSLTSVVIGISFYLSTAVIDVIQRTTSWLPNDINHGRVDNVYWVVVIGGVLNLGYFLVCSWFYKYRNLKDDDHEQDPKDVKT

SEQ ID NO: 70781 - protein, 523 aa, Arabidopsis thaliana
  peptide (1)..(523): Ceres Seq. ID no. 2997411
  misc_feature (56)..(449): Pfam Name: POT family Pfam Description: POT family
  misc_feature (1)..(523): Homolog of NCBI NO: 30692629 NR Description: transporter protein -related [Arabidopsis
  misc_feature (1)..(521): Homolog of NCBI NO: 15231217 NR Description: putative transporter protein; protein id:
  misc_feature (1)..(521): Homolog of NCBI NO: 26449486 NR Description: putative transporter protein [Arabidopsis
  misc_feature (1)..(520): Homolog of NCBI NO: 15231215 NR Description: putative transporter protein; protein id:
  misc_feature (1)..(520): Homolog of NCBI NO: 26450397 NR Description: putative transporter protein [Arabidopsis
  misc_feature (1)..(523): Homolog of NCBI NO: 11358696 NR Description: probable transporter protein - Arabidopsis >gi|7019637|emb|CAB75784.1| putative transporter protein
  misc_feature (1)..(521): Homolog of NCBI NO: 15231221 NR Description: putative transporter protein; protein id:
  misc_feature (1)..(416): Homolog of NCBI NO: 15231216 NR Description: putative transporter protein; protein id:
  misc_feature (444)..(523): Homolog of NCBI NO: 15231216 NR Description: putative transporter protein; protein id:
  misc_feature (1)..(516): Homolog of NCBI NO: 15231199 NR Description: putative protein; protein id: At3g45650.1
MSITSFGWGMNLIVFLIEEFHIKNIAAAQISNVVNGVVNMLPVVAAILADSFFGNIPVISTSTFISLAGTSLLTLITSLNYLMPRPCETGSILCQSPSKLQLGILYVALALVIIGSAGTRFTLAAAGANQYKKPKEQGRFFNWFFLALYIGAITGTTAIVYTQDNASWKLGFGLCAVANLISFIVFIAGVRFYKHDKPLGSPYTSLIRVLVAATMKRKAVISSKDEDYHQYGLGKEAKTYTTMPSKSFRFLNRAALKNKEDLNTSGDSSNNMWRLCSVQEVEDFKAILRLVPLWAAVMFLSTPVAVQMSMTVLQALVMDRKLSPHFEVSAGSLQVIVLVFGCVFIMLNNWIIYPMYQKLIGKPLTPLQQVGIGHVFTILSMAISAVVEAKRLKTVENGGHPMSVLWLVPALVMVGIGEAFHFPANVAVFYGEFPESLKNTATSLTSVVIGISFYLSTAVIDVIQRTTSWLPNDINHGRVDNVYWVVVIGGVLNLGYFLVCSWFYKYRNLKDDDHEQDPKDVKT

SEQ ID NO: 70782 - DNA, 813 bp, Arabidopsis thaliana
  misc_feature (1)..(813): Ceres Seq. ID no. 2997463
  misc_feature: MA Experiment ID: 20000315 Result: Down-regulated in Transcription
  misc_feature: MA Experiment 20000315 PARAMETER Experiment Name: At_14day_Shoots-Roots_Sub_P Parameter: Age (day) Value: 14
  misc_feature: MA Experiment 20000315 PARAMETER Experiment Name: At_14day_Shoots-Roots_Sub_P Parameter: Organism Value: A. thaliana
  misc_feature: MA Experiment 20000315 PARAMETER Experiment Name: At_14day_Shoots-Roots_Sub_P Parameter: Plant Line Value: WS
  misc_feature: MA Experiment 20000315 PARAMETER Experiment Name: At_14day_Shoots-Roots_Sub_P Parameter: Tissue Value: Shoots vs. Whole Plant
  misc_feature: MA Experiment ID: 20000327 Result: Down-regulated in Transcription
  misc_feature: MA Experiment 20000327 PARAMETER Experiment Name: At_42deg_Heat_Sub_P Parameter: Age (day) Value: 14
  misc_feature: MA Experiment 20000327 PARAMETER Experiment Name: At_42deg_Heat_Sub_P Parameter: Organism Value: A. thaliana
  misc_feature: MA Experiment 20000327 PARAMETER Experiment Name: At_42deg_Heat_Sub_P Parameter: Plant Line Value: WS
  misc_feature: MA Experiment 20000327 PARAMETER Experiment Name: At_42deg_Heat_Sub_P Parameter: Temperature (deg C) Value: 42 vs. 22
  misc_feature: MA Experiment 20000327 PARAMETER Experiment Name: At_42deg_Heat_Sub_P Parameter: Timepoint (hr) Value: 1
  misc_feature: MA Experiment 20000327 PARAMETER Experiment Name: At_42deg_Heat_Sub_P Parameter: Tissue Value: Aerial
  misc_feature: MA Experiment ID: 20000328 Result: Down-regulated in Transcription
  misc_feature: MA Experiment 20000328 PARAMETER Experiment Name: At_42deg_Heat_Sub_P Parameter: Age (day) Value: 14
  misc_feature: MA Experiment 20000328 PARAMETER Experiment Name: At_42deg_Heat_Sub_P Parameter: Organism Value: A. thaliana
  misc_feature: MA Experiment 20000328 PARAMETER Experiment Name: At_42deg_Heat_Sub_P Parameter: Plant Line Value: WS
  misc_feature: MA Experiment 20000328 PARAMETER Experiment Name: At_42deg_Heat_Sub_P Parameter: Temperature (deg C) Value: 42 vs. 22
  misc_feature: MA Experiment 20000328 PARAMETER Experiment Name: At_42deg_Heat_Sub_P Parameter: Timepoint (hr) Value: 6
  misc_feature: MA Experiment 20000328 PARAMETER Experiment Name: At_42deg_Heat_Sub_P Parameter: Tissue Value: Aerial
  misc_feature: MA Experiment ID: 20000355 Result: Up-regulated in Transcription
  misc_feature: MA Experiment 20000355 PARAMETER Experiment Name: At_Siliques_Sub_P Parameter: Age (day) Value: 21
  misc_feature: MA Experiment 20000355 PARAMETER Experiment Name: At_Siliques_Sub_P Parameter: Organism Value: A. thaliana
  misc_feature: MA Experiment 20000355 PARAMETER Experiment Name: At_Siliques_Sub_P Parameter: Plant Line Value: WS
  misc_feature: MA Experiment 20000355 PARAMETER Experiment Name: At_Siliques_Sub_P Parameter: Tissue Value: Less Than 5mm Siliques vs. Whole Plant
  misc_feature: MA Experiment ID: 20000440 Result: Up-regulated in Transcription
  misc_feature: MA Experiment 20000440 PARAMETER Experiment Name: At_Closed-Flower__Sub_P Parameter: Tissue Value: Closed Flower vs. Whole Plant
atggaggagattctagagaatcttaatgagttcatcaaactgaattcatcgtcacaagggggaaggaggattgtatgtgtgacttcagggggaacaacggttccattggagcaacgatgtgttaggtatatcgataatttcagctccggaaacagaggtgctgcttctactgagaatttcgtcaaggctggatatgctgtgatatttctgtataggaggggaacttgccaaccgtattgtcgatctcttcccgatgatccattccttgaatgttttgagttttctgataagactaacattcaaggcagcttactaaaactcccattctcaaccatatatgagtatcttcagatgttgcggttgattgcagaggcattgaaagatgttggtccatgttcaatgttttatcttgctgctgctgtatctgacttctatgtgccatggaagagcatgacagagcacaaaatagaatcaggatctggtcctttagacataagactagctcaagtccctaaaatgctatcagtcttgagatcaaattgggctccaaaggccttctgcatatcattcaagcttgagacagactcaaagattctgatggagaaggctacaaaggctctaagaaaatacaaagtgcacgcagttgtagccaatgagctatcaacccgtaaggaagaagttgtggttgtttcaagcagcggtaatgttgtggttagacgcgaatgcgataagcctgaatcttttgttgaagataatctcattcgtctcatcgtagatcgacattcaacatacatcaaagaatctcacaactga

SEQ ID NO: 70783 - protein, 270 aa, Arabidopsis thaliana
  peptide (1)..(270): Ceres Seq. ID no. 2997464
  misc_feature (18)..(242): Pfam Name: DNA / pantothenate metabolism flavoprotein Pfam Description: DNA / pantothenate metabolism flavoprotein
  misc_feature (1)..(270): Homolog of NCBI NO: 15241677 NR Description: putative protein; protein id: At5g02080.1
  misc_feature (101)..(268): Homolog of NCBI NO: 30682728 NR Description: expressed protein [Arabidopsis thaliana]
  misc_feature (2)..(101): Homolog of NCBI NO: 30682728 NR Description: expressed protein [Arabidopsis thaliana]
  misc_feature (101)..(268): Homolog of NCBI NO: 8778623 NR Description: F5O11.7 [Arabidopsis thaliana]
  misc_feature (2)..(73): Homolog of NCBI NO: 8778623 NR Description: F5O11.7 [Arabidopsis thaliana]
  misc_feature (101)..(267): Homolog of NCBI NO: 40253297 NR Description: putative Chain A, Crystal Structure Of
  misc_feature (2)..(101): Homolog of NCBI NO: 40253297 NR Description: putative Chain A, Crystal Structure Of
  misc_feature (104)..(232): Homolog of NCBI NO: 19075572 NR Description: conserved hypothetical protein
  misc_feature (8)..(119): Homolog of NCBI NO: 19075572 NR Description: conserved hypothetical protein
  misc_feature (102)..(265): Homolog of NCBI NO: 18255582 NR Description: RIKEN cDNA 6330579B17 gene [Mus musculus]
MEEILENLNEFIKLNSSSQGGRRIVCVTSGGTTVPLEQRCVRYIDNFSSGNRGAASTENFVKAGYAVIFLYRRGTCQPYCRSLPDDPFLECFEFSDKTNIQGSLLKLPFSTIYEYLQMLRLIAEALKDVGPCSMFYLAAAVSDFYVPWKSMTEHKIESGSGPLDIRLAQVPKMLSVLRSNWAPKAFCISFKLETDSKILMEKATKALRKYKVHAVVANELSTRKEEVVVVSSSGNVVVRRECDKPESFVEDNLIRLIVDRHSTYIKESHN

SEQ ID NO: 70784 - protein, 153 aa, Arabidopsis thaliana
  peptide (1)..(153): Ceres Seq. ID no. 2997465
  misc_feature (1)..(125): Pfam Name: DNA / pantothenate metabolism flavoprotein Pfam Description: DNA / pantothenate metabolism flavoprotein
  misc_feature (1)..(153): Homolog of NCBI NO: 15241677 NR Description: putative protein; protein id: At5g02080.1
  misc_feature (1)..(151): Homolog of NCBI NO: 30682728 NR Description: expressed protein [Arabidopsis thaliana]
  misc_feature (1)..(151): Homolog of NCBI NO: 8778623 NR Description: F5O11.7 [Arabidopsis thaliana]
  misc_feature (1)..(150): Homolog of NCBI NO: 40253297 NR Description: putative Chain A, Crystal Structure Of
  misc_feature (1)..(115): Homolog of NCBI NO: 19075572 NR Description: conserved hypothetical protein
  misc_feature (1)..(148): Homolog of NCBI NO: 18255582 NR Description: RIKEN cDNA 6330579B17 gene [Mus musculus]
  misc_feature (1)..(148): Homolog of NCBI NO: 34870890 NR Description: similar to RIKEN cDNA 6330579B17 gene [Rattus
  misc_feature (1)..(153): Homolog of NCBI NO: 40556035 NR Description: CNPV097 conserved hypothetical protein [Canarypox >gi|40233860|gb|AAR83443.1| CNPV097 conserved hypothetical
  misc_feature (1)..(114): Homolog of NCBI NO: 13385982 NR Description: RIKEN cDNA 6330579B17 [Mus musculus]
  misc_feature (1)..(151): Homolog of NCBI NO: 31209237 NR Description: ENSANGP00000013327 [Anopheles gambiae]
MLRLIAEALKDVGPCSMFYLAAAVSDFYVPWKSMTEHKIESGSGPLDIRLAQVPKMLSVLRSNWAPKAFCISFKLETDSKILMEKATKALRKYKVHAVVANELSTRKEEVVVVSSSGNVVVRRECDKPESFVEDNLIRLIVDRHSTYIKESHN

SEQ ID NO: 70785 - protein, 137 aa, Arabidopsis thaliana
  peptide (1)..(137): Ceres Seq. ID no. 2997466
  misc_feature (1)..(109): Pfam Name: DNA / pantothenate metabolism flavoprotein Pfam Description: DNA / pantothenate metabolism flavoprotein
  misc_feature (1)..(137): Homolog of NCBI NO: 15241677 NR Description: putative protein; protein id: At5g02080.1
  misc_feature (1)..(135): Homolog of NCBI NO: 30682728 NR Description: expressed protein [Arabidopsis thaliana]
  misc_feature (1)..(135): Homolog of NCBI NO: 8778623 NR Description: F5O11.7 [Arabidopsis thaliana]
  misc_feature (1)..(134): Homolog of NCBI NO: 40253297 NR Description: putative Chain A, Crystal Structure Of
  misc_feature (1)..(99): Homolog of NCBI NO: 19075572 NR Description: conserved hypothetical protein
  misc_feature (1)..(132): Homolog of NCBI NO: 18255582 NR Description: RIKEN cDNA 6330579B17 gene [Mus musculus]
  misc_feature (1)..(132): Homolog of NCBI NO: 34870890 NR Description: similar to RIKEN cDNA 6330579B17 gene [Rattus
  misc_feature (1)..(137): Homolog of NCBI NO: 40556035 NR Description: CNPV097 conserved hypothetical protein [Canarypox >gi|40233860|gb|AAR83443.1| CNPV097 conserved hypothetical
  misc_feature (1)..(98): Homolog of NCBI NO: 13385982 NR Description: RIKEN cDNA 6330579B17 [Mus musculus]
  misc_feature (1)..(135): Homolog of NCBI NO: 31209237 NR Description: ENSANGP00000013327 [Anopheles gambiae]
MFYLAAAVSDFYVPWKSMTEHKIESGSGPLDIRLAQVPKMLSVLRSNWAPKAFCISFKLETDSKILMEKATKALRKYKVHAVVANELSTRKEEVVVVSSSGNVVVRRECDKPESFVEDNLIRLIVDRHSTYIKESHN

SEQ ID NO: 70786 - DNA, 759 bp, Arabidopsis thaliana
  misc_feature (1)..(759): Ceres Seq. ID no. 2997535
  misc_feature: MA Experiment ID: 20000184 Result: Up-regulated in Transcription
  misc_feature: MA Experiment 20000184 PARAMETER Experiment Name: At_Shoots__P Parameter: Age (day) Value: 7
  misc_feature: MA Experiment 20000184 PARAMETER Experiment Name: At_Shoots__P Parameter: Tissue Value: Shoots vs. Whole Plant
  misc_feature: MA Experiment ID: 20000264 Result: Up-regulated in Transcription
  misc_feature: MA Experiment 20000264 PARAMETER Experiment Name: At_Open_Flower_P Parameter: Age (day) Value: 21
  misc_feature: MA Experiment 20000264 PARAMETER Experiment Name: At_Open_Flower_P Parameter: Plant Line Value: WS
  misc_feature: MA Experiment 20000264 PARAMETER Experiment Name: At_Open_Flower_P Parameter: Tissue Value: Open Flower vs. Whole Plant
  misc_feature: MA Experiment ID: 20000265 Result: Up-regulated in Transcription
  misc_feature: MA Experiment 20000265 PARAMETER Experiment Name: At_Open_Flower_P Parameter: Age (day) Value: 21
  misc_feature: MA Experiment 20000265 PARAMETER Experiment Name: At_Open_Flower_P Parameter: Plant Line Value: WS
  misc_feature: MA Experiment 20000265 PARAMETER Experiment Name: At_Open_Flower_P Parameter: Tissue Value: Closed Flower vs. Whole Plant
  misc_feature: MA Experiment ID: 20000286 Result: Up-regulated in Transcription
  misc_feature: MA Experiment 20000286 PARAMETER Experiment Name: At_Open_Flower_P Parameter: Age (day) Value: 21
  misc_feature: MA Experiment 20000286 PARAMETER Experiment Name: At_Open_Flower_P Parameter: Plant Line Value: WS
  misc_feature: MA Experiment 20000286 PARAMETER Experiment Name: At_Open_Flower_P Parameter: Tissue Value: Half Open vs. Whole Plant
  misc_feature: MA Experiment ID: 20000794 Result: Up-regulated in Transcription
  misc_feature: MA Experiment 20000794 PARAMETER Experiment Name: At_Petals_P Parameter: Age (day) Value: 23-25 days
  misc_feature: MA Experiment 20000794 PARAMETER Experiment Name: At_Petals_P Parameter: Plant Line Value: WS
  misc_feature: MA Experiment 20000794 PARAMETER Experiment Name: At_Petals_P Parameter: Tissue Value: Petals vs. Whole plant
  misc_feature: MA Experiment ID: 20001910 Result: Up-regulated in Transcription
  misc_feature: MA Experiment 20001910 PARAMETER Experiment Name: At_Drought_Reproduction_P Parameter: Age (day) Value: 37
  misc_feature: MA Experiment 20001910 PARAMETER Experiment Name: At_Drought_Reproduction_P Parameter: Organism Value: A. thaliana
  misc_feature: MA Experiment 20001910 PARAMETER Experiment Name: At_Drought_Reproduction_P Parameter: Plant Line Value: WS
  misc_feature: MA Experiment 20001910 PARAMETER Experiment Name: At_Drought_Reproduction_P Parameter: Timepoint (day) Value: 7
  misc_feature: MA Experiment 20001910 PARAMETER Experiment Name: At_Drought_Reproduction_P Parameter: Tissue Value: Flowers
  misc_feature: MA Experiment 20001910 PARAMETER Experiment Name: At_Drought_Reproduction_P Parameter: Treatment Value: Drought vs. No Drought
atggcttcctcatctctcaaatgtttttcttttatcgttgttcttacaactttctttgcaatctcattgaagccatgttattgccacaataaaacccactggaacaccgccggcatcacgtggtatggcgaccgagaaggtcctggcaccacaggaggagcttgtggatatggtgatgcagtggcaaaacacccgtacagatgtatggtttcagccggaggaccttcattgttcaaagacggaaagggttgtggggcttgttacaggcttaaatgcgaccatccgttgtgcacgaaaaagccgatcaaggtgatgatatcggatgagtgtcccggctgcacgaaggagtctgtccattttgatcttagcggtaaggcctttggtgcattggccaaacgtggcaagggagatcaactacgcaaccttggagaactaaaaactatgatcgctatccatgtcgacgccggagcaaatccttactacatgtcattcgcggttaagtttgcaaacggtgatgggaacttcgcctgcattgaggtccaaccggccggaggacagtatatgaaaatggaggaaatgagatccgctgtttggagactaagccctggtgttcctttgaaaggtccgttcaacatcaggcttacctccgccgtgtccggtaagaagatcattgcgaaaggcgttatcccggaaaagtggagtcctggtgctatttaccattctaaggttaacttccccgttcaaaggaagcagaaatga

SEQ ID NO: 70787 - protein, 252 aa, Arabidopsis thaliana
  peptide (1)..(252): Ceres Seq. ID no. 2997536
  misc_feature (149)..(230): Pfam Name: Pollen allergen Pfam Description: Pollen allergen
  misc_feature (1)..(252): Homolog of NCBI NO: 15232366 NR Description: expansin family; protein id: At3g60570.1
  misc_feature (1)..(252): Homolog of NCBI NO: 22095681 NR Description: Putative beta-expansin 5 precursor (At-EXPB5)
  misc_feature (36)..(245): Homolog of NCBI NO: 15225412 NR Description: beta-expansin, putative; protein id: At2g45110.1
  misc_feature (36)..(245): Homolog of NCBI NO: 28393322 NR Description: putative beta-expansin [Arabidopsis thaliana]
  misc_feature (34)..(245): Homolog of NCBI NO: 20138423 NR Description: Putative beta-expansin 2 precursor (At-EXPB2)
  misc_feature (52)..(245): Homolog of NCBI NO: 30697231 NR Description: beta-expansin, putative (EXBP2) [Arabidopsis
  misc_feature (34)..(236): Homolog of NCBI NO: 25404942 NR Description: protein F1E22.6 [imported] - Arabidopsis thaliana
  misc_feature (34)..(236): Homolog of NCBI NO: 30697231 NR Description: beta-expansin, putative (EXBP2) [Arabidopsis
  misc_feature (27)..(245): Homolog of NCBI NO: 1076486 NR Description: cim1 protein - soybean >gi|555616|gb|AAA50175.1|
  misc_feature (30)..(247): Homolog of NCBI NO: 18417157 NR Description: beta-expansin pollen allergen protein; protein At4g28250.1, supported by cDNA: 33023., supported by cDNA:
MASSSLKCFSFIVVLTTFFAISLKPCYCHNKTHWNTAGITWYGDREGPGTTGGACGYGDAVAKHPYRCMVSAGGPSLFKDGKGCGACYRLKCDHPLCTKKPIKVMISDECPGCTKESVHFDLSGKAFGALAKRGKGDQLRNLGELKTMIAIHVDAGANPYYMSFAVKFANGDGNFACIEVQPAGGQYMKMEEMRSAVWRLSPGVPLKGPFNIRLTSAVSGKKIIAKGVIPEKWSPGAIYHSKVNFPVQRKQK

SEQ ID NO: 70788 - protein, 184 aa, Arabidopsis thaliana
  peptide (1)..(184): Ceres Seq. ID no. 2997537
  misc_feature (81)..(162): Pfam Name: Pollen allergen Pfam Description: Pollen allergen
  misc_feature (1)..(184): Homolog of NCBI NO: 15232366 NR Description: expansin family; protein id: At3g60570.1
  misc_feature (1)..(184): Homolog of NCBI NO: 22095681 NR Description: Putative beta-expansin 5 precursor (At-EXPB5)
  misc_feature (1)..(177): Homolog of NCBI NO: 15225412 NR Description: beta-expansin, putative; protein id: At2g45110.1
  misc_feature (1)..(177): Homolog of NCBI NO: 28393322 NR Description: putative beta-expansin [Arabidopsis thaliana]
  misc_feature (1)..(177): Homolog of NCBI NO: 20138423 NR Description: Putative beta-expansin 2 precursor (At-EXPB2)
  misc_feature (1)..(177): Homolog of NCBI NO: 30697231 NR Description: beta-expansin, putative (EXBP2) [Arabidopsis
  misc_feature (1)..(168): Homolog of NCBI NO: 25404942 NR Description: protein F1E22.6 [imported] - Arabidopsis thaliana
  misc_feature (1)..(168): Homolog of NCBI NO: 30697231 NR Description: beta-expansin, putative (EXBP2) [Arabidopsis
  misc_feature (1)..(177): Homolog of NCBI NO: 1076486 NR Description: cim1 protein - soybean >gi|555616|gb|AAA50175.1|
  misc_feature (1)..(179): Homolog of NCBI NO: 18417157 NR Description: beta-expansin pollen allergen protein; protein At4g28250.1, supported by cDNA: 33023., supported by cDNA:
MVSAGGPSLFKDGKGCGACYRLKCDHPLCTKKPIKVMISDECPGCTKESVHFDLSGKAFGALAKRGKGDQLRNLGELKTMIAIHVDAGANPYYMSFAVKFANGDGNFACIEVQPAGGQYMKMEEMRSAVWRLSPGVPLKGPFNIRLTSAVSGKKIIAKGVIPEKWSPGAIYHSKVNFPVQRKQK

SEQ ID NO: 70789 - protein, 148 aa, Arabidopsis thaliana
  peptide (1)..(148): Ceres Seq. ID no. 2997538
  misc_feature (45)..(126): Pfam Name: Pollen allergen Pfam Description: Pollen allergen
  misc_feature (1)..(148): Homolog of NCBI NO: 15232366 NR Description: expansin family; protein id: At3g60570.1
  misc_feature (1)..(148): Homolog of NCBI NO: 22095681 NR Description: Putative beta-expansin 5 precursor (At-EXPB5)
  misc_feature (1)..(141): Homolog of NCBI NO: 15225412 NR Description: beta-expansin, putative; protein id: At2g45110.1
  misc_feature (1)..(141): Homolog of NCBI NO: 28393322 NR Description: putative beta-expansin [Arabidopsis thaliana]
  misc_feature (1)..(141): Homolog of NCBI NO: 20138423 NR Description: Putative beta-expansin 2 precursor (At-EXPB2)
  misc_feature (1)..(141): Homolog of NCBI NO: 30697231 NR Description: beta-expansin, putative (EXBP2) [Arabidopsis
  misc_feature (1)..(132): Homolog of NCBI NO: 25404942 NR Description: protein F1E22.6 [imported] - Arabidopsis thaliana
  misc_feature (1)..(132): Homolog of NCBI NO: 30697231 NR Description: beta-expansin, putative (EXBP2) [Arabidopsis
  misc_feature (1)..(141): Homolog of NCBI NO: 1076486 NR Description: cim1 protein - soybean >gi|555616|gb|AAA50175.1|
  misc_feature (1)..(143): Homolog of NCBI NO: 18417157 NR Description: beta-expansin pollen allergen protein; protein At4g28250.1, supported by cDNA: 33023., supported by cDNA:
MISDECPGCTKESVHFDLSGKAFGALAKRGKGDQLRNLGELKTMIAIHVDAGANPYYMSFAVKFANGDGNFACIEVQPAGGQYMKMEEMRSAVWRLSPGVPLKGPFNIRLTSAVSGKKIIAKGVIPEKWSPGAIYHSKVNFPVQRKQK

SEQ ID NO: 70790 - DNA, 2826 bp, Arabidopsis thaliana
  misc_feature (1)..(2826): Ceres Seq. ID no. 2997821
  misc_feature: MA Experiment ID: 20000185 Result: Up-regulated in Transcription
  misc_feature: MA Experiment 20000185 PARAMETER Experiment Name: At_Roots__P Parameter: Age (day) Value: 7 vs. 21
  misc_feature: MA Experiment 20000185 PARAMETER Experiment Name: At_Roots__P Parameter: Organism Value: A. thaliana
  misc_feature: MA Experiment 20000185 PARAMETER Experiment Name: At_Roots__P Parameter: Tissue Value: Roots vs. Whole Plant
  misc_feature: MA Experiment ID: 20000234 Result: Up-regulated in Transcription
  misc_feature: MA Experiment 20000234 PARAMETER Experiment Name: At_Siliques_P Parameter: Age (day) Value: 21
  misc_feature: MA Experiment 20000234 PARAMETER Experiment Name: At_Siliques_P Parameter: Organism Value: A. thaliana
  misc_feature: MA Experiment 20000234 PARAMETER Experiment Name: At_Siliques_P Parameter: Plant Line Value: WS
  misc_feature: MA Experiment 20000234 PARAMETER Experiment Name: At_Siliques_P Parameter: Tissue Value: Less Than 5mm Siliques vs. Whole Plant
  misc_feature: MA Experiment ID: 20000264 Result: Up-regulated in Transcription
  misc_feature: MA Experiment 20000264 PARAMETER Experiment Name: At_Open_Flower_P Parameter: Age (day) Value: 21
  misc_feature: MA Experiment 20000264 PARAMETER Experiment Name: At_Open_Flower_P Parameter: Plant Line Value: WS
  misc_feature: MA Experiment 20000264 PARAMETER Experiment Name: At_Open_Flower_P Parameter: Tissue Value: Open Flower vs. Whole Plant
  misc_feature: MA Experiment ID: 20000439 Result: Up-regulated in Transcription
  misc_feature: MA Experiment 20000439 PARAMETER Experiment Name: At_Roots__P Parameter: Age (day) Value: 14 vs. 21
  misc_feature: MA Experiment 20000439 PARAMETER Experiment Name: At_Roots__P Parameter: Organism Value: A. thaliana
  misc_feature: MA Experiment 20000439 PARAMETER Experiment Name: At_Roots__P Parameter: Tissue Value: Roots vs. Whole Plant
  misc_feature: MA Experiment ID: 20000794 Result: Up-regulated in Transcription
  misc_feature: MA Experiment 20000794 PARAMETER Experiment Name: At_Petals_P Parameter: Age (day) Value: 23-25 days
  misc_feature: MA Experiment 20000794 PARAMETER Experiment Name: At_Petals_P Parameter: Plant Line Value: WS
  misc_feature: MA Experiment 20000794 PARAMETER Experiment Name: At_Petals_P Parameter: Tissue Value: Petals vs. Whole plant
  misc_feature: Pfam Name: Pkinase Pfam Description: Protein kinase domain
atggagtcacgaatggatcagtacgagcttatggaacagatcgggagaggagcgtttggtgctgctattttagttcatcataaagctgagagaaagaagtatgttttgaagaagatcagattagctagacaaacggaacgttgccggagatctgctcatcaagagatgtctttgattgcaagagttcaacatccttatattgtggagtttaaagaagcttgggttgagaaaggttgctatgtttgtattgtcactggatactgtgaaggaggagacatggctgagttgatgaaaaagtcaaatggtgtttattttcctgaggagaaactttgcaagtggtttactcaattattattagctgttgagtatctgcattctaactatgttctacatcgggatctaaagtgttccaacattttccttacaaaagatcaagatgttcgccttggggactttggtcttgccaaaactttgaaggcggatgacctaacttcctcggttgttggaactccaaactacatgtgcccggaactgcttgctgatatcccttatggttttaagtcagatatctggtccttaggctgttgtatatatgagatggctgcgtatcgacctgctttcaaagcttttgatatggcagggcttataagcaagaaaagcactcatcaagggaatgttaaggaagaaccccgagtatcggccaaacgtatggcctccgagattttgaagcatccttatctgcagccatatgttgagcagtaccgtccaacgctttctgcggcgtctataactccagaaaagcctctcaattctcgcgagggtcggaggagtatggctgaaagtcagaatagcaatagttcaagtgaaaaagataacttctacgtgagtgacaaaaatatccgatatgtggttccaagtaatggtaataaagtcactgagaccgattcaggttttgtcgatgatgaagacatcttagaccatgtgcaacaatcagctgaaaatggtaatctccagagtgtttcagcaacaaaaccagatggccatgggattttaaagcccgtacacagtgaccagcgaccagacgttattcaaccaaggcacccaaaaactatcagaaacatcatgatggttttgaaagaagagaaagctcgagaaaatggttcacccatgagatctaatcgaagtagaccttctagtgttccgacacagaagaataatgttgaaactccatcaaagattcccaaacttggtgacattgctcatagctccaagactaacgcaagtacgcctattccaccatcaaagctggcctctgattccgcaaggactccaggatcatttccaccaaagcatcatatgccagtgattgactcttctccaaaacttaagcctagaaacgacagaatttcaccttctcctgctgctaaacatgaggctgaagaggcgatgtcagttaagcgtaggcaaagaacacctcctactttgccaagaagaacgtctttgatagcgcaccagtcgagacaactaggagcagatatttcaaatatggcagcaaaggaaaccgcgaagctacatccatctgtgccatcagagtctgaaactaattctcatcaatctcgtgttcatgcttctcctgtgagtacgacgccagagccaaagagaacctctgttggatctgccaaaggaatgcagagtgaaagcagcaactctatctcgtcgtcgttgtccatgcaggcatttgagctctgtgatgatgcttccaccccatatattgacatgacagaacatacaactcctgatgaccacagaagatcctgtcacagtgaatactcatattcatttccagatatctcctcagagatgatgatccgtagagatgaacatagcaccagtatgcggctgactgaaattcccgactctgtttccggtgtacaaaacaccattgcccatcatcagccagaaagagagcaaggaagctgtcccactgtgctcaaagatgatagtcctgcaacattacagagctacgagcctaacacatcacaacatcaacacggtgatgacaaattcacagtcaaagaattcgtctcctctgttcccggacccgcaccattgcctttgcatgttgaaccatcacaccaagtgaattcccactcggataacaaaacaagcgtaatgtctcagaactcagctcttgagaagaacaacagtcattcccatcctcatcccgtggttgatgatgtcatacatgttattcgccacagcagtttccgagtagggagcgaccagccggtcatggaaagtgttgaagtcggtgtccaaaacgtcgatatggggaaactcataaacgttgtgagagatgaaatggaagtgagaaaaggagccactccctcagaatcacccaccacaagatcgatcatctcagagcctgactcaagaaccgagcctcgtcctaaagaaccagaccccatcaccaattactcagaaacaaagagctttaactcctgctcggattcttcaccagctgagaccagaactaactcattcgtgcctgaagaggaaacaactccgactccacctgttaaagagacgttggacatcaagtcgttcagacagagagcagaagcgcttgaaggtctattggaactatctgcggatttgctggaacagagcaggctcgaagagctagccattgtgttgcagccgtttgggaagaacaaagtttcgcctcgagaaaccgctatttggttggccaagagtttgaaaggaatgatgatcgaagacatcaataataataatagcagtggcagctccaggaattgttcatga

SEQ ID NO: 70791 - protein, 941 aa, Arabidopsis thaliana
  peptide (1)..(941): Ceres Seq. ID no. 2997822
  misc_feature: Pfam Name: Pkinase Pfam Description: Protein kinase domain
  misc_feature (1)..(932): Homolog of NCBI NO: 34908554 NR Description: putative kinase [Oryza sativa (japonica
  misc_feature (5)..(309): Homolog of NCBI NO: 34393832 NR Description: putative NIMA-related protein kinase [Oryza
  misc_feature (800)..(922): Homolog of NCBI NO: 34393832 NR Description: putative NIMA-related protein kinase [Oryza
  misc_feature (590)..(921): Homolog of NCBI NO: 18766642 NR Description: NIMA-related protein kinase [Populus x canescens]
  misc_feature (5)..(251): Homolog of NCBI NO: 18766642 NR Description: NIMA-related protein kinase [Populus x canescens]
  misc_feature (5)..(251): Homolog of NCBI NO: 15221843 NR Description: hypothetical protein; protein id: At1g54510.1
  misc_feature (833)..(921): Homolog of NCBI NO: 15221843 NR Description: hypothetical protein; protein id: At1g54510.1
  misc_feature (5)..(430): Homolog of NCBI NO: 15637110 NR Description: LSTK-1-like kinase [Lycopersicon esculentum]
  misc_feature (806)..(921): Homolog of NCBI NO: 15637110 NR Description: LSTK-1-like kinase [Lycopersicon esculentum]
  misc_feature (5)..(314): Homolog of NCBI NO: 22331918 NR Description: putative protein; protein id: At3g63280.1, by cDNA: gi_19347938 [Arabidopsis thaliana] unknown protein [Arabidopsis thaliana]
MESRMDQYELMEQIGRGAFGAAILVHHKAERKKYVLKKIRLARQTERCRRSAHQEMSLIARVQHPYIVEFKEAWVEKGCYVCIVTGYCEGGDMAELMKKSNGVYFPEEKLCKWFTQLLLAVEYLHSNYVLHRDLKCSNIFLTKDQDVRLGDFGLAKTLKADDLTSSVVGTPNYMCPELLADIPYGFKSDIWSLGCCIYEMAAYRPAFKAFDMAGLISKKSTHQGNVKEEPRVSAKRMASEILKHPYLQPYVEQYRPTLSAASITPEKPLNSREGRRSMAESQNSNSSSEKDNFYVSDKNIRYVVPSNGNKVTETDSGFVDDEDILDHVQQSAENGNLQSVSATKPDGHGILKPVHSDQRPDVIQPRHPKTIRNIMMVLKEEKARENGSPMRSNRSRPSSVPTQKNNVETPSKIPKLGDIAHSSKTNASTPIPPSKLASDSARTPGSFPPKHHMPVIDSSPKLKPRNDRISPSPAAKHEAEEAMSVKRRQRTPPTLPRRTSLIAHQSRQLGADISNMAAKETAKLHPSVPSESETNSHQSRVHASPVSTTPEPKRTSVGSAKGMQSESSNSISSSLSMQAFELCDDASTPYIDMTEHTTPDDHRRSCHSEYSYSFPDISSEMMIRRDEHSTSMRLTEIPDSVSGVQNTIAHHQPEREQGSCPTVLKDDSPATLQSYEPNTSQHQHGDDKFTVKEFVSSVPGPAPLPLHVEPSHQVNSHSDNKTSVMSQNSALEKNNSHSHPHPVVDDVIHVIRHSSFRVGSDQPVMESVEVGVQNVDMGKLINVVRDEMEVRKGATPSESPTTRSIISEPDSRTEPRPKEPDPITNYSETKSFNSCSDSSPAETRTNSFVPEEETTPTPPVKETLDIKSFRQRAEALEGLLELSADLLEQSRLEELAIVLQPFGKNKVSPRETAIWLAKSLKGMMIEDINNNNSSGSSRNCS

SEQ ID NO: 70792 - protein, 937 aa, Arabidopsis thaliana
  peptide (1)..(937): Ceres Seq. ID no. 2997823
  misc_feature: Pfam Name: Pkinase Pfam Description: Protein kinase domain
  misc_feature (1)..(928): Homolog of NCBI NO: 34908554 NR Description: putative kinase [Oryza sativa (japonica
  misc_feature (1)..(305): Homolog of NCBI NO: 34393832 NR Description: putative NIMA-related protein kinase [Oryza
  misc_feature (796)..(918): Homolog of NCBI NO: 34393832 NR Description: putative NIMA-related protein kinase [Oryza
  misc_feature (586)..(917): Homolog of NCBI NO: 18766642 NR Description: NIMA-related protein kinase [Populus x canescens]
  misc_feature (1)..(247): Homolog of NCBI NO: 18766642 NR Description: NIMA-related protein kinase [Populus x canescens]
  misc_feature (1)..(247): Homolog of NCBI NO: 15221843 NR Description: hypothetical protein; protein id: At1g54510.1
  misc_feature (829)..(917): Homolog of NCBI NO: 15221843 NR Description: hypothetical protein; protein id: At1g54510.1
  misc_feature (1)..(426): Homolog of NCBI NO: 15637110 NR Description: LSTK-1-like kinase [Lycopersicon esculentum]
  misc_feature (802)..(917): Homolog of NCBI NO: 15637110 NR Description: LSTK-1-like kinase [Lycopersicon esculentum]
  misc_feature (1)..(310): Homolog of NCBI NO: 22331918 NR Description: putative protein; protein id: At3g63280.1, by cDNA: gi_19347938 [Arabidopsis thaliana] unknown protein [Arabidopsis thaliana]
MDQYELMEQIGRGAFGAAILVHHKAERKKYVLKKIRLARQTERCRRSAHQEMSLIARVQHPYIVEFKEAWVEKGCYVCIVTGYCEGGDMAELMKKSNGVYFPEEKLCKWFTQLLLAVEYLHSNYVLHRDLKCSNIFLTKDQDVRLGDFGLAKTLKADDLTSSVVGTPNYMCPELLADIPYGFKSDIWSLGCCIYEMAAYRPAFKAFDMAGLISKKSTHQGNVKEEPRVSAKRMASEILKHPYLQPYVEQYRPTLSAASITPEKPLNSREGRRSMAESQNSNSSSEKDNFYVSDKNIRYVVPSNGNKVTETDSGFVDDEDILDHVQQSAENGNLQSVSATKPDGHGILKPVHSDQRPDVIQPRHPKTIRNIMMVLKEEKARENGSPMRSNRSRPSSVPTQKNNVETPSKIPKLGDIAHSSKTNASTPIPPSKLASDSARTPGSFPPKHHMPVIDSSPKLKPRNDRISPSPAAKHEAEEAMSVKRRQRTPPTLPRRTSLIAHQSRQLGADISNMAAKETAKLHPSVPSESETNSHQSRVHASPVSTTPEPKRTSVGSAKGMQSESSNSISSSLSMQAFELCDDASTPYIDMTEHTTPDDHRRSCHSEYSYSFPDISSEMMIRRDEHSTSMRLTEIPDSVSGVQNTIAHHQPEREQGSCPTVLKDDSPATLQSYEPNTSQHQHGDDKFTVKEFVSSVPGPAPLPLHVEPSHQVNSHSDNKTSVMSQNSALEKNNSHSHPHPVVDDVIHVIRHSSFRVGSDQPVMESVEVGVQNVDMGKLINVVRDEMEVRKGATPSESPTTRSIISEPDSRTEPRPKEPDPITNYSETKSFNSCSDSSPAETRTNSFVPEEETTPTPPVKETLDIKSFRQRAEALEGLLELSADLLEQSRLEELAIVLQPFGKNKVSPRETAIWLAKSLKGMMIEDINNNNSSGSSRNCS

SEQ ID NO: 70793 - protein, 931 aa, Arabidopsis thaliana
  peptide (1)..(931): Ceres Seq. ID no. 2997824
  misc_feature: Pfam Name: Pkinase Pfam Description: Protein kinase domain
  misc_feature (1)..(922): Homolog of NCBI NO: 34908554 NR Description: putative kinase [Oryza sativa (japonica
  misc_feature (1)..(299): Homolog of NCBI NO: 34393832 NR Description: putative NIMA-related protein kinase [Oryza
  misc_feature (790)..(912): Homolog of NCBI NO: 34393832 NR Description: putative NIMA-related protein kinase [Oryza
  misc_feature (580)..(911): Homolog of NCBI NO: 18766642 NR Description: NIMA-related protein kinase [Populus x canescens]
  misc_feature (1)..(241): Homolog of NCBI NO: 18766642 NR Description: NIMA-related protein kinase [Populus x canescens]
  misc_feature (1)..(241): Homolog of NCBI NO: 15221843 NR Description: hypothetical protein; protein id: At1g54510.1
  misc_feature (823)..(911): Homolog of NCBI NO: 15221843 NR Description: hypothetical protein; protein id: At1g54510.1
  misc_feature (1)..(420): Homolog of NCBI NO: 15637110 NR Description: LSTK-1-like kinase [Lycopersicon esculentum]
  misc_feature (796)..(911): Homolog of NCBI NO: 15637110 NR Description: LSTK-1-like kinase [Lycopersicon esculentum]
  misc_feature (1)..(304): Homolog of NCBI NO: 22331918 NR Description: putative protein; protein id: At3g63280.1, by cDNA: gi_19347938 [Arabidopsis thaliana] unknown protein [Arabidopsis thaliana]
MEQIGRGAFGAAILVHHKAERKKYVLKKIRLARQTERCRRSAHQEMSLIARVQHPYIVEFKEAWVEKGCYVCIVTGYCEGGDMAELMKKSNGVYFPEEKLCKWFTQLLLAVEYLHSNYVLHRDLKCSNIFLTKDQDVRLGDFGLAKTLKADDLTSSVVGTPNYMCPELLADIPYGFKSDIWSLGCCIYEMAAYRPAFKAFDMAGLISKKSTHQGNVKEEPRVSAKRMASEILKHPYLQPYVEQYRPTLSAASITPEKPLNSREGRRSMAESQNSNSSSEKDNFYVSDKNIRYVVPSNGNKVTETDSGFVDDEDILDHVQQSAENGNLQSVSATKPDGHGILKPVHSDQRPDVIQPRHPKTIRNIMMVLKEEKARENGSPMRSNRSRPSSVPTQKNNVETPSKIPKLGDIAHSSKTNASTPIPPSKLASDSARTPGSFPPKHHMPVIDSSPKLKPRNDRISPSPAAKHEAEEAMSVKRRQRTPPTLPRRTSLIAHQSRQLGADISNMAAKETAKLHPSVPSESETNSHQSRVHASPVSTTPEPKRTSVGSAKGMQSESSNSISSSLSMQAFELCDDASTPYIDMTEHTTPDDHRRSCHSEYSYSFPDISSEMMIRRDEHSTSMRLTEIPDSVSGVQNTIAHHQPEREQGSCPTVLKDDSPATLQSYEPNTSQHQHGDDKFTVKEFVSSVPGPAPLPLHVEPSHQVNSHSDNKTSVMSQNSALEKNNSHSHPHPVVDDVIHVIRHSSFRVGSDQPVMESVEVGVQNVDMGKLINVVRDEMEVRKGATPSESPTTRSIISEPDSRTEPRPKEPDPITNYSETKSFNSCSDSSPAETRTNSFVPEEETTPTPPVKETLDIKSFRQRAEALEGLLELSADLLEQSRLEELAIVLQPFGKNKVSPRETAIWLAKSLKGMMIEDINNNNSSGSSRNCS

SEQ ID NO: 70794 - DNA, 1677 bp, Arabidopsis thaliana
  misc_feature (1)..(1677): Ceres Seq. ID no. 2997899
  misc_feature: MA Experiment ID: 20001556 Result: Up-regulated in Transcription
  misc_feature: MA Experiment 20001556 PARAMETER Experiment Name: At_Drought_Soil_Dry_P Parameter: Age (day) Value: 26
  misc_feature: MA Experiment 20001556 PARAMETER Experiment Name: At_Drought_Soil_Dry_P Parameter: Organism Value: A. thaliana
  misc_feature: MA Experiment 20001556 PARAMETER Experiment Name: At_Drought_Soil_Dry_P Parameter: Plant Line Value: WS
  misc_feature: MA Experiment 20001556 PARAMETER Experiment Name: At_Drought_Soil_Dry_P Parameter: Post Timepoint (hr) Value: None
  misc_feature: MA Experiment 20001556 PARAMETER Experiment Name: At_Drought_Soil_Dry_P Parameter: Post-Treatment Value: None
  misc_feature: MA Experiment 20001556 PARAMETER Experiment Name: At_Drought_Soil_Dry_P Parameter: Timepoint (day) Value: 12
  misc_feature: MA Experiment 20001556 PARAMETER Experiment Name: At_Drought_Soil_Dry_P Parameter: Treatment Value: Drought vs. No Drought
atgagcaagggggcggcaataatagcttatgcaaatcccatctttcatattcgacatctaaagcttgaatctttcttgtggaacatcatcattcgtgccattgttcacaatgtttcgtcgcctcaacgacattctccgatctcagtctacctccgtatgcgcaaccatcgcgtctctcccgattttcatacctttccgtttcttctcccttctttccacaatccgcttcatcttcctcttgggcaacgaactcatgctcagattcttctttttggacttgacaaagacccatttgtccgaacttcactgctcaacatgtattcttcctgtggcgacttgagatcagctcagcgagttttcgatgactcgggctcgaaggatttaccggcctggaactctgtggtcaatgcttatgccaaagctgggttgatcgatgatgcgcggaaactgttcgacgaaatgcctgaaagaaacgtgatttcctggagctgcttgattaacggctacgttatgtgtgggaaatacaaagaagcgcttgatttgttccgggagatgcaattacctaaaccaaacgaagcattcgtcagacccaacgagtttacaatgtcgactgtactctcggcttgtgggcgattgggtgcgctcgagcaagggaaatgggttcacgcttacatcgataagtaccacgttgagattgacattgtcttaggcacagctctcattgatatgtacgccaaatgtgggagcctcgagagggcgaaaagggttttcaatgccttgggatccaagaaagatgtcaaagcttacagtgctatgatatgttgcttagcaatgtacggtctcacagatgagtgcttccaactgttctctgagatgaccacgagtgacaacataaacccaaactctgtgacatttgtgggcattctcggtgcttgtgtacatcgaggtctaataaacgaaggaaaatcttactttaaaatgatgattgaggaatttggtatcacgccatcaatccagcattatggttgtatggttgatctctacggaagatctggtttgatcaaagaagcagagagctttatagcatctatgcctatggagcctgatgtacttatttgggggtctctcttaagcggatcaagaatgcttggggatatcaagacttgtgaaggtgccctcaagcgactcatcgagctagatcctatgaacagtggagcatatgtgcttctctctaacgtctatgccaaaacagggaggtggatggaaggcattaataaagttccgggatgtagctatgttgaagtagagggagtggttcacgagtttgttgtaggagacgaatctcaacaagagagcgaaaggatctatgctatgctcgatgagataatgcagaggctgagagaagctggatatgttacagacactaaggaggttttacttgatcttaacgagaaagataaagagatagctttgtcttaccacagtgagaaactggctattgcgttctgtttgatgaagacaaggcctggaactccagtgagaatcatcaagaacctcagaatctgtggagattgtcatcttacgggtcttgctcttgcagagatttttggtgataacaattgcagcaatgtttgtgttggattgaataaacacattactgaattttggaggttttga

SEQ ID NO: 70795 - protein, 558 aa, Arabidopsis thaliana
  peptide (1)..(558): Ceres Seq. ID no. 2997900
  misc_feature (339)..(373): Pfam Name: PPR repeat Pfam Description: PPR repeat
  misc_feature (1)..(558): Homolog of NCBI NO: 15229340 NR Description: putative protein; protein id: At3g62890.1
  misc_feature (26)..(537): Homolog of NCBI NO: 34910298 NR Description: P0013F10.8 [Oryza sativa (japonica
  misc_feature (10)..(536): Homolog of NCBI NO: 10178152 NR Description: selenium-binding protein-like [Arabidopsis
  misc_feature (10)..(536): Homolog of NCBI NO: 15242684 NR Description: putative protein; protein id: At5g40410.1
  misc_feature (2)..(536): Homolog of NCBI NO: 15239979 NR Description: selenium-binding protein-like; protein id:
  misc_feature (10)..(536): Homolog of NCBI NO: 15239745 NR Description: selenium-binding protein-like; protein id:
  misc_feature (2)..(537): Homolog of NCBI NO: 15240085 NR Description: selenium-binding protein-like; protein id:
  misc_feature (8)..(537): Homolog of NCBI NO: 15235537 NR Description: putative protein; protein id: At4g37380.1
  misc_feature (10)..(526): Homolog of NCBI NO: 34899952 NR Description: putative selenium-binding protein [Oryza sativa
  misc_feature (29)..(537): Homolog of NCBI NO: 34915288 NR Description: similar to selenium-binding protein [Oryza sativa
MSKGAAIIAYANPIFHIRHLKLESFLWNIIIRAIVHNVSSPQRHSPISVYLRMRNHRVSPDFHTFPFLLPSFHNPLHLPLGQRTHAQILLFGLDKDPFVRTSLLNMYSSCGDLRSAQRVFDDSGSKDLPAWNSVVNAYAKAGLIDDARKLFDEMPERNVISWSCLINGYVMCGKYKEALDLFREMQLPKPNEAFVRPNEFTMSTVLSACGRLGALEQGKWVHAYIDKYHVEIDIVLGTALIDMYAKCGSLERAKRVFNALGSKKDVKAYSAMICCLAMYGLTDECFQLFSEMTTSDNINPNSVTFVGILGACVHRGLINEGKSYFKMMIEEFGITPSIQHYGCMVDLYGRSGLIKEAESFIASMPMEPDVLIWGSLLSGSRMLGDIKTCEGALKRLIELDPMNSGAYVLLSNVYAKTGRWMEGINKVPGCSYVEVEGVVHEFVVGDESQQESERIYAMLDEIMQRLREAGYVTDTKEVLLDLNEKDKEIALSYHSEKLAIAFCLMKTRPGTPVRIIKNLRICGDCHLTGLALAEIFGDNNCSNVCVGLNKHITEFWRF

SEQ ID NO: 70796 - protein, 506 aa, Arabidopsis thaliana
  peptide (1)..(506): Ceres Seq. ID no. 2997901
  misc_feature (287)..(321): Pfam Name: PPR repeat Pfam Description: PPR repeat
  misc_feature (1)..(506): Homolog of NCBI NO: 15229340 NR Description: putative protein; protein id: At3g62890.1
  misc_feature (1)..(485): Homolog of NCBI NO: 34910298 NR Description: P0013F10.8 [Oryza sativa (japonica
  misc_feature (1)..(484): Homolog of NCBI NO: 10178152 NR Description: selenium-binding protein-like [Arabidopsis
  misc_feature (1)..(484): Homolog of NCBI NO: 15242684 NR Description: putative protein; protein id: At5g40410.1
  misc_feature (1)..(484): Homolog of NCBI NO: 15239979 NR Description: selenium-binding protein-like; protein id:
  misc_feature (1)..(484): Homolog of NCBI NO: 15239745 NR Description: selenium-binding protein-like; protein id:
  misc_feature (1)..(485): Homolog of NCBI NO: 15240085 NR Description: selenium-binding protein-like; protein id:
  misc_feature (1)..(485): Homolog of NCBI NO: 15235537 NR Description: putative protein; protein id: At4g37380.1
  misc_feature (1)..(474): Homolog of NCBI NO: 34899952 NR Description: putative selenium-binding protein [Oryza sativa
  misc_feature (1)..(485): Homolog of NCBI NO: 34915288 NR Description: similar to selenium-binding protein [Oryza sativa
MRNHRVSPDFHTFPFLLPSFHNPLHLPLGQRTHAQILLFGLDKDPFVRTSLLNMYSSCGDLRSAQRVFDDSGSKDLPAWNSVVNAYAKAGLIDDARKLFDEMPERNVISWSCLINGYVMCGKYKEALDLFREMQLPKPNEAFVRPNEFTMSTVLSACGRLGALEQGKWVHAYIDKYHVEIDIVLGTALIDMYAKCGSLERAKRVFNALGSKKDVKAYSAMICCLAMYGLTDECFQLFSEMTTSDNINPNSVTFVGILGACVHRGLINEGKSYFKMMIEEFGITPSIQHYGCMVDLYGRSGLIKEAESFIASMPMEPDVLIWGSLLSGSRMLGDIKTCEGALKRLIELDPMNSGAYVLLSNVYAKTGRWMEGINKVPGCSYVEVEGVVHEFVVGDESQQESERIYAMLDEIMQRLREAGYVTDTKEVLLDLNEKDKEIALSYHSEKLAIAFCLMKTRPGTPVRIIKNLRICGDCHLTGLALAEIFGDNNCSNVCVGLNKHITEFWRF

SEQ ID NO: 70797 - protein, 453 aa, Arabidopsis thaliana
  peptide (1)..(453): Ceres Seq. ID no. 2997902
  misc_feature (234)..(268): Pfam Name: PPR repeat Pfam Description: PPR repeat
  misc_feature (1)..(453): Homolog of NCBI NO: 15229340 NR Description: putative protein; protein id: At3g62890.1
  misc_feature (1)..(432): Homolog of NCBI NO: 34910298 NR Description: P0013F10.8 [Oryza sativa (japonica
  misc_feature (1)..(431): Homolog of NCBI NO: 10178152 NR Description: selenium-binding protein-like [Arabidopsis
  misc_feature (1)..(431): Homolog of NCBI NO: 15242684 NR Description: putative protein; protein id: At5g40410.1
  misc_feature (1)..(431): Homolog of NCBI NO: 15239979 NR Description: selenium-binding protein-like; protein id:
  misc_feature (1)..(431): Homolog of NCBI NO: 15239745 NR Description: selenium-binding protein-like; protein id:
  misc_feature (1)..(432): Homolog of NCBI NO: 15240085 NR Description: selenium-binding protein-like; protein id:
  misc_feature (1)..(432): Homolog of NCBI NO: 15235537 NR Description: putative protein; protein id: At4g37380.1
  misc_feature (1)..(421): Homolog of NCBI NO: 34899952 NR Description: putative selenium-binding protein [Oryza sativa
  misc_feature (1)..(432): Homolog of NCBI NO: 34915288 NR Description: similar to selenium-binding protein [Oryza sativa
MYSSCGDLRSAQRVFDDSGSKDLPAWNSVVNAYAKAGLIDDARKLFDEMPERNVISWSCLINGYVMCGKYKEALDLFREMQLPKPNEAFVRPNEFTMSTVLSACGRLGALEQGKWVHAYIDKYHVEIDIVLGTALIDMYAKCGSLERAKRVFNALGSKKDVKAYSAMICCLAMYGLTDECFQLFSEMTTSDNINPNSVTFVGILGACVHRGLINEGKSYFKMMIEEFGITPSIQHYGCMVDLYGRSGLIKEAESFIASMPMEPDVLIWGSLLSGSRMLGDIKTCEGALKRLIELDPMNSGAYVLLSNVYAKTGRWMEGINKVPGCSYVEVEGVVHEFVVGDESQQESERIYAMLDEIMQRLREAGYVTDTKEVLLDLNEKDKEIALSYHSEKLAIAFCLMKTRPGTPVRIIKNLRICGDCHLTGLALAEIFGDNNCSNVCVGLNKHITEFWRF

SEQ ID NO: 70798 - DNA, 4206 bp, Arabidopsis thaliana
  misc_feature (1)..(4206): Ceres Seq. ID no. 2997903
  misc_feature: MA Experiment ID: 20000495 Result: Down-regulated in Transcription
  misc_feature: MA Experiment 20000495 PARAMETER Experiment Name: At_Guard_Cells_P Parameter: Harvest Date Value: 8/2/2002
  misc_feature: MA Experiment 20000495 PARAMETER Experiment Name: At_Guard_Cells_P Parameter: Organism Value: A. thaliana
  misc_feature: MA Experiment 20000495 PARAMETER Experiment Name: At_Guard_Cells_P Parameter: Tissue Value: Guard Cells vs. Leaves
  misc_feature: MA Experiment ID: 20001451 Result: Up-regulated in Transcription
  misc_feature: MA Experiment 20001451 PARAMETER Experiment Name: At_Far-red-induction_P Parameter: Age (day) Value: 7
  misc_feature: MA Experiment 20001451 PARAMETER Experiment Name: At_Far-red-induction_P Parameter: Light Value: Far-red vs. White
  misc_feature: MA Experiment 20001451 PARAMETER Experiment Name: At_Far-red-induction_P Parameter: Organism Value: A. thaliana
  misc_feature: MA Experiment 20001451 PARAMETER Experiment Name: At_Far-red-induction_P Parameter: Plant Line Value: Columbia
  misc_feature: MA Experiment 20001451 PARAMETER Experiment Name: At_Far-red-induction_P Parameter: Timepoint (hr) Value: 24
  misc_feature: MA Experiment 20001451 PARAMETER Experiment Name: At_Far-red-induction_P Parameter: Tissue Value: Whole Plant
atggaggagtctgaacttgaagaaggagaggcttgctcttacaatattactaacgaatacgctggaagcatagaccctgataacgatctctcttacattgtgagcacctccttctcagctgctctacgagatgagaagcttcaacacatccttggacacttccagaaagactttgagggcggtgtttcagctgagaatcttggggcgaaatatggtggctatggctctttcttgccaacttatcaacgttctcctgtttggtctcacccgaagacaccagcaaaacctcagagttctacagggactagatctccaaacaacttactaggggagagtggcaatgcagcttcgtctagtgttcctaaaaaggcaaaatctggtcttgcttcctctggaaaccccaaaaaatcagtgaaatctaagaaacctagttccagtgccagaatggaatctgcaactaagaaaccttgtgtcttcagtaagcagaattctctgaagcttcggataaagatggtaccagatggtttatctaccgaaaagaatgctgctgcaatatacagtggccttggacttgatgtgtcaccttctttgtccttagataacaatagtctttcaggtagtgaagggatgaatgaggagcctcagggttattctccaacggagtctcccaccagtattcttaatgtaatgacttcacttcctgtggatcattgtcagttcctatctcctctctctgaggatctgattcgattcattgaaagggaaaaatccgaaaagggatataagtatacatctccatccaggcttttcactgcgagttcttctgctatggcatacggtttggaacctcagaagtctggagagaaaccatcagtagagaagaaaaaaaagatggtggagaggagcagcttttctgctgagacaaatgtccgcagtaagaagggcctgtttgattcaactgatgccattaccaaggagtcaatggaaacaaacacattatatcctacatttgcggagaaagaaacagccagtagtaaattatttgatgcatccaaggaaaactacaatggcactgttaggggcgaaatggtgggtgatgtcgacagaaggttgtggggtctaactcgtcataaagatcttggggcgcatcatgagaatccaaagactatttctgctggaagtgttcgtgaagataaaaaggctaaacttggtgataatgaggcttcaggatacccaaggaaagttggcaaatacaaaggcagcaaagcttctgattcagtcaaaaaggaatcgagtgcatcaaaggcgaaaagtggtcataaagtggagctagaacatcctcttagaaagcagaagtatgaccagatagaacaggagccaccgtcttcatcaaagttcaaggaacagcaaacctctgttgtttttgagactaagctgaatggtcaagctgagaagaaggaagtggtagccgtgaaaccacaaagtgatagcaaaaaagccgaggacacttacaaagacttttttggagacataggggactctgaagaagaagaggaacaagacgtaaaagatttgcggatttcagaaaagggacttccgcccttagaagatatgcctgaaaaatcgagcttgccgctagtagaacctcagaacgttggtcctgaacccatgttgagaaaacttggttctgatgcttctcttccgaaagcaaatcccgtgatcatacaagaacattgggttgcttgtgacaaatgtggaaagtggcggcttcttccttttggcgtcttcccagaagaccttcctgagaaatggatgtgcacaatgcttaattggctgcctggagtgaactattgcaatgttcctgaagatgaaacaacgaaagcactgtatgcaatgtatcagatccctgtccctgagaaccaggcttcgatgcagagtaatcccagtggccctaagcctcagtttacccagggagatgacaacacaaagaagaagaaaaagggtttcaaaaagatagacaatggaatggataaagaaggtgctcgaactgcagaaactaacaagaccatccaaacatcgtcaagaaatggtattcaaaattcgcagggacttggcgacttggccgaggatgagaggcaaatacataaacagaaagagaaaggaaaagcagtggatcacctctctgatgagtcgaagagcttgaaggcgaataacaaaagaaaaacagatctagagagttctatgctggccaaaaaaatgaagatcgaaagttttctgtttcctgatgaatctgaatatggaaatggacgtcctacctcgagtagtggtgtccctatcacgtcagcagatataaagccaaagccccgagtctcctccaaaatgccaaaagaggaaggaggagcttcagacactggaaatagcaatagcactggggggattaaaaagaggaaactgagagaaagccatggttctaggatttacagtgagaacgaaaatcatgaacgaaagaaagctcgagttcgtaaagaagagaaggagcctagttattcacaaggcaatgggaagttggaaaagaaaaatagaagtcattcgaaaatagagtatgcaaatgttcagaactcaatcgcggcaacctcaagttcttctaagatttctgattctcataaacccagaaacagctcccgcgaagctaaatgttctcctgttgagtcggtgtcttcctcacctatgaggctttccaacccggagaaacgtatatctgtgagtaaaaagaaagaagaatcttatgatgctaacgtctttgcagcaggtagtttgaaaaaattctcagatggtgaaggtgaagatgatggtgggagtgatagatcgcagagtcagatgaaggataaacatggatcccatgagtcttctgtgcttgatatttgggataataaaggatctttgaaagcgaaagagcgcgctgatccttctctcgatgccaattttgaaaatggtggccacaagactttaccgcggaaactggatcatattctcggtgaaggaaaacagtctagcgatcatcatcgacgtagcaatgattccctggcaaagaagtcaggaaaaggttcatcttctcggtccaaagaaaagagccaaagcattaggtctgattcacgggatggtccgagacatattgaaaagaagatatatgatggtagtcctgacagtagagcggatatgatcgtgagaccaaacattccaaaaccgcacgactccgaaagaataccagagaggagtaatatagcagatttagcttctccatcacggccaccatctagaggtgtccaaggggattcctctatgctttctgtccgtaagaaagtcgataaatgcagcacatcagctggaaataataatatccaagctgatgatgtgacaaaggcaacagcccaaataagaaggaaaagcgagccttctccaagccccttgcgaaaggaaataacatctgcgcaggccgcccataatactttaaaagaagctaaagacttgaaacatacagctgaccgtctcaagaattctgtatcaaaccttgagcacattgagctctacttccaagcttgccttaagtttcttcacggtgcttttcttttggagatgagtagcaacgagagtgctagacaaggagaaacaatggtccaatctatgaagatttatagtagcactgcgaatctttgcggcactgaaacctttttccgtgatagattttgtgcccatgagtatgagaagtctaaagatatgggagctgctgccctggcttacaaatgcatggaggtcgcgtatatgagagtggttaattcctcctacaccagtgctaatagatatcgaaatgaattgcagacttctctacaaatggttccgccaggtgaatctccttcttcatctgcctcggatgttgataacgtgaaccatccagcagcagtagacagagttggtacctcaaggggcatcagttctcctttagttgctgggaaccacgacgtaaatctgtcaatggatgcctcgaggaaatcacgtgtggcattaacagcttgtattgaaaactcaggggaggcccaacaacaaggagagggtataatatctattaaaagcgcccttgattataacttccaagacatggagggattgctacgtttagtgaagcttgctatgaaggccaacaaccggtga

SEQ ID NO: 70799 - protein, 1401 aa, Arabidopsis thaliana
  peptide (1)..(1401): Ceres Seq. ID no. 2997904
  misc_feature (622)..(936): Pfam Name: Lipoprotein amino terminal region Pfam Description: Lipoprotein amino terminal region
  misc_feature (44)..(550): Homolog of NCBI NO: 34899330 NR Description: contains ESTs AU056898(S20963)~similar to Arabidopsis thaliana chromosome3,
  misc_feature (706)..(1383): Homolog of NCBI NO: 25518543 NR Description: hypothetical protein F22D16.1 - Arabidopsis >gi|6056403|gb|AAF02867.1|AC009525_1 Hypothetical protein
  misc_feature (17)..(198): Homolog of NCBI NO: 25518543 NR Description: hypothetical protein F22D16.1 - Arabidopsis >gi|6056403|gb|AAF02867.1|AC009525_1 Hypothetical protein
  misc_feature (129)..(519): Homolog of NCBI NO: 25518543 NR Description: hypothetical protein F22D16.1 - Arabidopsis >gi|6056403|gb|AAF02867.1|AC009525_1 Hypothetical protein
  misc_feature (1148)..(1398): Homolog of NCBI NO: 30683379 NR Description: expressed protein [Arabidopsis thaliana] unknown protein [Arabidopsis thaliana]
  misc_feature (660)..(1398): Homolog of NCBI NO: 34899330 NR Description: contains ESTs AU056898(S20963)~similar to Arabidopsis thaliana chromosome3,
  misc_feature (542)..(754): Homolog of NCBI NO: 30683379 NR Description: expressed protein [Arabidopsis thaliana] unknown protein [Arabidopsis thaliana]
  misc_feature (783)..(925): Homolog of NCBI NO: 30683379 NR Description: expressed protein [Arabidopsis thaliana] unknown protein [Arabidopsis thaliana]
  misc_feature (706)..(1238): Homolog of NCBI NO: 22329307 NR Description: hypothetical protein; protein id: At1g02990.1, by cDNA: gi_19310594 [Arabidopsis thaliana]
  misc_feature (71)..(519): Homolog of NCBI NO: 22329307 NR Description: hypothetical protein; protein id: At1g02990.1, by cDNA: gi_19310594 [Arabidopsis thaliana]
MEESELEEGEACSYNITNEYAGSIDPDNDLSYIVSTSFSAALRDEKLQHILGHFQKDFEGGVSAENLGAKYGGYGSFLPTYQRSPVWSHPKTPAKPQSSTGTRSPNNLLGESGNAASSSVPKKAKSGLASSGNPKKSVKSKKPSSSARMESATKKPCVFSKQNSLKLRIKMVPDGLSTEKNAAAIYSGLGLDVSPSLSLDNNSLSGSEGMNEEPQGYSPTESPTSILNVMTSLPVDHCQFLSPLSEDLIRFIEREKSEKGYKYTSPSRLFTASSSAMAYGLEPQKSGEKPSVEKKKKMVERSSFSAETNVRSKKGLFDSTDAITKESMETNTLYPTFAEKETASSKLFDASKENYNGTVRGEMVGDVDRRLWGLTRHKDLGAHHENPKTISAGSVREDKKAKLGDNEASGYPRKVGKYKGSKASDSVKKESSASKAKSGHKVELEHPLRKQKYDQIEQEPPSSSKFKEQQTSVVFETKLNGQAEKKEVVAVKPQSDSKKAEDTYKDFFGDIGDSEEEEEQDVKDLRISEKGLPPLEDMPEKSSLPLVEPQNVGPEPMLRKLGSDASLPKANPVIIQEHWVACDKCGKWRLLPFGVFPEDLPEKWMCTMLNWLPGVNYCNVPEDETTKALYAMYQIPVPENQASMQSNPSGPKPQFTQGDDNTKKKKKGFKKIDNGMDKEGARTAETNKTIQTSSRNGIQNSQGLGDLAEDERQIHKQKEKGKAVDHLSDESKSLKANNKRKTDLESSMLAKKMKIESFLFPDESEYGNGRPTSSSGVPITSADIKPKPRVSSKMPKEEGGASDTGNSNSTGGIKKRKLRESHGSRIYSENENHERKKARVRKEEKEPSYSQGNGKLEKKNRSHSKIEYANVQNSIAATSSSSKISDSHKPRNSSREAKCSPVESVSSSPMRLSNPEKRISVSKKKEESYDANVFAAGSLKKFSDGEGEDDGGSDRSQSQMKDKHGSHESSVLDIWDNKGSLKAKERADPSLDANFENGGHKTLPRKLDHILGEGKQSSDHHRRSNDSLAKKSGKGSSSRSKEKSQSIRSDSRDGPRHIEKKIYDGSPDSRADMIVRPNIPKPHDSERIPERSNIADLASPSRPPSRGVQGDSSMLSVRKKVDKCSTSAGNNNIQADDVTKATAQIRRKSEPSPSPLRKEITSAQAAHNTLKEAKDLKHTADRLKNSVSNLEHIELYFQACLKFLHGAFLLEMSSNESARQGETMVQSMKIYSSTANLCGTETFFRDRFCAHEYEKSKDMGAAALAYKCMEVAYMRVVNSSYTSANRYRNELQTSLQMVPPGESPSSSASDVDNVNHPAAVDRVGTSRGISSPLVAGNHDVNLSMDASRKSRVALTACIENSGEAQQQGEGIISIKSALDYNFQDMEGLLRLVKLAMKANNR

SEQ ID NO: 70800 - protein, 1253 aa, Arabidopsis thaliana
  peptide (1)..(1253): Ceres Seq. ID no. 2997905
  misc_feature (474)..(788): Pfam Name: Lipoprotein amino terminal region Pfam Description: Lipoprotein amino terminal region
  misc_feature (512)..(1250): Homolog of NCBI NO: 34899330 NR Description: contains ESTs AU056898(S20963)~similar to Arabidopsis thaliana chromosome3,
  misc_feature (1)..(402): Homolog of NCBI NO: 34899330 NR Description: contains ESTs AU056898(S20963)~similar to Arabidopsis thaliana chromosome3,
  misc_feature (558)..(1235): Homolog of NCBI NO: 25518543 NR Description: hypothetical protein F22D16.1 - Arabidopsis >gi|6056403|gb|AAF02867.1|AC009525_1 Hypothetical protein
  misc_feature (1)..(50): Homolog of NCBI NO: 25518543 NR Description: hypothetical protein F22D16.1 - Arabidopsis >gi|6056403|gb|AAF02867.1|AC009525_1 Hypothetical protein
  misc_feature (1)..(371): Homolog of NCBI NO: 25518543 NR Description: hypothetical protein F22D16.1 - Arabidopsis >gi|6056403|gb|AAF02867.1|AC009525_1 Hypothetical protein
  misc_feature (1000)..(1250): Homolog of NCBI NO: 30683379 NR Description: expressed protein [Arabidopsis thaliana] unknown protein [Arabidopsis thaliana]
  misc_feature (394)..(606): Homolog of NCBI NO: 30683379 NR Description: expressed protein [Arabidopsis thaliana] unknown protein [Arabidopsis thaliana]
  misc_feature (635)..(777): Homolog of NCBI NO: 30683379 NR Description: expressed protein [Arabidopsis thaliana] unknown protein [Arabidopsis thaliana]
  misc_feature (558)..(1090): Homolog of NCBI NO: 22329307 NR Description: hypothetical protein; protein id: At1g02990.1, by cDNA: gi_19310594 [Arabidopsis thaliana]
  misc_feature (1)..(371): Homolog of NCBI NO: 22329307 NR Description: hypothetical protein; protein id: At1g02990.1, by cDNA: gi_19310594 [Arabidopsis thaliana]
MESATKKPCVFSKQNSLKLRIKMVPDGLSTEKNAAAIYSGLGLDVSPSLSLDNNSLSGSEGMNEEPQGYSPTESPTSILNVMTSLPVDHCQFLSPLSEDLIRFIEREKSEKGYKYTSPSRLFTASSSAMAYGLEPQKSGEKPSVEKKKKMVERSSFSAETNVRSKKGLFDSTDAITKESMETNTLYPTFAEKETASSKLFDASKENYNGTVRGEMVGDVDRRLWGLTRHKDLGAHHENPKTISAGSVREDKKAKLGDNEASGYPRKVGKYKGSKASDSVKKESSASKAKSGHKVELEHPLRKQKYDQIEQEPPSSSKFKEQQTSVVFETKLNGQAEKKEVVAVKPQSDSKKAEDTYKDFFGDIGDSEEEEEQDVKDLRISEKGLPPLEDMPEKSSLPLVEPQNVGPEPMLRKLGSDASLPKANPVIIQEHWVACDKCGKWRLLPFGVFPEDLPEKWMCTMLNWLPGVNYCNVPEDETTKALYAMYQIPVPENQASMQSNPSGPKPQFTQGDDNTKKKKKGFKKIDNGMDKEGARTAETNKTIQTSSRNGIQNSQGLGDLAEDERQIHKQKEKGKAVDHLSDESKSLKANNKRKTDLESSMLAKKMKIESFLFPDESEYGNGRPTSSSGVPITSADIKPKPRVSSKMPKEEGGASDTGNSNSTGGIKKRKLRESHGSRIYSENENHERKKARVRKEEKEPSYSQGNGKLEKKNRSHSKIEYANVQNSIAATSSSSKISDSHKPRNSSREAKCSPVESVSSSPMRLSNPEKRISVSKKKEESYDANVFAAGSLKKFSDGEGEDDGGSDRSQSQMKDKHGSHESSVLDIWDNKGSLKAKERADPSLDANFENGGHKTLPRKLDHILGEGKQSSDHHRRSNDSLAKKSGKGSSSRSKEKSQSIRSDSRDGPRHIEKKIYDGSPDSRADMIVRPNIPKPHDSERIPERSNIADLASPSRPPSRGVQGDSSMLSVRKKVDKCSTSAGNNNIQADDVTKATAQIRRKSEPSPSPLRKEITSAQAAHNTLKEAKDLKHTADRLKNSVSNLEHIELYFQACLKFLHGAFLLEMSSNESARQGETMVQSMKIYSSTANLCGTETFFRDRFCAHEYEKSKDMGAAALAYKCMEVAYMRVVNSSYTSANRYRNELQTSLQMVPPGESPSSSASDVDNVNHPAAVDRVGTSRGISSPLVAGNHDVNLSMDASRKSRVALTACIENSGEAQQQGEGIISIKSALDYNFQDMEGLLRLVKLAMKANNR

SEQ ID NO: 70801 - protein, 1231 aa, Arabidopsis thaliana
  peptide (1)..(1231): Ceres Seq. ID no. 2997906
  misc_feature (452)..(766): Pfam Name: Lipoprotein amino terminal region Pfam Description: Lipoprotein amino terminal region
  misc_feature (490)..(1228): Homolog of NCBI NO: 34899330 NR Description: contains ESTs AU056898(S20963)~similar to Arabidopsis thaliana chromosome3,
  misc_feature (1)..(380): Homolog of NCBI NO: 34899330 NR Description: contains ESTs AU056898(S20963)~similar to Arabidopsis thaliana chromosome3,
  misc_feature (536)..(1213): Homolog of NCBI NO: 25518543 NR Description: hypothetical protein F22D16.1 - Arabidopsis >gi|6056403|gb|AAF02867.1|AC009525_1 Hypothetical protein
  misc_feature (1)..(28): Homolog of NCBI NO: 25518543 NR Description: hypothetical protein F22D16.1 - Arabidopsis >gi|6056403|gb|AAF02867.1|AC009525_1 Hypothetical protein
  misc_feature (1)..(349): Homolog of NCBI NO: 25518543 NR Description: hypothetical protein F22D16.1 - Arabidopsis >gi|6056403|gb|AAF02867.1|AC009525_1 Hypothetical protein
  misc_feature (978)..(1228): Homolog of NCBI NO: 30683379 NR Description: expressed protein [Arabidopsis thaliana] unknown protein [Arabidopsis thaliana]
  misc_feature (372)..(584): Homolog of NCBI NO: 30683379 NR Description: expressed protein [Arabidopsis thaliana] unknown protein [Arabidopsis thaliana]
  misc_feature (613)..(755): Homolog of NCBI NO: 30683379 NR Description: expressed protein [Arabidopsis thaliana] unknown protein [Arabidopsis thaliana]
  misc_feature (536)..(1068): Homolog of NCBI NO: 22329307 NR Description: hypothetical protein; protein id: At1g02990.1, by cDNA: gi_19310594 [Arabidopsis thaliana]
  misc_feature (1)..(349): Homolog of NCBI NO: 22329307 NR Description: hypothetical protein; protein id: At1g02990.1, by cDNA: gi_19310594 [Arabidopsis thaliana]
MVPDGLSTEKNAAAIYSGLGLDVSPSLSLDNNSLSGSEGMNEEPQGYSPTESPTSILNVMTSLPVDHCQFLSPLSEDLIRFIEREKSEKGYKYTSPSRLFTASSSAMAYGLEPQKSGEKPSVEKKKKMVERSSFSAETNVRSKKGLFDSTDAITKESMETNTLYPTFAEKETASSKLFDASKENYNGTVRGEMVGDVDRRLWGLTRHKDLGAHHENPKTISAGSVREDKKAKLGDNEASGYPRKVGKYKGSKASDSVKKESSASKAKSGHKVELEHPLRKQKYDQIEQEPPSSSKFKEQQTSVVFETKLNGQAEKKEVVAVKPQSDSKKAEDTYKDFFGDIGDSEEEEEQDVKDLRISEKGLPPLEDMPEKSSLPLVEPQNVGPEPMLRKLGSDASLPKANPVIIQEHWVACDKCGKWRLLPFGVFPEDLPEKWMCTMLNWLPGVNYCNVPEDETTKALYAMYQIPVPENQASMQSNPSGPKPQFTQGDDNTKKKKKGFKKIDNGMDKEGARTAETNKTIQTSSRNGIQNSQGLGDLAEDERQIHKQKEKGKAVDHLSDESKSLKANNKRKTDLESSMLAKKMKIESFLFPDESEYGNGRPTSSSGVPITSADIKPKPRVSSKMPKEEGGASDTGNSNSTGGIKKRKLRESHGSRIYSENENHERKKARVRKEEKEPSYSQGNGKLEKKNRSHSKIEYANVQNSIAATSSSSKISDSHKPRNSSREAKCSPVESVSSSPMRLSNPEKRISVSKKKEESYDANVFAAGSLKKFSDGEGEDDGGSDRSQSQMKDKHGSHESSVLDIWDNKGSLKAKERADPSLDANFENGGHKTLPRKLDHILGEGKQSSDHHRRSNDSLAKKSGKGSSSRSKEKSQSIRSDSRDGPRHIEKKIYDGSPDSRADMIVRPNIPKPHDSERIPERSNIADLASPSRPPSRGVQGDSSMLSVRKKVDKCSTSAGNNNIQADDVTKATAQIRRKSEPSPSPLRKEITSAQAAHNTLKEAKDLKHTADRLKNSVSNLEHIELYFQACLKFLHGAFLLEMSSNESARQGETMVQSMKIYSSTANLCGTETFFRDRFCAHEYEKSKDMGAAALAYKCMEVAYMRVVNSSYTSANRYRNELQTSLQMVPPGESPSSSASDVDNVNHPAAVDRVGTSRGISSPLVAGNHDVNLSMDASRKSRVALTACIENSGEAQQQGEGIISIKSALDYNFQDMEGLLRLVKLAMKANNR

SEQ ID NO: 70802 - DNA, 1086 bp, Arabidopsis thaliana
  misc_feature (1)..(1086): Ceres Seq. ID no. 2998206
  misc_feature: MA Experiment ID: 20000166 Result: Down-regulated in Transcription
  misc_feature: MA Experiment 20000166 PARAMETER Experiment Name: At_100uM_ABA_P Parameter: Age (day) Value: 14
  misc_feature: MA Experiment 20000166 PARAMETER Experiment Name: At_100uM_ABA_P Parameter: Organism Value: A. thaliana
  misc_feature: MA Experiment 20000166 PARAMETER Experiment Name: At_100uM_ABA_P Parameter: Plant Line Value: WS
  misc_feature: MA Experiment 20000166 PARAMETER Experiment Name: At_100uM_ABA_P Parameter: Timepoint (hr) Value: 1
  misc_feature: MA Experiment 20000166 PARAMETER Experiment Name: At_100uM_ABA_P Parameter: Tissue Value: Aerial
  misc_feature: MA Experiment 20000166 PARAMETER Experiment Name: At_100uM_ABA_P Parameter: Treatment Value: 100uM ABA vs. No Treatment
  misc_feature: MA Experiment ID: 20000171 Result: Down-regulated in Transcription
  misc_feature: MA Experiment 20000171 PARAMETER Experiment Name: At_42deg_Heat_P Parameter: Age (day) Value: 14
  misc_feature: MA Experiment 20000171 PARAMETER Experiment Name: At_42deg_Heat_P Parameter: Organism Value: A. thaliana
  misc_feature: MA Experiment 20000171 PARAMETER Experiment Name: At_42deg_Heat_P Parameter: Plant Line Value: WS
  misc_feature: MA Experiment 20000171 PARAMETER Experiment Name: At_42deg_Heat_P Parameter: Temperature (deg C) Value: 42 vs. 22
  misc_feature: MA Experiment 20000171 PARAMETER Experiment Name: At_42deg_Heat_P Parameter: Timepoint (hr) Value: 1
  misc_feature: MA Experiment 20000171 PARAMETER Experiment Name: At_42deg_Heat_P Parameter: Tissue Value: Aerial
  misc_feature: MA Experiment ID: 20000173 Result: Down-regulated in Transcription
  misc_feature: MA Experiment 20000173 PARAMETER Experiment Name: At_42deg_Heat_P Parameter: Age (day) Value: 14
  misc_feature: MA Experiment 20000173 PARAMETER Experiment Name: At_42deg_Heat_P Parameter: Organism Value: A. thaliana
  misc_feature: MA Experiment 20000173 PARAMETER Experiment Name: At_42deg_Heat_P Parameter: Plant Line Value: WS
  misc_feature: MA Experiment 20000173 PARAMETER Experiment Name: At_42deg_Heat_P Parameter: Temperature (deg C) Value: 42 vs. 22
  misc_feature: MA Experiment 20000173 PARAMETER Experiment Name: At_42deg_Heat_P Parameter: Timepoint (hr) Value: 6
  misc_feature: MA Experiment 20000173 PARAMETER Experiment Name: At_42deg_Heat_P Parameter: Tissue Value: Aerial
  misc_feature: MA Experiment ID: 20000179 Result: Up-regulated in Transcription
  misc_feature: MA Experiment 20000179 PARAMETER Experiment Name: At_Germinating_Seeds_P Parameter: Age (hr) Value: 6 vs. 0
  misc_feature: MA Experiment 20000179 PARAMETER Experiment Name: At_Germinating_Seeds_P Parameter: Tissue Value: Germinating Seeds
  misc_feature: MA Experiment ID: 20000180 Result: Up-regulated in Transcription
  misc_feature: MA Experiment 20000180 PARAMETER Experiment Name: At_Germinating_Seeds_P Parameter: Age (hr) Value: 24 vs. 0
  misc_feature: MA Experiment 20000180 PARAMETER Experiment Name: At_Germinating_Seeds_P Parameter: Tissue Value: Germinating Seeds
  misc_feature: MA Experiment ID: 20000182 Result: Down-regulated in Transcription
  misc_feature: MA Experiment 20000182 PARAMETER Experiment Name: At_2mM_SA_P Parameter: Age (day) Value: 14
  misc_feature: MA Experiment 20000182 PARAMETER Experiment Name: At_2mM_SA_P Parameter: Organism Value: A. thaliana
  misc_feature: MA Experiment 20000182 PARAMETER Experiment Name: At_2mM_SA_P Parameter: Plant Line Value: WS
  misc_feature: MA Experiment 20000182 PARAMETER Experiment Name: At_2mM_SA_P Parameter: Timepoint (hr) Value: 6
  misc_feature: MA Experiment 20000182 PARAMETER Experiment Name: At_2mM_SA_P Parameter: Tissue Value: Aerial
  misc_feature: MA Experiment 20000182 PARAMETER Experiment Name: At_2mM_SA_P Parameter: Treatment Value: 2mM SA vs. No Treatment
  misc_feature: MA Experiment ID: 20000184 Result: Up-regulated in Transcription
  misc_feature: MA Experiment 20000184 PARAMETER Experiment Name: At_Shoots__P Parameter: Age (day) Value: 7
  misc_feature: MA Experiment 20000184 PARAMETER Experiment Name: At_Shoots__P Parameter: Tissue Value: Shoots vs. Whole Plant
  misc_feature: MA Experiment ID: 20000185 Result: Down-regulated in Transcription
  misc_feature: MA Experiment 20000185 PARAMETER Experiment Name: At_Roots__P Parameter: Age (day) Value: 7 vs. 21
  misc_feature: MA Experiment 20000185 PARAMETER Experiment Name: At_Roots__P Parameter: Organism Value: A. thaliana
  misc_feature: MA Experiment 20000185 PARAMETER Experiment Name: At_Roots__P Parameter: Tissue Value: Roots vs. Whole Plant
  misc_feature: MA Experiment ID: 20000211 Result: Down-regulated in Transcription
  misc_feature: MA Experiment 20000211 PARAMETER Experiment Name: At_0.001percent_MeJA__P Parameter: Age (day) Value: 14
  misc_feature: MA Experiment 20000211 PARAMETER Experiment Name: At_0.001percent_MeJA__P Parameter: Organism Value: A. thaliana
  misc_feature: MA Experiment 20000211 PARAMETER Experiment Name: At_0.001percent_MeJA__P Parameter: Plant Line Value: WS
  misc_feature: MA Experiment 20000211 PARAMETER Experiment Name: At_0.001percent_MeJA__P Parameter: Timepoint (hr) Value: 1
  misc_feature: MA Experiment 20000211 PARAMETER Experiment Name: At_0.001percent_MeJA__P Parameter: Tissue Value: Aerial
  misc_feature: MA Experiment 20000211 PARAMETER Experiment Name: At_0.001percent_MeJA__P Parameter: Treatment Value: 0.001percent MeJA vs. No Treatment
  misc_feature: MA Experiment ID: 20000227 Result: Up-regulated in Transcription
  misc_feature: MA Experiment 20000227 PARAMETER Experiment Name: At_Root-Tips-vs-Tops_P Parameter: Tissue Value: Root Tips vs. Root Tops
  misc_feature: MA Experiment ID: 20000234 Result: Down-regulated in Transcription
  misc_feature: MA Experiment 20000234 PARAMETER Experiment Name: At_Siliques_P Parameter: Age (day) Value: 21
  misc_feature: MA Experiment 20000234 PARAMETER Experiment Name: At_Siliques_P Parameter: Organism Value: A. thaliana
  misc_feature: MA Experiment 20000234 PARAMETER Experiment Name: At_Siliques_P Parameter: Plant Line Value: WS
  misc_feature: MA Experiment 20000234 PARAMETER Experiment Name: At_Siliques_P Parameter: Tissue Value: Less Than 5mm Siliques vs. Whole Plant
  misc_feature: MA Experiment ID: 20000235 Result: Down-regulated in Transcription
  misc_feature: MA Experiment 20000235 PARAMETER Experiment Name: At_Siliques_P Parameter: Age (day) Value: 21
  misc_feature: MA Experiment 20000235 PARAMETER Experiment Name: At_Siliques_P Parameter: Organism Value: A. thaliana
  misc_feature: MA Experiment 20000235 PARAMETER Experiment Name: At_Siliques_P Parameter: Plant Line Value: WS
  misc_feature: MA Experiment 20000235 PARAMETER Experiment Name: At_Siliques_P Parameter: Tissue Value: 5-10mm Siliques vs. Whole Plant
  misc_feature: MA Experiment ID: 20000264 Result: Down-regulated in Transcription
  misc_feature: MA Experiment 20000264 PARAMETER Experiment Name: At_Open_Flower_P Parameter: Age (day) Value: 21
  misc_feature: MA Experiment 20000264 PARAMETER Experiment Name: At_Open_Flower_P Parameter: Plant Line Value: WS
  misc_feature: MA Experiment 20000264 PARAMETER Experiment Name: At_Open_Flower_P Parameter: Tissue Value: Open Flower vs. Whole Plant
  misc_feature: MA Experiment ID: 20000265 Result: Down-regulated in Transcription
  misc_feature: MA Experiment 20000265 PARAMETER Experiment Name: At_Open_Flower_P Parameter: Age (day) Value: 21
  misc_feature: MA Experiment 20000265 PARAMETER Experiment Name: At_Open_Flower_P Parameter: Plant Line Value: WS
  misc_feature: MA Experiment 20000265 PARAMETER Experiment Name: At_Open_Flower_P Parameter: Tissue Value: Closed Flower vs. Whole Plant
  misc_feature: MA Experiment ID: 20000267 Result: Down-regulated in Transcription
  misc_feature: MA Experiment 20000267 PARAMETER Experiment Name: At_Drought_P Parameter: Age (day) Value: 7
  misc_feature: MA Experiment 20000267 PARAMETER Experiment Name: At_Drought_P Parameter: Organism Value: A. thaliana
  misc_feature: MA Experiment 20000267 PARAMETER Experiment Name: At_Drought_P Parameter: Plant Line Value: WS
  misc_feature: MA Experiment 20000267 PARAMETER Experiment Name: At_Drought_P Parameter: Timepoint (hr) Value: 6
  misc_feature: MA Experiment 20000267 PARAMETER Experiment Name: At_Drought_P Parameter: Tissue Value: Whole Plant
  misc_feature: MA Experiment 20000267 PARAMETER Experiment Name: At_Drought_P Parameter: Treatment Value: Drought vs. No Drought
  misc_feature: MA Experiment ID: 20000286 Result: Down-regulated in Transcription
  misc_feature: MA Experiment 20000286 PARAMETER Experiment Name: At_Open_Flower_P Parameter: Age (day) Value: 21
  misc_feature: MA Experiment 20000286 PARAMETER Experiment Name: At_Open_Flower_P Parameter: Plant Line Value: WS
  misc_feature: MA Experiment 20000286 PARAMETER Experiment Name: At_Open_Flower_P Parameter: Tissue Value: Half Open vs. Whole Plant
  misc_feature: MA Experiment ID: 20000436 Result: Down-regulated in Transcription
  misc_feature: MA Experiment 20000436 PARAMETER Experiment Name: At_Drought_P Parameter: Age (day) Value: 7
  misc_feature: MA Experiment 20000436 PARAMETER Experiment Name: At_Drought_P Parameter: Organism Value: A. thaliana
  misc_feature: MA Experiment 20000436 PARAMETER Experiment Name: At_Drought_P Parameter: Plant Line Value: WS
  misc_feature: MA Experiment 20000436 PARAMETER Experiment Name: At_Drought_P Parameter: Timepoint (hr) Value: 12
  misc_feature: MA Experiment 20000436 PARAMETER Experiment Name: At_Drought_P Parameter: Tissue Value: Whole Plant
  misc_feature: MA Experiment 20000436 PARAMETER Experiment Name: At_Drought_P Parameter: Treatment Value: Drought vs. No Drought
  misc_feature: MA Experiment ID: 20000437 Result: Down-regulated in Transcription
  misc_feature: MA Experiment 20000437 PARAMETER Experiment Name: At_Drought_P Parameter: Age (day) Value: 8
  misc_feature: MA Experiment 20000437 PARAMETER Experiment Name: At_Drought_P Parameter: Organism Value: A. thaliana
  misc_feature: MA Experiment 20000437 PARAMETER Experiment Name: At_Drought_P Parameter: Plant Line Value: WS
  misc_feature: MA Experiment 20000437 PARAMETER Experiment Name: At_Drought_P Parameter: Timepoint (hr) Value: 24
  misc_feature: MA Experiment 20000437 PARAMETER Experiment Name: At_Drought_P Parameter: Tissue Value: Whole Plant
  misc_feature: MA Experiment 20000437 PARAMETER Experiment Name: At_Drought_P Parameter: Treatment Value: Drought vs. No Drought
  misc_feature: MA Experiment ID: 20000438 Result: Up-regulated in Transcription
  misc_feature: MA Experiment 20000438 PARAMETER Experiment Name: At_Shoots__P Parameter: Age (day) Value: 14
  misc_feature: MA Experiment 20000438 PARAMETER Experiment Name: At_Shoots__P Parameter: Tissue Value: Shoots vs. Whole Plant
  misc_feature: MA Experiment ID: 20000439 Result: Down-regulated in Transcription
  misc_feature: MA Experiment 20000439 PARAMETER Experiment Name: At_Roots__P Parameter: Age (day) Value: 14 vs. 21
  misc_feature: MA Experiment 20000439 PARAMETER Experiment Name: At_Roots__P Parameter: Organism Value: A. thaliana
  misc_feature: MA Experiment 20000439 PARAMETER Experiment Name: At_Roots__P Parameter: Tissue Value: Roots vs. Whole Plant
  misc_feature: MA Experiment ID: 20000441 Result: Up-regulated in Transcription
  misc_feature: MA Experiment 20000441 PARAMETER Experiment Name: At_1uM_BR-BRZ__P Parameter: Tissue Value: Shoot Apices
  misc_feature: MA Experiment 20000441 PARAMETER Experiment Name: At_1uM_BR-BRZ__P Parameter: Treatment Value: 1uM BR vs. No Treatment
  misc_feature: MA Experiment ID: 20000443 Result: Up-regulated in Transcription
  misc_feature: MA Experiment 20000443 PARAMETER Experiment Name: At_1uM_BR-BRZ__P Parameter: Tissue Value: Shoot Apices
  misc_feature: MA Experiment 20000443 PARAMETER Experiment Name: At_1uM_BR-BRZ__P Parameter: Treatment Value: 1uM BRZ vs. No Treatment
  misc_feature: MA Experiment ID: 20000444 Result: Up-regulated in Transcription
  misc_feature: MA Experiment 20000444 PARAMETER Experiment Name: At_100uM_NAA__P Parameter: Age (day) Value: 14
  misc_feature: MA Experiment 20000444 PARAMETER Experiment Name: At_100uM_NAA__P Parameter: Organism Value: A. thaliana
  misc_feature: MA Experiment 20000444 PARAMETER Experiment Name: At_100uM_NAA__P Parameter: Plant Line Value: WS
  misc_feature: MA Experiment 20000444 PARAMETER Experiment Name: At_100uM_NAA__P Parameter: Timepoint (hr) Value: 1
  misc_feature: MA Experiment 20000444 PARAMETER Experiment Name: At_100uM_NAA__P Parameter: Tissue Value: Aerial
  misc_feature: MA Experiment 20000444 PARAMETER Experiment Name: At_100uM_NAA__P Parameter: Treatment Value: 100uM NAA vs. No Treatment
  misc_feature: MA Experiment ID: 20000445 Result: Up-regulated in Transcription
  misc_feature: MA Experiment 20000445 PARAMETER Experiment Name: At_100uM_NAA__P Parameter: Age (day) Value: 14
  misc_feature: MA Experiment 20000445 PARAMETER Experiment Name: At_100uM_NAA__P Parameter: Organism Value: A. thaliana
  misc_feature: MA Experiment 20000445 PARAMETER Experiment Name: At_100uM_NAA__P Parameter: Plant Line Value: WS
  misc_feature: MA Experiment 20000445 PARAMETER Experiment Name: At_100uM_NAA__P Parameter: Timepoint (hr) Value: 6
  misc_feature: MA Experiment 20000445 PARAMETER Experiment Name: At_100uM_NAA__P Parameter: Tissue Value: Aerial
  misc_feature: MA Experiment 20000445 PARAMETER Experiment Name: At_100uM_NAA__P Parameter: Treatment Value: 100uM NAA vs. No Treatment
  misc_feature: MA Experiment ID: 20000453 Result: Down-regulated in Transcription
  misc_feature: MA Experiment 20000453 PARAMETER Experiment Name: At_100uM_ABA_P Parameter: Age (day) Value: 15
  misc_feature: MA Experiment 20000453 PARAMETER Experiment Name: At_100uM_ABA_P Parameter: Organism Value: A. thaliana
  misc_feature: MA Experiment 20000453 PARAMETER Experiment Name: At_100uM_ABA_P Parameter: Plant Line Value: WS
  misc_feature: MA Experiment 20000453 PARAMETER Experiment Name: At_100uM_ABA_P Parameter: Timepoint (hr) Value: 24
  misc_feature: MA Experiment 20000453 PARAMETER Experiment Name: At_100uM_ABA_P Parameter: Tissue Value: Aerial
  misc_feature: MA Experiment 20000453 PARAMETER Experiment Name: At_100uM_ABA_P Parameter: Treatment Value: 100uM ABA vs. No Treatment
  misc_feature: MA Experiment ID: 20000527 Result: Down-regulated in Transcription
  misc_feature: MA Experiment 20000527 PARAMETER Experiment Name: At_10percent_PEG_P Parameter: Age (day) Value: 20
  misc_feature: MA Experiment 20000527 PARAMETER Experiment Name: At_10percent_PEG_P Parameter: Organism Value: A. thaliana
  misc_feature: MA Experiment 20000527 PARAMETER Experiment Name: At_10percent_PEG_P Parameter: Plant Line Value: WS
  misc_feature: MA Experiment 20000527 PARAMETER Experiment Name: At_10percent_PEG_P Parameter: Timepoint (day) Value: 20
  misc_feature: MA Experiment 20000527 PARAMETER Experiment Name: At_10percent_PEG_P Parameter: Tissue Value: Whole Plant
  misc_feature: MA Experiment 20000527 PARAMETER Experiment Name: At_10percent_PEG_P Parameter: Treatment Value: 10percent PEG vs. No Treatment
  misc_feature: MA Experiment ID: 20000575 Result: Up-regulated in Transcription
  misc_feature: MA Experiment 20000575 PARAMETER Experiment Name: At_100uM_ABA_Mutants__P Parameter: Organism Value: A. thaliana
  misc_feature: MA Experiment 20000575 PARAMETER Experiment Name: At_100uM_ABA_Mutants__P Parameter: Plant Line Value: CS22
  misc_feature: MA Experiment 20000575 PARAMETER Experiment Name: At_100uM_ABA_Mutants__P Parameter: Timepoint (hr) Value: 6
  misc_feature: MA Experiment 20000575 PARAMETER Experiment Name: At_100uM_ABA_Mutants__P Parameter: Tissue Value: Whole Plant
  misc_feature: MA Experiment 20000575 PARAMETER Experiment Name: At_100uM_ABA_Mutants__P Parameter: Treatment Value: 1uM ABA vs. No Treatment
  misc_feature: MA Experiment ID: 20000576 Result: Up-regulated in Transcription
  misc_feature: MA Experiment 20000576 PARAMETER Experiment Name: At_100uM_ABA_Mutants__P Parameter: Organism Value: A. thaliana
  misc_feature: MA Experiment 20000576 PARAMETER Experiment Name: At_100uM_ABA_Mutants__P Parameter: Plant Line Value: CS23
  misc_feature: MA Experiment 20000576 PARAMETER Experiment Name: At_100uM_ABA_Mutants__P Parameter: Timepoint (hr) Value: 6
  misc_feature: MA Experiment 20000576 PARAMETER Experiment Name: At_100uM_ABA_Mutants__P Parameter: Tissue Value: Whole Plant
  misc_feature: MA Experiment 20000576 PARAMETER Experiment Name: At_100uM_ABA_Mutants__P Parameter: Treatment Value: 1uM ABA vs. No Treatment
  misc_feature: MA Experiment ID: 20001247 Result: Up-regulated in Transcription
  misc_feature: MA Experiment 20001247 PARAMETER Experiment Name: At_Far-red-induction_P Parameter: Age (day) Value: 7
  misc_feature: MA Experiment 20001247 PARAMETER Experiment Name: At_Far-red-induction_P Parameter: Light Value: Far-red vs. White
  misc_feature: MA Experiment 20001247 PARAMETER Experiment Name: At_Far-red-induction_P Parameter: Organism Value: A. thaliana
  misc_feature: MA Experiment 20001247 PARAMETER Experiment Name: At_Far-red-induction_P Parameter: Plant Line Value: Columbia
  misc_feature: MA Experiment 20001247 PARAMETER Experiment Name: At_Far-red-induction_P Parameter: Timepoint (hr) Value: 1
  misc_feature: MA Experiment 20001247 PARAMETER Experiment Name: At_Far-red-induction_P Parameter: Tissue Value: Whole Plant
  misc_feature: MA Experiment ID: 20001248 Result: Up-regulated in Transcription
  misc_feature: MA Experiment 20001248 PARAMETER Experiment Name: At_Far-red-induction_P Parameter: Age (day) Value: 7
  misc_feature: MA Experiment 20001248 PARAMETER Experiment Name: At_Far-red-induction_P Parameter: Light Value: Far-red vs. White
  misc_feature: MA Experiment 20001248 PARAMETER Experiment Name: At_Far-red-induction_P Parameter: Organism Value: A. thaliana
  misc_feature: MA Experiment 20001248 PARAMETER Experiment Name: At_Far-red-induction_P Parameter: Plant Line Value: Columbia
  misc_feature: MA Experiment 20001248 PARAMETER Experiment Name: At_Far-red-induction_P Parameter: Timepoint (hr) Value: 4
  misc_feature: MA Experiment 20001248 PARAMETER Experiment Name: At_Far-red-induction_P Parameter: Tissue Value: Whole Plant
  misc_feature: MA Experiment ID: 20001450 Result: Up-regulated in Transcription
  misc_feature: MA Experiment 20001450 PARAMETER Experiment Name: At_Far-red-induction_P Parameter: Age (day) Value: 7
  misc_feature: MA Experiment 20001450 PARAMETER Experiment Name: At_Far-red-induction_P Parameter: Light Value: Far-red vs. White
  misc_feature: MA Experiment 20001450 PARAMETER Experiment Name: At_Far-red-induction_P Parameter: Organism Value: A. thaliana
  misc_feature: MA Experiment 20001450 PARAMETER Experiment Name: At_Far-red-induction_P Parameter: Plant Line Value: Columbia
  misc_feature: MA Experiment 20001450 PARAMETER Experiment Name: At_Far-red-induction_P Parameter: Timepoint (hr) Value: 8
  misc_feature: MA Experiment 20001450 PARAMETER Experiment Name: At_Far-red-induction_P Parameter: Tissue Value: Whole Plant
  misc_feature: MA Experiment ID: 20001554 Result: Down-regulated in Transcription
  misc_feature: MA Experiment 20001554 PARAMETER Experiment Name: At_Drought_Soil_Dry_P Parameter: Age (day) Value: 21
  misc_feature: MA Experiment 20001554 PARAMETER Experiment Name: At_Drought_Soil_Dry_P Parameter: Organism Value: A. thaliana
  misc_feature: MA Experiment 20001554 PARAMETER Experiment Name: At_Drought_Soil_Dry_P Parameter: Plant Line Value: WS
  misc_feature: MA Experiment 20001554 PARAMETER Experiment Name: At_Drought_Soil_Dry_P Parameter: Post Timepoint (hr) Value: None
  misc_feature: MA Experiment 20001554 PARAMETER Experiment Name: At_Drought_Soil_Dry_P Parameter: Post-Treatment Value: None
  misc_feature: MA Experiment 20001554 PARAMETER Experiment Name: At_Drought_Soil_Dry_P Parameter: Timepoint (day) Value: 7
  misc_feature: MA Experiment 20001554 PARAMETER Experiment Name: At_Drought_Soil_Dry_P Parameter: Treatment Value: Drought vs. No Drought
  misc_feature: MA Experiment ID: 20001555 Result: Down-regulated in Transcription
  misc_feature: MA Experiment 20001555 PARAMETER Experiment Name: At_Drought_Soil_Dry_P Parameter: Age (day) Value: 24
  misc_feature: MA Experiment 20001555 PARAMETER Experiment Name: At_Drought_Soil_Dry_P Parameter: Organism Value: A. thaliana
  misc_feature: MA Experiment 20001555 PARAMETER Experiment Name: At_Drought_Soil_Dry_P Parameter: Plant Line Value: WS
  misc_feature: MA Experiment 20001555 PARAMETER Experiment Name: At_Drought_Soil_Dry_P Parameter: Post Timepoint (hr) Value: None
  misc_feature: MA Experiment 20001555 PARAMETER Experiment Name: At_Drought_Soil_Dry_P Parameter: Post-Treatment Value: None
  misc_feature: MA Experiment 20001555 PARAMETER Experiment Name: At_Drought_Soil_Dry_P Parameter: Timepoint (day) Value: 10
  misc_feature: MA Experiment 20001555 PARAMETER Experiment Name: At_Drought_Soil_Dry_P Parameter: Treatment Value: Drought vs. No Drought
  misc_feature: MA Experiment ID: 20001556 Result: Down-regulated in Transcription
  misc_feature: MA Experiment 20001556 PARAMETER Experiment Name: At_Drought_Soil_Dry_P Parameter: Age (day) Value: 26
  misc_feature: MA Experiment 20001556 PARAMETER Experiment Name: At_Drought_Soil_Dry_P Parameter: Organism Value: A. thaliana
  misc_feature: MA Experiment 20001556 PARAMETER Experiment Name: At_Drought_Soil_Dry_P Parameter: Plant Line Value: WS
  misc_feature: MA Experiment 20001556 PARAMETER Experiment Name: At_Drought_Soil_Dry_P Parameter: Post Timepoint (hr) Value: None
  misc_feature: MA Experiment 20001556 PARAMETER Experiment Name: At_Drought_Soil_Dry_P Parameter: Post-Treatment Value: None
  misc_feature: MA Experiment 20001556 PARAMETER Experiment Name: At_Drought_Soil_Dry_P Parameter: Timepoint (day) Value: 12
  misc_feature: MA Experiment 20001556 PARAMETER Experiment Name: At_Drought_Soil_Dry_P Parameter: Treatment Value: Drought vs. No Drought
  misc_feature: MA Experiment ID: 20001768 Result: Up-regulated in Transcription
  misc_feature: MA Experiment 20001768 PARAMETER Experiment Name: At_Far-red-enriched-adult_P Parameter: Age (day) Value: 28
  misc_feature: MA Experiment 20001768 PARAMETER Experiment Name: At_Far-red-enriched-adult_P Parameter: Light Value: Far-red enriched vs. White
  misc_feature: MA Experiment 20001768 PARAMETER Experiment Name: At_Far-red-enriched-adult_P Parameter: Organism Value: A. thaliana
  misc_feature: MA Experiment 20001768 PARAMETER Experiment Name: At_Far-red-enriched-adult_P Parameter: Plant Line Value: Columbia
  misc_feature: MA Experiment 20001768 PARAMETER Experiment Name: At_Far-red-enriched-adult_P Parameter: Timepoint (hr) Value: 1
  misc_feature: MA Experiment 20001768 PARAMETER Experiment Name: At_Far-red-enriched-adult_P Parameter: Tissue Value: Aerial
  misc_feature: MA Experiment ID: 20001769 Result: Up-regulated in Transcription
  misc_feature: MA Experiment 20001769 PARAMETER Experiment Name: At_Far-red-enriched-adult_P Parameter: Age (day) Value: 28
  misc_feature: MA Experiment 20001769 PARAMETER Experiment Name: At_Far-red-enriched-adult_P Parameter: Light Value: Far-red enriched vs. White
  misc_feature: MA Experiment 20001769 PARAMETER Experiment Name: At_Far-red-enriched-adult_P Parameter: Organism Value: A. thaliana
  misc_feature: MA Experiment 20001769 PARAMETER Experiment Name: At_Far-red-enriched-adult_P Parameter: Plant Line Value: Columbia
  misc_feature: MA Experiment 20001769 PARAMETER Experiment Name: At_Far-red-enriched-adult_P Parameter: Timepoint (hr) Value: 4
  misc_feature: MA Experiment 20001769 PARAMETER Experiment Name: At_Far-red-enriched-adult_P Parameter: Tissue Value: Aerial
  misc_feature: MA Experiment ID: 20001770 Result: Up-regulated in Transcription
  misc_feature: MA Experiment 20001770 PARAMETER Experiment Name: At_Far-red-enriched-adult_P Parameter: Age (day) Value: 28
  misc_feature: MA Experiment 20001770 PARAMETER Experiment Name: At_Far-red-enriched-adult_P Parameter: Light Value: Far-red enriched vs. White
  misc_feature: MA Experiment 20001770 PARAMETER Experiment Name: At_Far-red-enriched-adult_P Parameter: Organism Value: A. thaliana
  misc_feature: MA Experiment 20001770 PARAMETER Experiment Name: At_Far-red-enriched-adult_P Parameter: Plant Line Value: Columbia
  misc_feature: MA Experiment 20001770 PARAMETER Experiment Name: At_Far-red-enriched-adult_P Parameter: Timepoint (hr) Value: 8
  misc_feature: MA Experiment 20001770 PARAMETER Experiment Name: At_Far-red-enriched-adult_P Parameter: Tissue Value: Aerial
  misc_feature: MA Experiment ID: 20001904 Result: Down-regulated in Transcription
  misc_feature: MA Experiment 20001904 PARAMETER Experiment Name: At_Drought_Reproduction_P Parameter: Age (day) Value: 37
  misc_feature: MA Experiment 20001904 PARAMETER Experiment Name: At_Drought_Reproduction_P Parameter: Organism Value: A. thaliana
  misc_feature: MA Experiment 20001904 PARAMETER Experiment Name: At_Drought_Reproduction_P Parameter: Plant Line Value: WS
  misc_feature: MA Experiment 20001904 PARAMETER Experiment Name: At_Drought_Reproduction_P Parameter: Timepoint (day) Value: 7
  misc_feature: MA Experiment 20001904 PARAMETER Experiment Name: At_Drought_Reproduction_P Parameter: Tissue Value: Rosettes
  misc_feature: MA Experiment 20001904 PARAMETER Experiment Name: At_Drought_Reproduction_P Parameter: Treatment Value: Drought vs. No Drought
atggttaaaccctgttggagaataggtgccggtatggagagaagtaagatcaatcccacaaaggttgatggtttgacatggtacaaagatcttggtcttcacacctttggagagttttccatggcaatgatccaagccaacagtgtgatggaggatcagtgccagatcgaatcagggccgcttacattcaacaatccgacagttcaaggcacatttgttggagtttacgatggccatggaggtccagaggcttccagattcattgcagacaacatcttccccaaggagatttcagagcaggtgatcagcaaagcatttgccgagacagacaaagattttctcaagacagtgacgaagcaatggcctacgaacccacagatggcatcagtggggtcatgttgcttggcaggagtgatatgcaacggattggtgtatattgcaaacacgggagattccagagctgtgttgggcagatctgagagaggtggagtgagagctgttcagttatctgtagagcacaatgccaatcttgagtctgcgaggcaagagctatggtcattgcatcctaatgaccccaccattcttgtgatgaagcaccgcttgtggcgtgtgaaaggcgttatccaggtcacaagatccataggtgatgcatacctcaaaagagcagagttcaacagagaacctttgctgcccaaattcagactaccagaacatttcactaagccaatccttagtgcggatccatcagtcaccattacgcggcttagcccacaagatgagtttataattcttgcttcagatgggctttgggagcatcttagcaaccaggaagctgttgatattgtgcataattcccctcgacaaggaatagcaaggagactacttaaagctgcattgaaggaagcagcaaagaaaagagagatgagatactcagacctaacagagatccatcctggtgtaagaaggcatttccacgacgatataaccgttattgtggtctatctcaacccccacccggtcaaaaccaattcttgggcttcacctctgtcaattagagggggatacccgatgcattcaacatcatga

SEQ ID NO: 70803 - protein, 361 aa, Arabidopsis thaliana
  peptide (1)..(361): Ceres Seq. ID no. 2998207
  misc_feature (36)..(314): Pfam Name: Protein phosphatase 2C Pfam Description: Protein phosphatase 2C
  misc_feature (1)..(361): Homolog of NCBI NO: 11282005 NR Description: protein phosphatase-like protein - Arabidopsis
  misc_feature (1)..(361): Homolog of NCBI NO: 30679755 NR Description: protein phosphatase - like protein [Arabidopsis
  misc_feature (1)..(354): Homolog of NCBI NO: 9294356 NR Description: protein phosphatase 2C [Arabidopsis thaliana]
  misc_feature (1)..(354): Homolog of NCBI NO: 15230540 NR Description: protein phosphatase 2C, putative; protein id: [Arabidopsis thaliana] >gi|12321955|gb|AAG51012.1|AC069474_11
  misc_feature (1)..(354): Homolog of NCBI NO: 30694180 NR Description: protein phosphatase 2C - like protein thaliana] >gi|15020818|emb|CAC44619.1| Ser/Thr protein
  misc_feature (1)..(354): Homolog of NCBI NO: 18855039 NR Description: putative protein phosphatase [Oryza sativa]
  misc_feature (21)..(354): Homolog of NCBI NO: 11282002 NR Description: protein phosphatase 2C-like protein - Arabidopsis
  misc_feature (1)..(354): Homolog of NCBI NO: 11282001 NR Description: protein phosphatase 2C-like protein - Arabidopsis
  misc_feature (2)..(354): Homolog of NCBI NO: 11282004 NR Description: protein phosphatase 2C homolog [imported] - ice plant >gi|4206122|gb|AAD11430.1| protein phosphatase 2C
  misc_feature (23)..(354): Homolog of NCBI NO: 7768153 NR Description: protein phosphatase 2C (PP2C) [Fagus sylvatica]
MVKPCWRIGAGMERSKINPTKVDGLTWYKDLGLHTFGEFSMAMIQANSVMEDQCQIESGPLTFNNPTVQGTFVGVYDGHGGPEASRFIADNIFPKEISEQVISKAFAETDKDFLKTVTKQWPTNPQMASVGSCCLAGVICNGLVYIANTGDSRAVLGRSERGGVRAVQLSVEHNANLESARQELWSLHPNDPTILVMKHRLWRVKGVIQVTRSIGDAYLKRAEFNREPLLPKFRLPEHFTKPILSADPSVTITRLSPQDEFIILASDGLWEHLSNQEAVDIVHNSPRQGIARRLLKAALKEAAKKREMRYSDLTEIHPGVRRHFHDDITVIVVYLNPHPVKTNSWASPLSIRGGYPMHSTS

SEQ ID NO: 70804 - protein, 350 aa, Arabidopsis thaliana
  peptide (1)..(350): Ceres Seq. ID no. 2998208
  misc_feature (25)..(303): Pfam Name: Protein phosphatase 2C Pfam Description: Protein phosphatase 2C
  misc_feature (1)..(350): Homolog of NCBI NO: 11282005 NR Description: protein phosphatase-like protein - Arabidopsis
  misc_feature (1)..(350): Homolog of NCBI NO: 30679755 NR Description: protein phosphatase - like protein [Arabidopsis
  misc_feature (1)..(343): Homolog of NCBI NO: 9294356 NR Description: protein phosphatase 2C [Arabidopsis thaliana]
  misc_feature (1)..(343): Homolog of NCBI NO: 15230540 NR Description: protein phosphatase 2C, putative; protein id: [Arabidopsis thaliana] >gi|12321955|gb|AAG51012.1|AC069474_11
  misc_feature (1)..(343): Homolog of NCBI NO: 30694180 NR Description: protein phosphatase 2C - like protein thaliana] >gi|15020818|emb|CAC44619.1| Ser/Thr protein
  misc_feature (1)..(343): Homolog of NCBI NO: 18855039 NR Description: putative protein phosphatase [Oryza sativa]
  misc_feature (10)..(343): Homolog of NCBI NO: 11282002 NR Description: protein phosphatase 2C-like protein - Arabidopsis
  misc_feature (1)..(343): Homolog of NCBI NO: 11282001 NR Description: protein phosphatase 2C-like protein - Arabidopsis
  misc_feature (1)..(343): Homolog of NCBI NO: 11282004 NR Description: protein phosphatase 2C homolog [imported] - ice plant >gi|4206122|gb|AAD11430.1| protein phosphatase 2C
  misc_feature (12)..(343): Homolog of NCBI NO: 7768153 NR Description: protein phosphatase 2C (PP2C) [Fagus sylvatica]
MERSKINPTKVDGLTWYKDLGLHTFGEFSMAMIQANSVMEDQCQIESGPLTFNNPTVQGTFVGVYDGHGGPEASRFIADNIFPKEISEQVISKAFAETDKDFLKTVTKQWPTNPQMASVGSCCLAGVICNGLVYIANTGDSRAVLGRSERGGVRAVQLSVEHNANLESARQELWSLHPNDPTILVMKHRLWRVKGVIQVTRSIGDAYLKRAEFNREPLLPKFRLPEHFTKPILSADPSVTITRLSPQDEFIILASDGLWEHLSNQEAVDIVHNSPRQGIARRLLKAALKEAAKKREMRYSDLTEIHPGVRRHFHDDITVIVVYLNPHPVKTNSWASPLSIRGGYPMHSTS

SEQ ID NO: 70805 - protein, 321 aa, Arabidopsis thaliana
  peptide (1)..(321): Ceres Seq. ID no. 2998209
  misc_feature (1)..(274): Pfam Name: Protein phosphatase 2C Pfam Description: Protein phosphatase 2C
  misc_feature (1)..(321): Homolog of NCBI NO: 11282005 NR Description: protein phosphatase-like protein - Arabidopsis
  misc_feature (1)..(321): Homolog of NCBI NO: 30679755 NR Description: protein phosphatase - like protein [Arabidopsis
  misc_feature (1)..(314): Homolog of NCBI NO: 9294356 NR Description: protein phosphatase 2C [Arabidopsis thaliana]
  misc_feature (1)..(314): Homolog of NCBI NO: 15230540 NR Description: protein phosphatase 2C, putative; protein id: [Arabidopsis thaliana] >gi|12321955|gb|AAG51012.1|AC069474_11
  misc_feature (1)..(314): Homolog of NCBI NO: 30694180 NR Description: protein phosphatase 2C - like protein thaliana] >gi|15020818|emb|CAC44619.1| Ser/Thr protein
  misc_feature (1)..(314): Homolog of NCBI NO: 18855039 NR Description: putative protein phosphatase [Oryza sativa]
  misc_feature (1)..(314): Homolog of NCBI NO: 11282002 NR Description: protein phosphatase 2C-like protein - Arabidopsis
  misc_feature (1)..(314): Homolog of NCBI NO: 11282001 NR Description: protein phosphatase 2C-like protein - Arabidopsis
  misc_feature (1)..(314): Homolog of NCBI NO: 11282004 NR Description: protein phosphatase 2C homolog [imported] - ice plant >gi|4206122|gb|AAD11430.1| protein phosphatase 2C
  misc_feature (1)..(314): Homolog of NCBI NO: 7768153 NR Description: protein phosphatase 2C (PP2C) [Fagus sylvatica]
MAMIQANSVMEDQCQIESGPLTFNNPTVQGTFVGVYDGHGGPEASRFIADNIFPKEISEQVISKAFAETDKDFLKTVTKQWPTNPQMASVGSCCLAGVICNGLVYIANTGDSRAVLGRSERGGVRAVQLSVEHNANLESARQELWSLHPNDPTILVMKHRLWRVKGVIQVTRSIGDAYLKRAEFNREPLLPKFRLPEHFTKPILSADPSVTITRLSPQDEFIILASDGLWEHLSNQEAVDIVHNSPRQGIARRLLKAALKEAAKKREMRYSDLTEIHPGVRRHFHDDITVIVVYLNPHPVKTNSWASPLSIRGGYPMHSTS

SEQ ID NO: 70806 - DNA, 2739 bp, Arabidopsis thaliana
  misc_feature (1)..(2739): Ceres Seq. ID no. 2998305
atggatgatttcaatcttcgtagcgaaaaccctaattcatcatccaccacttcctcatcctcttcctctttccaccgtcacaagagcgaaaccggaaacacaaaacggtcaaggtcaacgtccacgttatcgacggaccctcagagcgtggcggctcgcgacagacggcaccgaattagcgaccgtttcaagattttacaaagcatggtccctggtggtgcgaagatggacactgtatctatgcttgacgaagccattagctacgtcaagttcttgaaggctcagatctggtatcaccaaaacatgcttctcttcataaacgaccacgaaactacatcatcttgtacttactctcccggcgctggagaatttggaccgaaactctttggttatgatgacgattatgcccctataatggacacatattcacaaggcgtgccacttacggttgcggactcgaagtatacgccgtggtttggttcggttgatgatgagcaagaacacgtcacgtatttcaaatacaggcgtgccacacgacacgcattacgagggcactgcaattgtataatcggagaaacagaggaattcgccgatcaacgagagaagatggaagtgcaaattgaagaatctggtaaaaatcaaacctctccggaatcaattgaagcagacaaagcgaagcagatagtggtgcttctgattggtccaccaggaagcggcaaatcgacgttttgtgacaccgcaatgcgttcctctcaccgcccttggtctcgtatctgccaggacattgttaacaatggcaaagctggaacaaaggctcagtgtttaaagatggctacagattctcttagggaaggcaagagcgtctttatagacagatgcaatcttgacagggagcaacgttcagagtttattaagcttggtggtcctgagttcgaagttcatgcagtggttctggagcttcctgctcaggtttgtatatctagatcagttaaaagaactggtcatgaaggaaatctacaaggtggaagagctgcagctgttgtgaataagatgcttcagagtaaggaacttcccaaagtgaatgaagggttttctcggattatgttttgttacagtgacgctgatgttgataatgctgttaacatgtataacaagcttggtccaatggatacccttccttctggctgttttggcgaaaaaaaattagatactaaaagccaacccggtataatgaagttctttaagaaagtcagtgctctgcctgcttcatcttctaatgaagctactaacacaactcggaaagctgatgaaatgacagcaaatgtccgagtttcgccagtcaagcttggttctgctgatattgtacctacactggcattcccatcaatttcgactgcggattttcagtttgatcttgaaaaggcttctgatatcattgtggagaaagcagaggagttcttgtctaaacttgggactgcgcgtctcgtcttggtggacttgagccgcgggtcaaagattctatctctggtcaaggctaaggcttctcagaagaacattgattcagcgaaattcttcacatttgttggggacataactaagcttcgttctgaaggtggtctacactgtaatgtcatagctaatgctactaactggcggcttaaacctggaggtggaggtgtgaatgcagcaatattcaaagctgctggtccagatcttgagactgcgacaagagtacgagcaaacactcttcttcctggaaaagccgtggtagttcctcttccttctacttgtccattacacaatgcagaaggaattacacatgtcatacatgttctaggaccaaacatgaacccaaaccgaccagacaaccttaacaacgactacaccaaggggtgcaaaactctccgggaagcttacacatctctatttgaaggttttctatcagtagtacaggatcaatcgaagttgcccaaacgaagcagtcaaacagctgtgtcagattctggtgaggatattaaggaagactctgagagaaacaaaaagtacaaaggatcacaagataaggccgtaactaataatttggaatcagagtctctggaggacacaagaggcagtggaaagaagatgagtaaaggatggaacacatgggcattggctctccacagcatcgcgatgcacccagagagacacgagaatgtcgtgcttgaatatttagacaacatcgttgtcataaacgaccagtacccaaaggcgcggaaacacgtgctagtactggcgagacaggagagtctagatgggctagaagatgttcgcaaagagaatcttcaacttctgcaggaaatgcacaatgttggtctgaaatgggttgatagattccagaacgaggatgcatctcttatcttccgccttggatatcactcggttccctcgatgcgacaactacacttacacgttataagccaagactttaattcagatagtttgaagaacaagaaacactggaactctttcacgacctcgttcttccgtgactcagttgatgtacttgaagaggtcaacagccaaggcaaggccaatgtggcgagcgaagatctgttgaaaggtgagctgcgttgcaatcggtgtagaagcgcacacccaaatattccaaaacttaaatcacatgtcagaagctgccattctcaatttccagaccatttactccaaaacaatcgccttgtggctagagcagagacgtag

SEQ ID NO: 70807 - protein, 912 aa, Arabidopsis thaliana
  peptide (1)..(912): Ceres Seq. ID no. 2998306
  misc_feature (546)..(643): Pfam Name: Appr-1"-p processing enzyme family Pfam Description: Appr-1"-p processing enzyme family
  misc_feature (648)..(890): Homolog of NCBI NO: 32527968 NR Description: FHA-HIT [Gallus gallus]
  misc_feature (655)..(890): Homolog of NCBI NO: 32394382 NR Description: forkhead-associated domain histidine-triad like
  misc_feature (675)..(895): Homolog of NCBI NO: 32527946 NR Description: FHA-HIT isoform [Homo sapiens]
  misc_feature (616)..(897): Homolog of NCBI NO: 32527972 NR Description: FHA-HIT short isoform [Takifugu rubripes]
  misc_feature (659)..(895): Homolog of NCBI NO: 32527940 NR Description: FHA-HIT isoform [Homo sapiens]
  misc_feature (700)..(890): Homolog of NCBI NO: 26342519 NR Description: unnamed protein product [Mus musculus]
  misc_feature (700)..(890): Homolog of NCBI NO: 26369552 NR Description: unnamed protein product [Mus musculus]
  misc_feature (700)..(890): Homolog of NCBI NO: 32526865 NR Description: aprataxin; forkhead-associated domain like [Mus musculus] >gi|26346224|dbj|BAC36763.1| unnamed protein
  misc_feature (707)..(895): Homolog of NCBI NO: 28329433 NR Description: aprataxin isoform c [Homo sapiens]
  misc_feature (707)..(895): Homolog of NCBI NO: 28329436 NR Description: aprataxin isoform a [Homo sapiens]
MDDFNLRSENPNSSSTTSSSSSSFHRHKSETGNTKRSRSTSTLSTDPQSVAARDRRHRISDRFKILQSMVPGGAKMDTVSMLDEAISYVKFLKAQIWYHQNMLLFINDHETTSSCTYSPGAGEFGPKLFGYDDDYAPIMDTYSQGVPLTVADSKYTPWFGSVDDEQEHVTYFKYRRATRHALRGHCNCIIGETEEFADQREKMEVQIEESGKNQTSPESIEADKAKQIVVLLIGPPGSGKSTFCDTAMRSSHRPWSRICQDIVNNGKAGTKAQCLKMATDSLREGKSVFIDRCNLDREQRSEFIKLGGPEFEVHAVVLELPAQVCISRSVKRTGHEGNLQGGRAAAVVNKMLQSKELPKVNEGFSRIMFCYSDADVDNAVNMYNKLGPMDTLPSGCFGEKKLDTKSQPGIMKFFKKVSALPASSSNEATNTTRKADEMTANVRVSPVKLGSADIVPTLAFPSISTADFQFDLEKASDIIVEKAEEFLSKLGTARLVLVDLSRGSKILSLVKAKASQKNIDSAKFFTFVGDITKLRSEGGLHCNVIANATNWRLKPGGGGVNAAIFKAAGPDLETATRVRANTLLPGKAVVVPLPSTCPLHNAEGITHVIHVLGPNMNPNRPDNLNNDYTKGCKTLREAYTSLFEGFLSVVQDQSKLPKRSSQTAVSDSGEDIKEDSERNKKYKGSQDKAVTNNLESESLEDTRGSGKKMSKGWNTWALALHSIAMHPERHENVVLEYLDNIVVINDQYPKARKHVLVLARQESLDGLEDVRKENLQLLQEMHNVGLKWVDRFQNEDASLIFRLGYHSVPSMRQLHLHVISQDFNSDSLKNKKHWNSFTTSFFRDSVDVLEEVNSQGKANVASEDLLKGELRCNRCRSAHPNIPKLKSHVRSCHSQFPDHLLQNNRLVARAET

SEQ ID NO: 70808 - protein, 844 aa, Arabidopsis thaliana
  peptide (1)..(844): Ceres Seq. ID no. 2998307
  misc_feature (478)..(575): Pfam Name: Appr-1"-p processing enzyme family Pfam Description: Appr-1"-p processing enzyme family
  misc_feature (580)..(822): Homolog of NCBI NO: 32527968 NR Description: FHA-HIT [Gallus gallus]
  misc_feature (587)..(822): Homolog of NCBI NO: 32394382 NR Description: forkhead-associated domain histidine-triad like
  misc_feature (607)..(827): Homolog of NCBI NO: 32527946 NR Description: FHA-HIT isoform [Homo sapiens]
  misc_feature (548)..(829): Homolog of NCBI NO: 32527972 NR Description: FHA-HIT short isoform [Takifugu rubripes]
  misc_feature (591)..(827): Homolog of NCBI NO: 32527940 NR Description: FHA-HIT isoform [Homo sapiens]
  misc_feature (632)..(822): Homolog of NCBI NO: 26342519 NR Description: unnamed protein product [Mus musculus]
  misc_feature (632)..(822): Homolog of NCBI NO: 26369552 NR Description: unnamed protein product [Mus musculus]
  misc_feature (632)..(822): Homolog of NCBI NO: 32526865 NR Description: aprataxin; forkhead-associated domain like [Mus musculus] >gi|26346224|dbj|BAC36763.1| unnamed protein
  misc_feature (639)..(827): Homolog of NCBI NO: 28329433 NR Description: aprataxin isoform c [Homo sapiens]
  misc_feature (639)..(827): Homolog of NCBI NO: 28329436 NR Description: aprataxin isoform a [Homo sapiens]
MVPGGAKMDTVSMLDEAISYVKFLKAQIWYHQNMLLFINDHETTSSCTYSPGAGEFGPKLFGYDDDYAPIMDTYSQGVPLTVADSKYTPWFGSVDDEQEHVTYFKYRRATRHALRGHCNCIIGETEEFADQREKMEVQIEESGKNQTSPESIEADKAKQIVVLLIGPPGSGKSTFCDTAMRSSHRPWSRICQDIVNNGKAGTKAQCLKMATDSLREGKSVFIDRCNLDREQRSEFIKLGGPEFEVHAVVLELPAQVCISRSVKRTGHEGNLQGGRAAAVVNKMLQSKELPKVNEGFSRIMFCYSDADVDNAVNMYNKLGPMDTLPSGCFGEKKLDTKSQPGIMKFFKKVSALPASSSNEATNTTRKADEMTANVRVSPVKLGSADIVPTLAFPSISTADFQFDLEKASDIIVEKAEEFLSKLGTARLVLVDLSRGSKILSLVKAKASQKNIDSAKFFTFVGDITKLRSEGGLHCNVIANATNWRLKPGGGGVNAAIFKAAGPDLETATRVRANTLLPGKAVVVPLPSTCPLHNAEGITHVIHVLGPNMNPNRPDNLNNDYTKGCKTLREAYTSLFEGFLSVVQDQSKLPKRSSQTAVSDSGEDIKEDSERNKKYKGSQDKAVTNNLESESLEDTRGSGKKMSKGWNTWALALHSIAMHPERHENVVLEYLDNIVVINDQYPKARKHVLVLARQESLDGLEDVRKENLQLLQEMHNVGLKWVDRFQNEDASLIFRLGYHSVPSMRQLHLHVISQDFNSDSLKNKKHWNSFTTSFFRDSVDVLEEVNSQGKANVASEDLLKGELRCNRCRSAHPNIPKLKSHVRSCHSQFPDHLLQNNRLVARAET

SEQ ID NO: 70809 - protein, 837 aa, Arabidopsis thaliana
  peptide (1)..(837): Ceres Seq. ID no. 2998308
  misc_feature (471)..(568): Pfam Name: Appr-1"-p processing enzyme family Pfam Description: Appr-1"-p processing enzyme family
  misc_feature (573)..(815): Homolog of NCBI NO: 32527968 NR Description: FHA-HIT [Gallus gallus]
  misc_feature (580)..(815): Homolog of NCBI NO: 32394382 NR Description: forkhead-associated domain histidine-triad like
  misc_feature (600)..(820): Homolog of NCBI NO: 32527946 NR Description: FHA-HIT isoform [Homo sapiens]
  misc_feature (541)..(822): Homolog of NCBI NO: 32527972 NR Description: FHA-HIT short isoform [Takifugu rubripes]
  misc_feature (584)..(820): Homolog of NCBI NO: 32527940 NR Description: FHA-HIT isoform [Homo sapiens]
  misc_feature (625)..(815): Homolog of NCBI NO: 26342519 NR Description: unnamed protein product [Mus musculus]
  misc_feature (625)..(815): Homolog of NCBI NO: 26369552 NR Description: unnamed protein product [Mus musculus]
  misc_feature (625)..(815): Homolog of NCBI NO: 32526865 NR Description: aprataxin; forkhead-associated domain like [Mus musculus] >gi|26346224|dbj|BAC36763.1| unnamed protein
  misc_feature (632)..(820): Homolog of NCBI NO: 28329433 NR Description: aprataxin isoform c [Homo sapiens]
  misc_feature (632)..(820): Homolog of NCBI NO: 28329436 NR Description: aprataxin isoform a [Homo sapiens]
MDTVSMLDEAISYVKFLKAQIWYHQNMLLFINDHETTSSCTYSPGAGEFGPKLFGYDDDYAPIMDTYSQGVPLTVADSKYTPWFGSVDDEQEHVTYFKYRRATRHALRGHCNCIIGETEEFADQREKMEVQIEESGKNQTSPESIEADKAKQIVVLLIGPPGSGKSTFCDTAMRSSHRPWSRICQDIVNNGKAGTKAQCLKMATDSLREGKSVFIDRCNLDREQRSEFIKLGGPEFEVHAVVLELPAQVCISRSVKRTGHEGNLQGGRAAAVVNKMLQSKELPKVNEGFSRIMFCYSDADVDNAVNMYNKLGPMDTLPSGCFGEKKLDTKSQPGIMKFFKKVSALPASSSNEATNTTRKADEMTANVRVSPVKLGSADIVPTLAFPSISTADFQFDLEKASDIIVEKAEEFLSKLGTARLVLVDLSRGSKILSLVKAKASQKNIDSAKFFTFVGDITKLRSEGGLHCNVIANATNWRLKPGGGGVNAAIFKAAGPDLETATRVRANTLLPGKAVVVPLPSTCPLHNAEGITHVIHVLGPNMNPNRPDNLNNDYTKGCKTLREAYTSLFEGFLSVVQDQSKLPKRSSQTAVSDSGEDIKEDSERNKKYKGSQDKAVTNNLESESLEDTRGSGKKMSKGWNTWALALHSIAMHPERHENVVLEYLDNIVVINDQYPKARKHVLVLARQESLDGLEDVRKENLQLLQEMHNVGLKWVDRFQNEDASLIFRLGYHSVPSMRQLHLHVISQDFNSDSLKNKKHWNSFTTSFFRDSVDVLEEVNSQGKANVASEDLLKGELRCNRCRSAHPNIPKLKSHVRSCHSQFPDHLLQNNRLVARAET

SEQ ID NO: 70810 - DNA, 804 bp, Arabidopsis thaliana
  misc_feature (1)..(804): Ceres Seq. ID no. 2998560
  misc_feature: MA Experiment ID: 20000169 Result: Down-regulated in Transcription
  misc_feature: MA Experiment 20000169 PARAMETER Experiment Name: At_100uM_ABA_P Parameter: Age (day) Value: 14
  misc_feature: MA Experiment 20000169 PARAMETER Experiment Name: At_100uM_ABA_P Parameter: Organism Value: A. thaliana
  misc_feature: MA Experiment 20000169 PARAMETER Experiment Name: At_100uM_ABA_P Parameter: Plant Line Value: WS
  misc_feature: MA Experiment 20000169 PARAMETER Experiment Name: At_100uM_ABA_P Parameter: Timepoint (hr) Value: 6
  misc_feature: MA Experiment 20000169 PARAMETER Experiment Name: At_100uM_ABA_P Parameter: Tissue Value: Aerial
  misc_feature: MA Experiment 20000169 PARAMETER Experiment Name: At_100uM_ABA_P Parameter: Treatment Value: 100uM ABA vs. No Treatment
  misc_feature: MA Experiment ID: 20000171 Result: Down-regulated in Transcription
  misc_feature: MA Experiment 20000171 PARAMETER Experiment Name: At_42deg_Heat_P Parameter: Age (day) Value: 14
  misc_feature: MA Experiment 20000171 PARAMETER Experiment Name: At_42deg_Heat_P Parameter: Organism Value: A. thaliana
  misc_feature: MA Experiment 20000171 PARAMETER Experiment Name: At_42deg_Heat_P Parameter: Plant Line Value: WS
  misc_feature: MA Experiment 20000171 PARAMETER Experiment Name: At_42deg_Heat_P Parameter: Temperature (deg C) Value: 42 vs. 22
  misc_feature: MA Experiment 20000171 PARAMETER Experiment Name: At_42deg_Heat_P Parameter: Timepoint (hr) Value: 1
  misc_feature: MA Experiment 20000171 PARAMETER Experiment Name: At_42deg_Heat_P Parameter: Tissue Value: Aerial
  misc_feature: MA Experiment ID: 20000173 Result: Down-regulated in Transcription
  misc_feature: MA Experiment 20000173 PARAMETER Experiment Name: At_42deg_Heat_P Parameter: Age (day) Value: 14
  misc_feature: MA Experiment 20000173 PARAMETER Experiment Name: At_42deg_Heat_P Parameter: Organism Value: A. thaliana
  misc_feature: MA Experiment 20000173 PARAMETER Experiment Name: At_42deg_Heat_P Parameter: Plant Line Value: WS
  misc_feature: MA Experiment 20000173 PARAMETER Experiment Name: At_42deg_Heat_P Parameter: Temperature (deg C) Value: 42 vs. 22
  misc_feature: MA Experiment 20000173 PARAMETER Experiment Name: At_42deg_Heat_P Parameter: Timepoint (hr) Value: 6
  misc_feature: MA Experiment 20000173 PARAMETER Experiment Name: At_42deg_Heat_P Parameter: Tissue Value: Aerial
  misc_feature: MA Experiment ID: 20000182 Result: Down-regulated in Transcription
  misc_feature: MA Experiment 20000182 PARAMETER Experiment Name: At_2mM_SA_P Parameter: Age (day) Value: 14
  misc_feature: MA Experiment 20000182 PARAMETER Experiment Name: At_2mM_SA_P Parameter: Organism Value: A. thaliana
  misc_feature: MA Experiment 20000182 PARAMETER Experiment Name: At_2mM_SA_P Parameter: Plant Line Value: WS
  misc_feature: MA Experiment 20000182 PARAMETER Experiment Name: At_2mM_SA_P Parameter: Timepoint (hr) Value: 6
  misc_feature: MA Experiment 20000182 PARAMETER Experiment Name: At_2mM_SA_P Parameter: Tissue Value: Aerial
  misc_feature: MA Experiment 20000182 PARAMETER Experiment Name: At_2mM_SA_P Parameter: Treatment Value: 2mM SA vs. No Treatment
  misc_feature: MA Experiment ID: 20000184 Result: Up-regulated in Transcription
  misc_feature: MA Experiment 20000184 PARAMETER Experiment Name: At_Shoots__P Parameter: Age (day) Value: 7
  misc_feature: MA Experiment 20000184 PARAMETER Experiment Name: At_Shoots__P Parameter: Tissue Value: Shoots vs. Whole Plant
  misc_feature: MA Experiment ID: 20000185 Result: Up-regulated in Transcription
  misc_feature: MA Experiment 20000185 PARAMETER Experiment Name: At_Roots__P Parameter: Age (day) Value: 7 vs. 21
  misc_feature: MA Experiment 20000185 PARAMETER Experiment Name: At_Roots__P Parameter: Organism Value: A. thaliana
  misc_feature: MA Experiment 20000185 PARAMETER Experiment Name: At_Roots__P Parameter: Tissue Value: Roots vs. Whole Plant
  misc_feature: MA Experiment ID: 20000235 Result: Down-regulated in Transcription
  misc_feature: MA Experiment 20000235 PARAMETER Experiment Name: At_Siliques_P Parameter: Age (day) Value: 21
  misc_feature: MA Experiment 20000235 PARAMETER Experiment Name: At_Siliques_P Parameter: Organism Value: A. thaliana
  misc_feature: MA Experiment 20000235 PARAMETER Experiment Name: At_Siliques_P Parameter: Plant Line Value: WS
  misc_feature: MA Experiment 20000235 PARAMETER Experiment Name: At_Siliques_P Parameter: Tissue Value: 5-10mm Siliques vs. Whole Plant
  misc_feature: MA Experiment ID: 20000268 Result: Down-regulated in Transcription
  misc_feature: MA Experiment 20000268 PARAMETER Experiment Name: At_100mM_NaCl__P Parameter: Age (day) Value: 14
  misc_feature: MA Experiment 20000268 PARAMETER Experiment Name: At_100mM_NaCl__P Parameter: Organism Value: A. thaliana
  misc_feature: MA Experiment 20000268 PARAMETER Experiment Name: At_100mM_NaCl__P Parameter: Plant Line Value: WS
  misc_feature: MA Experiment 20000268 PARAMETER Experiment Name: At_100mM_NaCl__P Parameter: Timepoint (hr) Value: 6
  misc_feature: MA Experiment 20000268 PARAMETER Experiment Name: At_100mM_NaCl__P Parameter: Tissue Value: Whole Plant
  misc_feature: MA Experiment 20000268 PARAMETER Experiment Name: At_100mM_NaCl__P Parameter: Treatment Value: 100mM NaCl vs. No Treatment
  misc_feature: MA Experiment ID: 20000436 Result: Down-regulated in Transcription
  misc_feature: MA Experiment 20000436 PARAMETER Experiment Name: At_Drought_P Parameter: Age (day) Value: 7
  misc_feature: MA Experiment 20000436 PARAMETER Experiment Name: At_Drought_P Parameter: Organism Value: A. thaliana
  misc_feature: MA Experiment 20000436 PARAMETER Experiment Name: At_Drought_P Parameter: Plant Line Value: WS
  misc_feature: MA Experiment 20000436 PARAMETER Experiment Name: At_Drought_P Parameter: Timepoint (hr) Value: 12
  misc_feature: MA Experiment 20000436 PARAMETER Experiment Name: At_Drought_P Parameter: Tissue Value: Whole Plant
  misc_feature: MA Experiment 20000436 PARAMETER Experiment Name: At_Drought_P Parameter: Treatment Value: Drought vs. No Drought
  misc_feature: MA Experiment ID: 20000437 Result: Down-regulated in Transcription
  misc_feature: MA Experiment 20000437 PARAMETER Experiment Name: At_Drought_P Parameter: Age (day) Value: 8
  misc_feature: MA Experiment 20000437 PARAMETER Experiment Name: At_Drought_P Parameter: Organism Value: A. thaliana
  misc_feature: MA Experiment 20000437 PARAMETER Experiment Name: At_Drought_P Parameter: Plant Line Value: WS
  misc_feature: MA Experiment 20000437 PARAMETER Experiment Name: At_Drought_P Parameter: Timepoint (hr) Value: 24
  misc_feature: MA Experiment 20000437 PARAMETER Experiment Name: At_Drought_P Parameter: Tissue Value: Whole Plant
  misc_feature: MA Experiment 20000437 PARAMETER Experiment Name: At_Drought_P Parameter: Treatment Value: Drought vs. No Drought
  misc_feature: MA Experiment ID: 20000438 Result: Up-regulated in Transcription
  misc_feature: MA Experiment 20000438 PARAMETER Experiment Name: At_Shoots__P Parameter: Age (day) Value: 14
  misc_feature: MA Experiment 20000438 PARAMETER Experiment Name: At_Shoots__P Parameter: Tissue Value: Shoots vs. Whole Plant
  misc_feature: MA Experiment ID: 20000439 Result: Up-regulated in Transcription
  misc_feature: MA Experiment 20000439 PARAMETER Experiment Name: At_Roots__P Parameter: Age (day) Value: 14 vs. 21
  misc_feature: MA Experiment 20000439 PARAMETER Experiment Name: At_Roots__P Parameter: Organism Value: A. thaliana
  misc_feature: MA Experiment 20000439 PARAMETER Experiment Name: At_Roots__P Parameter: Tissue Value: Roots vs. Whole Plant
  misc_feature: MA Experiment ID: 20000495 Result: Up-regulated in Transcription
  misc_feature: MA Experiment 20000495 PARAMETER Experiment Name: At_Guard_Cells_P Parameter: Harvest Date Value: 8/2/2002
  misc_feature: MA Experiment 20000495 PARAMETER Experiment Name: At_Guard_Cells_P Parameter: Organism Value: A. thaliana
  misc_feature: MA Experiment 20000495 PARAMETER Experiment Name: At_Guard_Cells_P Parameter: Tissue Value: Guard Cells vs. Leaves
  misc_feature: MA Experiment ID: 20000573 Result: Down-regulated in Transcription
  misc_feature: MA Experiment 20000573 PARAMETER Experiment Name: At_100uM_ABA_Mutants__P Parameter: Organism Value: A. thaliana
  misc_feature: MA Experiment 20000573 PARAMETER Experiment Name: At_100uM_ABA_Mutants__P Parameter: Plant Line Value: CS22 vs. Ler wt
  misc_feature: MA Experiment 20000573 PARAMETER Experiment Name: At_100uM_ABA_Mutants__P Parameter: Timepoint (hr) Value: N/A
  misc_feature: MA Experiment 20000573 PARAMETER Experiment Name: At_100uM_ABA_Mutants__P Parameter: Tissue Value: Whole Plant
  misc_feature: MA Experiment 20000573 PARAMETER Experiment Name: At_100uM_ABA_Mutants__P Parameter: Treatment Value: None
  misc_feature: MA Experiment ID: 20000574 Result: Down-regulated in Transcription
  misc_feature: MA Experiment 20000574 PARAMETER Experiment Name: At_100uM_ABA_Mutants__P Parameter: Organism Value: A. thaliana
  misc_feature: MA Experiment 20000574 PARAMETER Experiment Name: At_100uM_ABA_Mutants__P Parameter: Plant Line Value: CS23 vs. Ler wt
  misc_feature: MA Experiment 20000574 PARAMETER Experiment Name: At_100uM_ABA_Mutants__P Parameter: Timepoint (hr) Value: N/A
  misc_feature: MA Experiment 20000574 PARAMETER Experiment Name: At_100uM_ABA_Mutants__P Parameter: Tissue Value: Whole Plant
  misc_feature: MA Experiment 20000574 PARAMETER Experiment Name: At_100uM_ABA_Mutants__P Parameter: Treatment Value: None
  misc_feature: MA Experiment ID: 20000794 Result: Down-regulated in Transcription
  misc_feature: MA Experiment 20000794 PARAMETER Experiment Name: At_Petals_P Parameter: Age (day) Value: 23-25 days
  misc_feature: MA Experiment 20000794 PARAMETER Experiment Name: At_Petals_P Parameter: Plant Line Value: WS
  misc_feature: MA Experiment 20000794 PARAMETER Experiment Name: At_Petals_P Parameter: Tissue Value: Petals vs. Whole plant
  misc_feature: MA Experiment ID: 20001554 Result: Down-regulated in Transcription
  misc_feature: MA Experiment 20001554 PARAMETER Experiment Name: At_Drought_Soil_Dry_P Parameter: Age (day) Value: 21
  misc_feature: MA Experiment 20001554 PARAMETER Experiment Name: At_Drought_Soil_Dry_P Parameter: Organism Value: A. thaliana
  misc_feature: MA Experiment 20001554 PARAMETER Experiment Name: At_Drought_Soil_Dry_P Parameter: Plant Line Value: WS
  misc_feature: MA Experiment 20001554 PARAMETER Experiment Name: At_Drought_Soil_Dry_P Parameter: Post Timepoint (hr) Value: None
  misc_feature: MA Experiment 20001554 PARAMETER Experiment Name: At_Drought_Soil_Dry_P Parameter: Post-Treatment Value: None
  misc_feature: MA Experiment 20001554 PARAMETER Experiment Name: At_Drought_Soil_Dry_P Parameter: Timepoint (day) Value: 7
  misc_feature: MA Experiment 20001554 PARAMETER Experiment Name: At_Drought_Soil_Dry_P Parameter: Treatment Value: Drought vs. No Drought
  misc_feature: MA Experiment ID: 20001555 Result: Down-regulated in Transcription
  misc_feature: MA Experiment 20001555 PARAMETER Experiment Name: At_Drought_Soil_Dry_P Parameter: Age (day) Value: 24
  misc_feature: MA Experiment 20001555 PARAMETER Experiment Name: At_Drought_Soil_Dry_P Parameter: Organism Value: A. thaliana
  misc_feature: MA Experiment 20001555 PARAMETER Experiment Name: At_Drought_Soil_Dry_P Parameter: Plant Line Value: WS
  misc_feature: MA Experiment 20001555 PARAMETER Experiment Name: At_Drought_Soil_Dry_P Parameter: Post Timepoint (hr) Value: None
  misc_feature: MA Experiment 20001555 PARAMETER Experiment Name: At_Drought_Soil_Dry_P Parameter: Post-Treatment Value: None
  misc_feature: MA Experiment 20001555 PARAMETER Experiment Name: At_Drought_Soil_Dry_P Parameter: Timepoint (day) Value: 10
  misc_feature: MA Experiment 20001555 PARAMETER Experiment Name: At_Drought_Soil_Dry_P Parameter: Treatment Value: Drought vs. No Drought
  misc_feature: MA Experiment ID: 20001556 Result: Down-regulated in Transcription
  misc_feature: MA Experiment 20001556 PARAMETER Experiment Name: At_Drought_Soil_Dry_P Parameter: Age (day) Value: 26
  misc_feature: MA Experiment 20001556 PARAMETER Experiment Name: At_Drought_Soil_Dry_P Parameter: Organism Value: A. thaliana
  misc_feature: MA Experiment 20001556 PARAMETER Experiment Name: At_Drought_Soil_Dry_P Parameter: Plant Line Value: WS
  misc_feature: MA Experiment 20001556 PARAMETER Experiment Name: At_Drought_Soil_Dry_P Parameter: Post Timepoint (hr) Value: None
  misc_feature: MA Experiment 20001556 PARAMETER Experiment Name: At_Drought_Soil_Dry_P Parameter: Post-Treatment Value: None
  misc_feature: MA Experiment 20001556 PARAMETER Experiment Name: At_Drought_Soil_Dry_P Parameter: Timepoint (day) Value: 12
  misc_feature: MA Experiment 20001556 PARAMETER Experiment Name: At_Drought_Soil_Dry_P Parameter: Treatment Value: Drought vs. No Drought
  misc_feature: MA Experiment ID: 20001560 Result: Down-regulated in Transcription
  misc_feature: MA Experiment 20001560 PARAMETER Experiment Name: At_Drought_Soil_Dry_P Parameter: Age (day) Value: 28
  misc_feature: MA Experiment 20001560 PARAMETER Experiment Name: At_Drought_Soil_Dry_P Parameter: Organism Value: A. thaliana
  misc_feature: MA Experiment 20001560 PARAMETER Experiment Name: At_Drought_Soil_Dry_P Parameter: Plant Line Value: WS
  misc_feature: MA Experiment 20001560 PARAMETER Experiment Name: At_Drought_Soil_Dry_P Parameter: Post Timepoint (hr) Value: None
  misc_feature: MA Experiment 20001560 PARAMETER Experiment Name: At_Drought_Soil_Dry_P Parameter: Post-Treatment Value: None
  misc_feature: MA Experiment 20001560 PARAMETER Experiment Name: At_Drought_Soil_Dry_P Parameter: Timepoint (day) Value: 14
  misc_feature: MA Experiment 20001560 PARAMETER Experiment Name: At_Drought_Soil_Dry_P Parameter: Treatment Value: Drought vs. No Drought
  misc_feature: MA Experiment ID: 20001757 Result: Up-regulated in Transcription
  misc_feature: MA Experiment 20001757 PARAMETER Experiment Name: At_50mM_NH4NO3_L-to-H_P Parameter: Timepoint (hr) Value: 6
  misc_feature: MA Experiment 20001757 PARAMETER Experiment Name: At_50mM_NH4NO3_L-to-H_P Parameter: Tissue Value: Leaf
  misc_feature: MA Experiment 20001757 PARAMETER Experiment Name: At_50mM_NH4NO3_L-to-H_P Parameter: Treatment Value: 50mM NH4NO3 vs 100mM Mannitol
atgtttgaagagattcttcacctttctgaaggaaaacaaatcgttatgttcttggattatgatggcactttatctcccattgttgatgatccagatcgagctttcatgtctagaaagatgagaagaactgtgaggaaactagcaaactgtttcccgacggccatagttagtgggagatgcatagaaaagctaattatgatagttttgacaacttttcaggtttataactttgtaaaactaactgagttgtactatgctggaagtcatggaatggacatcaaaggaccagagcaagggtccaaatatgagcaagatagtaaatctcttctttgccaaccagctacagagttcctccccatgatcgacgaggtttatcataaattagtggagaaaacaaaatctactcccggagcccaagtagagaacaacaaattttgtgtctctgttcacttccgacgcgtagatgaaaataactggagtgatttggctaaccaagttcgatcagtaatgaaagactaccctaagctccgtcttactcaaggaagaaaagttttggaggttcgtccgattattaaatgggacaaaggcaaagcactcgagtttttattagagtcacttggatacgctaattgtaccgacgttttccctctttatatcggagatgatcgcaccgacgaagatgcattcaaggtatatacagaatttagttatggagttcttgcaacgtttagtggaatggaaacaattgagatctggagcatgatgagagctataactacagaagaatcgtttcttcttaattag

SEQ ID NO: 70811 - protein, 267 aa, Arabidopsis thaliana
  peptide (1)..(267): Ceres Seq. ID no. 2998561
  misc_feature (17)..(258): Pfam Name: Trehalose-phosphatase Pfam Description: Trehalose-phosphatase
  misc_feature (1)..(267): Homolog of NCBI NO: 7487212 NR Description: hypothetical protein T19P19.160 - Arabidopsis >gi|3080446|emb|CAA18763.1| puative protein [Arabidopsis >gi|7270961|emb|CAB80640.1| puative protein [Arabidopsis
  misc_feature (1)..(254): Homolog of NCBI NO: 30692524 NR Description: trehalose-6-phosphate phosphatase, putative thaliana] >gi|26452744|dbj|BAC43453.1| putative protein thaliana] >gi|28973301|gb|AAO63975.1| unknown protein
  misc_feature (1)..(254): Homolog of NCBI NO: 15227161 NR Description: putative trehalose-6-phosphate phosphatase;
  misc_feature (1)..(254): Homolog of NCBI NO: 15238360 NR Description: trehalose-6-phosphate phosphatase; protein id:
  misc_feature (2)..(265): Homolog of NCBI NO: 11282598 NR Description: trehalose-6-phosphate phosphatase-like protein -
  misc_feature (2)..(254): Homolog of NCBI NO: 30683008 NR Description: trehalose-6-phosphate phosphatase, putative
  misc_feature (1)..(254): Homolog of NCBI NO: 18399940 NR Description: trehalose-phosphatase, putative; protein id:
  misc_feature (1)..(254): Homolog of NCBI NO: 21554408 NR Description: trehalose-phosphatase, putative [Arabidopsis
  misc_feature (1)..(254): Homolog of NCBI NO: 15218205 NR Description: trehalose-6-phosphate phosphatase (AtTPPB); id: At1g78090.1, supported by cDNA: gi_2944179 [Arabidopsis
  misc_feature (1)..(254): Homolog of NCBI NO: 25354595 NR Description: trehalose-phosphatase (EC 3.1.3.12) B [imported] -
MFEEILHLSEGKQIVMFLDYDGTLSPIVDDPDRAFMSRKMRRTVRKLANCFPTAIVSGRCIEKLIMIVLTTFQVYNFVKLTELYYAGSHGMDIKGPEQGSKYEQDSKSLLCQPATEFLPMIDEVYHKLVEKTKSTPGAQVENNKFCVSVHFRRVDENNWSDLANQVRSVMKDYPKLRLTQGRKVLEVRPIIKWDKGKALEFLLESLGYANCTDVFPLYIGDDRTDEDAFKVYTEFSYGVLATFSGMETIEIWSMMRAITTEESFLLN

SEQ ID NO: 70812 - protein, 252 aa, Arabidopsis thaliana
  peptide (1)..(252): Ceres Seq. ID no. 2998562
  misc_feature (2)..(243): Pfam Name: Trehalose-phosphatase Pfam Description: Trehalose-phosphatase
  misc_feature (1)..(239): Homolog of NCBI NO: 15238360 NR Description: trehalose-6-phosphate phosphatase; protein id:
  misc_feature (1)..(250): Homolog of NCBI NO: 11282598 NR Description: trehalose-6-phosphate phosphatase-like protein -
  misc_feature (1)..(239): Homolog of NCBI NO: 30683008 NR Description: trehalose-6-phosphate phosphatase, putative
  misc_feature (1)..(239): Homolog of NCBI NO: 18399940 NR Description: trehalose-phosphatase, putative; protein id:
  misc_feature (1)..(239): Homolog of NCBI NO: 30692524 NR Description: trehalose-6-phosphate phosphatase, putative thaliana] >gi|26452744|dbj|BAC43453.1| putative protein thaliana] >gi|28973301|gb|AAO63975.1| unknown protein
  misc_feature (1)..(239): Homolog of NCBI NO: 15227161 NR Description: putative trehalose-6-phosphate phosphatase;
  misc_feature (1)..(252): Homolog of NCBI NO: 7487212 NR Description: hypothetical protein T19P19.160 - Arabidopsis >gi|3080446|emb|CAA18763.1| puative protein [Arabidopsis >gi|7270961|emb|CAB80640.1| puative protein [Arabidopsis
  misc_feature (1)..(239): Homolog of NCBI NO: 21554408 NR Description: trehalose-phosphatase, putative [Arabidopsis
  misc_feature (1)..(239): Homolog of NCBI NO: 15218205 NR Description: trehalose-6-phosphate phosphatase (AtTPPB); id: At1g78090.1, supported by cDNA: gi_2944179 [Arabidopsis
  misc_feature (1)..(239): Homolog of NCBI NO: 25354595 NR Description: trehalose-phosphatase (EC 3.1.3.12) B [imported] -
MFLDYDGTLSPIVDDPDRAFMSRKMRRTVRKLANCFPTAIVSGRCIEKLIMIVLTTFQVYNFVKLTELYYAGSHGMDIKGPEQGSKYEQDSKSLLCQPATEFLPMIDEVYHKLVEKTKSTPGAQVENNKFCVSVHFRRVDENNWSDLANQVRSVMKDYPKLRLTQGRKVLEVRPIIKWDKGKALEFLLESLGYANCTDVFPLYIGDDRTDEDAFKVYTEFSYGVLATFSGMETIEIWSMMRAITTEESFLLN

SEQ ID NO: 70813 - protein, 232 aa, Arabidopsis thaliana
  peptide (1)..(232): Ceres Seq. ID no. 2998563
  misc_feature (1)..(223): Pfam Name: Trehalose-phosphatase Pfam Description: Trehalose-phosphatase
  misc_feature (1)..(232): Homolog of NCBI NO: 7487212 NR Description: hypothetical protein T19P19.160 - Arabidopsis >gi|3080446|emb|CAA18763.1| puative protein [Arabidopsis >gi|7270961|emb|CAB80640.1| puative protein [Arabidopsis
  misc_feature (1)..(219): Homolog of NCBI NO: 30692524 NR Description: trehalose-6-phosphate phosphatase, putative thaliana] >gi|26452744|dbj|BAC43453.1| putative protein thaliana] >gi|28973301|gb|AAO63975.1| unknown protein
  misc_feature (1)..(219): Homolog of NCBI NO: 15227161 NR Description: putative trehalose-6-phosphate phosphatase;
  misc_feature (1)..(219): Homolog of NCBI NO: 15238360 NR Description: trehalose-6-phosphate phosphatase; protein id:
  misc_feature (1)..(230): Homolog of NCBI NO: 11282598 NR Description: trehalose-6-phosphate phosphatase-like protein -
  misc_feature (1)..(219): Homolog of NCBI NO: 30683008 NR Description: trehalose-6-phosphate phosphatase, putative
  misc_feature (1)..(219): Homolog of NCBI NO: 18399940 NR Description: trehalose-phosphatase, putative; protein id:
  misc_feature (1)..(219): Homolog of NCBI NO: 21554408 NR Description: trehalose-phosphatase, putative [Arabidopsis
  misc_feature (1)..(219): Homolog of NCBI NO: 15218205 NR Description: trehalose-6-phosphate phosphatase (AtTPPB); id: At1g78090.1, supported by cDNA: gi_2944179 [Arabidopsis
  misc_feature (1)..(219): Homolog of NCBI NO: 25354595 NR Description: trehalose-phosphatase (EC 3.1.3.12) B [imported] -
MSRKMRRTVRKLANCFPTAIVSGRCIEKLIMIVLTTFQVYNFVKLTELYYAGSHGMDIKGPEQGSKYEQDSKSLLCQPATEFLPMIDEVYHKLVEKTKSTPGAQVENNKFCVSVHFRRVDENNWSDLANQVRSVMKDYPKLRLTQGRKVLEVRPIIKWDKGKALEFLLESLGYANCTDVFPLYIGDDRTDEDAFKVYTEFSYGVLATFSGMETIEIWSMMRAITTEESFLLN

SEQ ID NO: 70814 - DNA, 1896 bp, Arabidopsis thaliana
  misc_feature (1)..(1896): Ceres Seq. ID no. 2998564
atgaataagaagaacgagccgcttcatctatgcaaagaaaggaagagatttgtcaaacaagctatggattccagatgtgctttagccgctgcacacgtgtcttacatccgttcactccgtaacatcggagcttgtcttcgtcaatacgcggaggcggagactgctcatgaatcatctccgtcgttaaccgccactgagcctgagaaatctccttctcataactcctcttaccctgacgattcggttgactcgccactgagtcataactcgaatccaaaccctaaccctaaaccccttttcaatctaagttacatgaagacggagacggctagttctactgtgactttcactattaaccctctgagcgacggtgatgacgatctggaagtgacaatgccggcgttttctcctcctcctccgccgcgtcctcgccggccagagacgtcttcttgggactatttcgacacttgtgacgattttgatagctttagatttgtagggctaagtgaacaaaccgagattgatagtgaatgtgatgcagcagttataggattagagaagattactagtcaagggaatgtagcaaaatctggttcagagacattgcaagactcgagttttaaaacaaagcagaggaaacagagttgtgaagataatgatgaaagagaagatccatcggagtttatcacacatagagccaaagactttgtgtcgagtatgaaagatatagaacataagttctttagagcttctgaatctggaagagaagtttcaagaatgcttgaagttaacaaaatcagagtcggattcgccgatatgacagagggaaaagttattcaccagtttctcaagtgttctgagttaaactttaatgtagagccattgagtcatcaagttactaaagtcattgtgtggaagagaacatcgtcgtcaagatcctccacttctagaaatccgttgatccagacatcaaaagaagatcacgatgatgaaagtggaagtgatttcatcgaagagttttgtatgatctcaggaagtcactcttcttcgcttgatcggttatacgcttgggagagaaaactctatgatgaagtcaaggcgagtgagatgattaggaaagagtatgatcgaaaatgcgagcagctaaggaaccaattcgcaaaggatcacagtgctaaatcgatggataaaacaagagcagctgctaaagatcttcattcaagaatcagagtcgcgattcaatctgttgaatcgatttcaaagcggattgagagaatcagagacgatgagctccacccacagctcttagagtttcttcaagggttgataagaatgtggaaagcgatgcttgaatgtcatcatacacagtacattaccatttcattggcttaccattgtcgacattcctccaaaacagcacacgaaagtgtccttaagaggcggattttggcggagcttctagaagaaacagagtgttttggtctaagctttgtagatttggttcacagtatggcttcttatgtggaagctctgaatggttggcttcacaactgtgtcttgctccctcaagaacgttctacaagaaaccgaagaccatggtccccacgtcgtgtcctggctccaccgatattcgtgctgtgtcgggactggtctgcagggatcaaaacactgccgtctgatgaacttagcgggtcaatcaaggggttttccttggatatggagatgttgggggaagaaaaaggcggttcactgttggtttcggatttgtcgagtgtgcattcgagtttggcgaagcttctagagagattaaaaaagttttcggaagcttctttaaaaatgtatgaagatgtaaaggtgaaaagtgaagcagctagagttgcttacactaataaataa

SEQ ID NO: 70815 - protein, 631 aa, Arabidopsis thaliana
  peptide (1)..(631): Ceres Seq. ID no. 2998565
  misc_feature (237)..(577): Pfam Name: Protein of unknown function (DUF632) Pfam Description: Protein of unknown function (DUF632)
  misc_feature (234)..(573): Homolog of NCBI NO: 15225846 NR Description: hypothetical protein; protein id: At2g27090.1
  misc_feature (4)..(242): Homolog of NCBI NO: 15225846 NR Description: hypothetical protein; protein id: At2g27090.1
  misc_feature (223)..(631): Homolog of NCBI NO: 22324428 NR Description: hypothetical protein~predicted by GeneMark.hmm
  misc_feature (8)..(72): Homolog of NCBI NO: 22324428 NR Description: hypothetical protein~predicted by GeneMark.hmm
  misc_feature (134)..(615): Homolog of NCBI NO: 32526673 NR Description: bzip-like transcription factor-like protein
  misc_feature (6)..(71): Homolog of NCBI NO: 32526673 NR Description: bzip-like transcription factor-like protein
  misc_feature (255)..(627): Homolog of NCBI NO: 15234640 NR Description: putative protein; protein id: At4g30130.1, by cDNA: gi_15810478 [Arabidopsis thaliana]
  misc_feature (5)..(265): Homolog of NCBI NO: 15234640 NR Description: putative protein; protein id: At4g30130.1, by cDNA: gi_15810478 [Arabidopsis thaliana]
  misc_feature (237)..(580): Homolog of NCBI NO: 15219083 NR Description: putative bzip-like transcription factor; protein At1g21740.1 [Arabidopsis thaliana] >gi|25518309|pir||A86351
  misc_feature (5)..(82): Homolog of NCBI NO: 15219083 NR Description: putative bzip-like transcription factor; protein At1g21740.1 [Arabidopsis thaliana] >gi|25518309|pir||A86351
MNKKNEPLHLCKERKRFVKQAMDSRCALAAAHVSYIRSLRNIGACLRQYAEAETAHESSPSLTATEPEKSPSHNSSYPDDSVDSPLSHNSNPNPNPKPLFNLSYMKTETASSTVTFTINPLSDGDDDLEVTMPAFSPPPPPRPRRPETSSWDYFDTCDDFDSFRFVGLSEQTEIDSECDAAVIGLEKITSQGNVAKSGSETLQDSSFKTKQRKQSCEDNDEREDPSEFITHRAKDFVSSMKDIEHKFFRASESGREVSRMLEVNKIRVGFADMTEGKVIHQFLKCSELNFNVEPLSHQVTKVIVWKRTSSSRSSTSRNPLIQTSKEDHDDESGSDFIEEFCMISGSHSSSLDRLYAWERKLYDEVKASEMIRKEYDRKCEQLRNQFAKDHSAKSMDKTRAAAKDLHSRIRVAIQSVESISKRIERIRDDELHPQLLEFLQGLIRMWKAMLECHHTQYITISLAYHCRHSSKTAHESVLKRRILAELLEETECFGLSFVDLVHSMASYVEALNGWLHNCVLLPQERSTRNRRPWSPRRVLAPPIFVLCRDWSAGIKTLPSDELSGSIKGFSLDMEMLGEEKGGSLLVSDLSSVHSSLAKLLERLKKFSEASLKMYEDVKVKSEAARVAYTNK

SEQ ID NO: 70816 - protein, 610 aa, Arabidopsis thaliana
  peptide (1)..(610): Ceres Seq. ID no. 2998566
  misc_feature (216)..(556): Pfam Name: Protein of unknown function (DUF632) Pfam Description: Protein of unknown function (DUF632)
  misc_feature (213)..(552): Homolog of NCBI NO: 15225846 NR Description: hypothetical protein; protein id: At2g27090.1
  misc_feature (1)..(221): Homolog of NCBI NO: 15225846 NR Description: hypothetical protein; protein id: At2g27090.1
  misc_feature (202)..(610): Homolog of NCBI NO: 22324428 NR Description: hypothetical protein~predicted by GeneMark.hmm
  misc_feature (1)..(51): Homolog of NCBI NO: 22324428 NR Description: hypothetical protein~predicted by GeneMark.hmm
  misc_feature (113)..(594): Homolog of NCBI NO: 32526673 NR Description: bzip-like transcription factor-like protein
  misc_feature (1)..(50): Homolog of NCBI NO: 32526673 NR Description: bzip-like transcription factor-like protein
  misc_feature (234)..(606): Homolog of NCBI NO: 15234640 NR Description: putative protein; protein id: At4g30130.1, by cDNA: gi_15810478 [Arabidopsis thaliana]
  misc_feature (1)..(244): Homolog of NCBI NO: 15234640 NR Description: putative protein; protein id: At4g30130.1, by cDNA: gi_15810478 [Arabidopsis thaliana]
  misc_feature (216)..(559): Homolog of NCBI NO: 15219083 NR Description: putative bzip-like transcription factor; protein At1g21740.1 [Arabidopsis thaliana] >gi|25518309|pir||A86351
  misc_feature (1)..(61): Homolog of NCBI NO: 15219083 NR Description: putative bzip-like transcription factor; protein At1g21740.1 [Arabidopsis thaliana] >gi|25518309|pir||A86351
MDSRCALAAAHVSYIRSLRNIGACLRQYAEAETAHESSPSLTATEPEKSPSHNSSYPDDSVDSPLSHNSNPNPNPKPLFNLSYMKTETASSTVTFTINPLSDGDDDLEVTMPAFSPPPPPRPRRPETSSWDYFDTCDDFDSFRFVGLSEQTEIDSECDAAVIGLEKITSQGNVAKSGSETLQDSSFKTKQRKQSCEDNDEREDPSEFITHRAKDFVSSMKDIEHKFFRASESGREVSRMLEVNKIRVGFADMTEGKVIHQFLKCSELNFNVEPLSHQVTKVIVWKRTSSSRSSTSRNPLIQTSKEDHDDESGSDFIEEFCMISGSHSSSLDRLYAWERKLYDEVKASEMIRKEYDRKCEQLRNQFAKDHSAKSMDKTRAAAKDLHSRIRVAIQSVESISKRIERIRDDELHPQLLEFLQGLIRMWKAMLECHHTQYITISLAYHCRHSSKTAHESVLKRRILAELLEETECFGLSFVDLVHSMASYVEALNGWLHNCVLLPQERSTRNRRPWSPRRVLAPPIFVLCRDWSAGIKTLPSDELSGSIKGFSLDMEMLGEEKGGSLLVSDLSSVHSSLAKLLERLKKFSEASLKMYEDVKVKSEAARVAYTNK

SEQ ID NO: 70817 - protein, 527 aa, Arabidopsis thaliana
  peptide (1)..(527): Ceres Seq. ID no. 2998567
  misc_feature (133)..(473): Pfam Name: Protein of unknown function (DUF632) Pfam Description: Protein of unknown function (DUF632)
  misc_feature (130)..(469): Homolog of NCBI NO: 15225846 NR Description: hypothetical protein; protein id: At2g27090.1
  misc_feature (1)..(138): Homolog of NCBI NO: 15225846 NR Description: hypothetical protein; protein id: At2g27090.1
  misc_feature (119)..(527): Homolog of NCBI NO: 22324428 NR Description: hypothetical protein~predicted by GeneMark.hmm
  misc_feature (30)..(511): Homolog of NCBI NO: 32526673 NR Description: bzip-like transcription factor-like protein
  misc_feature (151)..(523): Homolog of NCBI NO: 15234640 NR Description: putative protein; protein id: At4g30130.1, by cDNA: gi_15810478 [Arabidopsis thaliana]
  misc_feature (1)..(161): Homolog of NCBI NO: 15234640 NR Description: putative protein; protein id: At4g30130.1, by cDNA: gi_15810478 [Arabidopsis thaliana]
  misc_feature (133)..(476): Homolog of NCBI NO: 15219083 NR Description: putative bzip-like transcription factor; protein At1g21740.1 [Arabidopsis thaliana] >gi|25518309|pir||A86351
  misc_feature (60)..(521): Homolog of NCBI NO: 15223973 NR Description: unknown protein; protein id: At1g77500.1
  misc_feature (7)..(477): Homolog of NCBI NO: 23271726 NR Description: Unknown (protein for MGC:38398) [Mus musculus]
  misc_feature (230)..(475): Homolog of NCBI NO: 15236929 NR Description: putative protein; protein id: At4g35240.1
MKTETASSTVTFTINPLSDGDDDLEVTMPAFSPPPPPRPRRPETSSWDYFDTCDDFDSFRFVGLSEQTEIDSECDAAVIGLEKITSQGNVAKSGSETLQDSSFKTKQRKQSCEDNDEREDPSEFITHRAKDFVSSMKDIEHKFFRASESGREVSRMLEVNKIRVGFADMTEGKVIHQFLKCSELNFNVEPLSHQVTKVIVWKRTSSSRSSTSRNPLIQTSKEDHDDESGSDFIEEFCMISGSHSSSLDRLYAWERKLYDEVKASEMIRKEYDRKCEQLRNQFAKDHSAKSMDKTRAAAKDLHSRIRVAIQSVESISKRIERIRDDELHPQLLEFLQGLIRMWKAMLECHHTQYITISLAYHCRHSSKTAHESVLKRRILAELLEETECFGLSFVDLVHSMASYVEALNGWLHNCVLLPQERSTRNRRPWSPRRVLAPPIFVLCRDWSAGIKTLPSDELSGSIKGFSLDMEMLGEEKGGSLLVSDLSSVHSSLAKLLERLKKFSEASLKMYEDVKVKSEAARVAYTNK

SEQ ID NO: 70818 - DNA, 1071 bp, Arabidopsis thaliana
  misc_feature (1)..(1071): Ceres Seq. ID no. 2998644
  misc_feature: MA Experiment ID: 20000182 Result: Up-regulated in Transcription
  misc_feature: MA Experiment 20000182 PARAMETER Experiment Name: At_2mM_SA_P Parameter: Age (day) Value: 14
  misc_feature: MA Experiment 20000182 PARAMETER Experiment Name: At_2mM_SA_P Parameter: Organism Value: A. thaliana
  misc_feature: MA Experiment 20000182 PARAMETER Experiment Name: At_2mM_SA_P Parameter: Plant Line Value: WS
  misc_feature: MA Experiment 20000182 PARAMETER Experiment Name: At_2mM_SA_P Parameter: Timepoint (hr) Value: 6
  misc_feature: MA Experiment 20000182 PARAMETER Experiment Name: At_2mM_SA_P Parameter: Tissue Value: Aerial
  misc_feature: MA Experiment 20000182 PARAMETER Experiment Name: At_2mM_SA_P Parameter: Treatment Value: 2mM SA vs. No Treatment
  misc_feature: MA Experiment ID: 20000184 Result: Down-regulated in Transcription
  misc_feature: MA Experiment 20000184 PARAMETER Experiment Name: At_Shoots__P Parameter: Age (day) Value: 7
  misc_feature: MA Experiment 20000184 PARAMETER Experiment Name: At_Shoots__P Parameter: Tissue Value: Shoots vs. Whole Plant
  misc_feature: MA Experiment ID: 20000227 Result: Down-regulated in Transcription
  misc_feature: MA Experiment 20000227 PARAMETER Experiment Name: At_Root-Tips-vs-Tops_P Parameter: Tissue Value: Root Tips vs. Root Tops
  misc_feature: MA Experiment ID: 20000794 Result: Up-regulated in Transcription
  misc_feature: MA Experiment 20000794 PARAMETER Experiment Name: At_Petals_P Parameter: Age (day) Value: 23-25 days
  misc_feature: MA Experiment 20000794 PARAMETER Experiment Name: At_Petals_P Parameter: Plant Line Value: WS
  misc_feature: MA Experiment 20000794 PARAMETER Experiment Name: At_Petals_P Parameter: Tissue Value: Petals vs. Whole plant
  misc_feature: MA Experiment ID: 20001451 Result: Down-regulated in Transcription
  misc_feature: MA Experiment 20001451 PARAMETER Experiment Name: At_Far-red-induction_P Parameter: Age (day) Value: 7
  misc_feature: MA Experiment 20001451 PARAMETER Experiment Name: At_Far-red-induction_P Parameter: Light Value: Far-red vs. White
  misc_feature: MA Experiment 20001451 PARAMETER Experiment Name: At_Far-red-induction_P Parameter: Organism Value: A. thaliana
  misc_feature: MA Experiment 20001451 PARAMETER Experiment Name: At_Far-red-induction_P Parameter: Plant Line Value: Columbia
  misc_feature: MA Experiment 20001451 PARAMETER Experiment Name: At_Far-red-induction_P Parameter: Timepoint (hr) Value: 24
  misc_feature: MA Experiment 20001451 PARAMETER Experiment Name: At_Far-red-induction_P Parameter: Tissue Value: Whole Plant
atgagtagcgatgatacgattgaggagagtttgcttgtggatcccaaattgttgttcatcggctccaagattggtgaaggcgctcacggcaaagtctaccaaggaaggtatggtcgtcagattgttgcaatcaaagttgtcaaccggggctccaaacctgaccagcaatcttctctcgagagccgtttcgtccgtgaggtcaatatgatgtcccgcgttcaacaccataaccttgtcaaggtctctctccttctttcttctctttctttgctctcgatacttcttcttgaatacacaatatccatttggcagtttattggagcgtgcaaagatcctttaatggtaatagtaacagagcttctcccagggatgtctctccgtaaatatctcaccagcatccgtcctcagttgctccatctccctcttgctctctcctttgcccttgacatcgcccgtgccttgcactgcttacacgccaatggtatcattcacagagacctcaaacctgacaacttattgctcacggagaatcacaaatccgtcaagcttgctgatttcgggcttgctagggaagaatccgtgactgagatgatgactgctgagactgggacttaccgttggatggctcctgagctctacagtacagtgaccctgcgtcaaggagagaagaagcattacaacaacaaagttgatgtctacagctttggaatcgtgctttgggagcttctcactaatcgtatgccattcgagggcatgtccaatctgcaagccgcctacgcagcagcattcaaggagaggcccgtaatgccagaggggatatctccgagtctggcgttcatagtgcagtcttgttgggtggaggacccaaacatgaggccaagcttcagtcaaattatcagactgctcaatgagttcctccttaccctgactcctccgcctcctcagcctctgcctgagactgccaccaacaggaccaatggccgagccatcactgagttctccatccgtccaaaagggaaatttgccttcattcgccagcttttcgctgccaagaggaacataaactcttag

SEQ ID NO: 70819 - protein, 356 aa, Arabidopsis thaliana
  peptide (1)..(356): Ceres Seq. ID no. 2998645
  misc_feature (1)..(356): Homolog of NCBI NO: 11259780 NR Description: protein kinase ATN1-like protein - Arabidopsis
  misc_feature (104)..(356): Homolog of NCBI NO: 30679428 NR Description: protein kinase, putative [Arabidopsis thaliana]
  misc_feature (104)..(352): Homolog of NCBI NO: 28876011 NR Description: putative protein kinase [Oryza sativa (japonica
  misc_feature (7)..(80): Homolog of NCBI NO: 28876011 NR Description: putative protein kinase [Oryza sativa (japonica
  misc_feature (104)..(314): Homolog of NCBI NO: 32815816 NR Description: protein kinase [Cucumis sativus]
  misc_feature (2)..(80): Homolog of NCBI NO: 32815816 NR Description: protein kinase [Cucumis sativus]
  misc_feature (104)..(318): Homolog of NCBI NO: 15232197 NR Description: putative protein kinase, ATN1; protein id: supported by cDNA: gi_16604327, supported by cDNA: gi_19699189 thaliana] >gi|11994183|dbj|BAB01286.1| nearly identical to
  misc_feature (7)..(80): Homolog of NCBI NO: 15232197 NR Description: putative protein kinase, ATN1; protein id: supported by cDNA: gi_16604327, supported by cDNA: gi_19699189 thaliana] >gi|11994183|dbj|BAB01286.1| nearly identical to
  misc_feature (104)..(314): Homolog of NCBI NO: 2129698 NR Description: protein kinase ATN1 (EC 2.7.1.-) - Arabidopsis
  misc_feature (7)..(80): Homolog of NCBI NO: 2129698 NR Description: protein kinase ATN1 (EC 2.7.1.-) - Arabidopsis
MSSDDTIEESLLVDPKLLFIGSKIGEGAHGKVYQGRYGRQIVAIKVVNRGSKPDQQSSLESRFVREVNMMSRVQHHNLVKVSLLLSSLSLLSILLLEYTISIWQFIGACKDPLMVIVTELLPGMSLRKYLTSIRPQLLHLPLALSFALDIARALHCLHANGIIHRDLKPDNLLLTENHKSVKLADFGLAREESVTEMMTAETGTYRWMAPELYSTVTLRQGEKKHYNNKVDVYSFGIVLWELLTNRMPFEGMSNLQAAYAAAFKERPVMPEGISPSLAFIVQSCWVEDPNMRPSFSQIIRLLNEFLLTLTPPPPQPLPETATNRTNGRAITEFSIRPKGKFAFIRQLFAAKRNINS

SEQ ID NO: 70820 - protein, 288 aa, Arabidopsis thaliana
  peptide (1)..(288): Ceres Seq. ID no. 2998646
  misc_feature (1)..(288): Homolog of NCBI NO: 11259780 NR Description: protein kinase ATN1-like protein - Arabidopsis
  misc_feature (36)..(288): Homolog of NCBI NO: 30679428 NR Description: protein kinase, putative [Arabidopsis thaliana]
  misc_feature (36)..(284): Homolog of NCBI NO: 28876011 NR Description: putative protein kinase [Oryza sativa (japonica
  misc_feature (1)..(12): Homolog of NCBI NO: 28876011 NR Description: putative protein kinase [Oryza sativa (japonica
  misc_feature (36)..(246): Homolog of NCBI NO: 32815816 NR Description: protein kinase [Cucumis sativus]
  misc_feature (1)..(12): Homolog of NCBI NO: 32815816 NR Description: protein kinase [Cucumis sativus]
  misc_feature (36)..(250): Homolog of NCBI NO: 15232197 NR Description: putative protein kinase, ATN1; protein id: supported by cDNA: gi_16604327, supported by cDNA: gi_19699189 thaliana] >gi|11994183|dbj|BAB01286.1| nearly identical to
  misc_feature (1)..(12): Homolog of NCBI NO: 15232197 NR Description: putative protein kinase, ATN1; protein id: supported by cDNA: gi_16604327, supported by cDNA: gi_19699189 thaliana] >gi|11994183|dbj|BAB01286.1| nearly identical to
  misc_feature (36)..(246): Homolog of NCBI NO: 2129698 NR Description: protein kinase ATN1 (EC 2.7.1.-) - Arabidopsis
  misc_feature (1)..(12): Homolog of NCBI NO: 2129698 NR Description: protein kinase ATN1 (EC 2.7.1.-) - Arabidopsis
MMSRVQHHNLVKVSLLLSSLSLLSILLLEYTISIWQFIGACKDPLMVIVTELLPGMSLRKYLTSIRPQLLHLPLALSFALDIARALHCLHANGIIHRDLKPDNLLLTENHKSVKLADFGLAREESVTEMMTAETGTYRWMAPELYSTVTLRQGEKKHYNNKVDVYSFGIVLWELLTNRMPFEGMSNLQAAYAAAFKERPVMPEGISPSLAFIVQSCWVEDPNMRPSFSQIIRLLNEFLLTLTPPPPQPLPETATNRTNGRAITEFSIRPKGKFAFIRQLFAAKRNINS

SEQ ID NO: 70821 - protein, 287 aa, Arabidopsis thaliana
  peptide (1)..(287): Ceres Seq. ID no. 2998647
  misc_feature (1)..(287): Homolog of NCBI NO: 11259780 NR Description: protein kinase ATN1-like protein - Arabidopsis
  misc_feature (35)..(287): Homolog of NCBI NO: 30679428 NR Description: protein kinase, putative [Arabidopsis thaliana]
  misc_feature (35)..(283): Homolog of NCBI NO: 28876011 NR Description: putative protein kinase [Oryza sativa (japonica
  misc_feature (1)..(11): Homolog of NCBI NO: 28876011 NR Description: putative protein kinase [Oryza sativa (japonica
  misc_feature (35)..(245): Homolog of NCBI NO: 32815816 NR Description: protein kinase [Cucumis sativus]
  misc_feature (1)..(11): Homolog of NCBI NO: 32815816 NR Description: protein kinase [Cucumis sativus]
  misc_feature (35)..(249): Homolog of NCBI NO: 15232197 NR Description: putative protein kinase, ATN1; protein id: supported by cDNA: gi_16604327, supported by cDNA: gi_19699189 thaliana] >gi|11994183|dbj|BAB01286.1| nearly identical to
  misc_feature (1)..(11): Homolog of NCBI NO: 15232197 NR Description: putative protein kinase, ATN1; protein id: supported by cDNA: gi_16604327, supported by cDNA: gi_19699189 thaliana] >gi|11994183|dbj|BAB01286.1| nearly identical to
  misc_feature (35)..(245): Homolog of NCBI NO: 2129698 NR Description: protein kinase ATN1 (EC 2.7.1.-) - Arabidopsis
  misc_feature (1)..(11): Homolog of NCBI NO: 2129698 NR Description: protein kinase ATN1 (EC 2.7.1.-) - Arabidopsis
MSRVQHHNLVKVSLLLSSLSLLSILLLEYTISIWQFIGACKDPLMVIVTELLPGMSLRKYLTSIRPQLLHLPLALSFALDIARALHCLHANGIIHRDLKPDNLLLTENHKSVKLADFGLAREESVTEMMTAETGTYRWMAPELYSTVTLRQGEKKHYNNKVDVYSFGIVLWELLTNRMPFEGMSNLQAAYAAAFKERPVMPEGISPSLAFIVQSCWVEDPNMRPSFSQIIRLLNEFLLTLTPPPPQPLPETATNRTNGRAITEFSIRPKGKFAFIRQLFAAKRNINS

SEQ ID NO: 70822 - DNA, 1068 bp, Arabidopsis thaliana
  misc_feature (1)..(1068): Ceres Seq. ID no. 2999006
  misc_feature: MA Experiment ID: 20000496 Result: Up-regulated in Transcription
  misc_feature: MA Experiment 20000496 PARAMETER Experiment Name: At_Guard_Cells_P Parameter: Harvest Date Value: 7/19/2002
  misc_feature: MA Experiment 20000496 PARAMETER Experiment Name: At_Guard_Cells_P Parameter: Organism Value: Canola
  misc_feature: MA Experiment 20000496 PARAMETER Experiment Name: At_Guard_Cells_P Parameter: Tissue Value: Guard Cells vs. Leaves
  misc_feature: MA Experiment ID: 20001451 Result: Up-regulated in Transcription
  misc_feature: MA Experiment 20001451 PARAMETER Experiment Name: At_Far-red-induction_P Parameter: Age (day) Value: 7
  misc_feature: MA Experiment 20001451 PARAMETER Experiment Name: At_Far-red-induction_P Parameter: Light Value: Far-red vs. White
  misc_feature: MA Experiment 20001451 PARAMETER Experiment Name: At_Far-red-induction_P Parameter: Organism Value: A. thaliana
  misc_feature: MA Experiment 20001451 PARAMETER Experiment Name: At_Far-red-induction_P Parameter: Plant Line Value: Columbia
  misc_feature: MA Experiment 20001451 PARAMETER Experiment Name: At_Far-red-induction_P Parameter: Timepoint (hr) Value: 24
  misc_feature: MA Experiment 20001451 PARAMETER Experiment Name: At_Far-red-induction_P Parameter: Tissue Value: Whole Plant
atggagagtacggtggaaagagaggcgtggaaagctcacgtggcgatgatcggtgtgcaattgttcaacggaggatatcatgtcattaccaaagtggctctcaacgttggtgtaaaccaacttgtcttctgtgtctttcgtgatctcattgctctctccattcttgctcctcttgcttatatccgtgataagagaacaagacctcctttgaatcgacagtttctcttagctttcttcttccttggtttaacagggatatttggtaatcagcttttgttcctcattggtctgaattacaccaatccaacttatgctgcagccattcagccgtcgatcccggtttttactttcatcttggctctcattatgggaacagagagactgaatttattcaagctagaaggtcaagctaaggtaggaggcacactgatttgtgtcgctggggcggtgctgatggttttgtttcgtggactggctttgtttggggaaacagaggctgagtccttgggtcatggtgaatcaagacacactgaaacatctggacacttcatgcatgctccggtcttaaagaagtatccggcgaatctttcagtcacagcatactcgtatttctttgggaccatgtttatggtgacatctgcttttttcatgactaatgagtcgacgaactggagtctcacaagatccgagttctttgcagttgtctacgcaggagtaatcgcgtctgctctcaactatggtctcttgacatggtcaaataagatcttgggtccttccttggttgctctctataatcctcttcaacccgcagcctcagctttcttgtccagaatcttccttggaagccctatctacttggggagcattttaggcggatgtgcaatcatagcaggtctttatagtgtcacctgggcatcttacaaagaaaagaaagcggcagcagcaatggctgtgatcccgatcacctcaaaggaagctgaacccttgatctacaaggaccataaaaacaaaccaataggacatctattcacaaaatctcccatctcttcaccaaaatccgatgattga

SEQ ID NO: 70823 - protein, 355 aa, Arabidopsis thaliana
  peptide (1)..(355): Ceres Seq. ID no. 2999007
  misc_feature (21)..(154): Pfam Name: Integral membrane protein DUF6 Pfam Description: Integral membrane protein DUF6
  misc_feature (1)..(355): Homolog of NCBI NO: 15231274 NR Description: putative protein; protein id: At3g45870.1
  misc_feature (184)..(355): Homolog of NCBI NO: 18415262 NR Description: Expressed protein; protein id: At4g19185.1, by cDNA: 36576., supported by cDNA: gi_16974592 [Arabidopsis >gi|16974593|gb|AAL31201.1| AT4g19180/T18B16_150 [Arabidopsis
  misc_feature (3)..(167): Homolog of NCBI NO: 18415262 NR Description: Expressed protein; protein id: At4g19185.1, by cDNA: 36576., supported by cDNA: gi_16974592 [Arabidopsis >gi|16974593|gb|AAL31201.1| AT4g19180/T18B16_150 [Arabidopsis
  misc_feature (184)..(355): Homolog of NCBI NO: 21593145 NR Description: unknown [Arabidopsis thaliana]
  misc_feature (16)..(167): Homolog of NCBI NO: 21593145 NR Description: unknown [Arabidopsis thaliana]
  misc_feature (6)..(337): Homolog of NCBI NO: 30694751 NR Description: nodulin N21 family protein [Arabidopsis thaliana]
  misc_feature (184)..(289): Homolog of NCBI NO: 7487133 NR Description: hypothetical protein T18B16.150 - Arabidopsis >gi|2828293|emb|CAA16707.1| putative protein [Arabidopsis >gi|7268713|emb|CAB78920.1| putative protein [Arabidopsis
  misc_feature (3)..(64): Homolog of NCBI NO: 7487133 NR Description: hypothetical protein T18B16.150 - Arabidopsis >gi|2828293|emb|CAA16707.1| putative protein [Arabidopsis >gi|7268713|emb|CAB78920.1| putative protein [Arabidopsis
  misc_feature (121)..(167): Homolog of NCBI NO: 7487133 NR Description: hypothetical protein T18B16.150 - Arabidopsis >gi|2828293|emb|CAA16707.1| putative protein [Arabidopsis >gi|7268713|emb|CAB78920.1| putative protein [Arabidopsis
  misc_feature (184)..(337): Homolog of NCBI NO: 9758727 NR Description: nodulin-like protein [Arabidopsis thaliana]
MESTVEREAWKAHVAMIGVQLFNGGYHVITKVALNVGVNQLVFCVFRDLIALSILAPLAYIRDKRTRPPLNRQFLLAFFFLGLTGIFGNQLLFLIGLNYTNPTYAAAIQPSIPVFTFILALIMGTERLNLFKLEGQAKVGGTLICVAGAVLMVLFRGLALFGETEAESLGHGESRHTETSGHFMHAPVLKKYPANLSVTAYSYFFGTMFMVTSAFFMTNESTNWSLTRSEFFAVVYAGVIASALNYGLLTWSNKILGPSLVALYNPLQPAASAFLSRIFLGSPIYLGSILGGCAIIAGLYSVTWASYKEKKAAAAMAVIPITSKEAEPLIYKDHKNKPIGHLFTKSPISSPKSDD

SEQ ID NO: 70824 - protein, 340 aa, Arabidopsis thaliana
  peptide (1)..(340): Ceres Seq. ID no. 2999008
  misc_feature (6)..(139): Pfam Name: Integral membrane protein DUF6 Pfam Description: Integral membrane protein DUF6
  misc_feature (1)..(340): Homolog of NCBI NO: 15231274 NR Description: putative protein; protein id: At3g45870.1
  misc_feature (169)..(340): Homolog of NCBI NO: 18415262 NR Description: Expressed protein; protein id: At4g19185.1, by cDNA: 36576., supported by cDNA: gi_16974592 [Arabidopsis >gi|16974593|gb|AAL31201.1| AT4g19180/T18B16_150 [Arabidopsis
  misc_feature (1)..(152): Homolog of NCBI NO: 18415262 NR Description: Expressed protein; protein id: At4g19185.1, by cDNA: 36576., supported by cDNA: gi_16974592 [Arabidopsis >gi|16974593|gb|AAL31201.1| AT4g19180/T18B16_150 [Arabidopsis
  misc_feature (169)..(340): Homolog of NCBI NO: 21593145 NR Description: unknown [Arabidopsis thaliana]
  misc_feature (1)..(152): Homolog of NCBI NO: 21593145 NR Description: unknown [Arabidopsis thaliana]
  misc_feature (1)..(322): Homolog of NCBI NO: 30694751 NR Description: nodulin N21 family protein [Arabidopsis thaliana]
  misc_feature (169)..(274): Homolog of NCBI NO: 7487133 NR Description: hypothetical protein T18B16.150 - Arabidopsis >gi|2828293|emb|CAA16707.1| putative protein [Arabidopsis >gi|7268713|emb|CAB78920.1| putative protein [Arabidopsis
  misc_feature (1)..(49): Homolog of NCBI NO: 7487133 NR Description: hypothetical protein T18B16.150 - Arabidopsis >gi|2828293|emb|CAA16707.1| putative protein [Arabidopsis >gi|7268713|emb|CAB78920.1| putative protein [Arabidopsis
  misc_feature (106)..(152): Homolog of NCBI NO: 7487133 NR Description: hypothetical protein T18B16.150 - Arabidopsis >gi|2828293|emb|CAA16707.1| putative protein [Arabidopsis >gi|7268713|emb|CAB78920.1| putative protein [Arabidopsis
  misc_feature (169)..(322): Homolog of NCBI NO: 9758727 NR Description: nodulin-like protein [Arabidopsis thaliana]
MIGVQLFNGGYHVITKVALNVGVNQLVFCVFRDLIALSILAPLAYIRDKRTRPPLNRQFLLAFFFLGLTGIFGNQLLFLIGLNYTNPTYAAAIQPSIPVFTFILALIMGTERLNLFKLEGQAKVGGTLICVAGAVLMVLFRGLALFGETEAESLGHGESRHTETSGHFMHAPVLKKYPANLSVTAYSYFFGTMFMVTSAFFMTNESTNWSLTRSEFFAVVYAGVIASALNYGLLTWSNKILGPSLVALYNPLQPAASAFLSRIFLGSPIYLGSILGGCAIIAGLYSVTWASYKEKKAAAAMAVIPITSKEAEPLIYKDHKNKPIGHLFTKSPISSPKSDD

SEQ ID NO: 70825 - protein, 233 aa, Arabidopsis thaliana
  peptide (1)..(233): Ceres Seq. ID no. 2999009
  misc_feature (1)..(215): Homolog of NCBI NO: 30694751 NR Description: nodulin N21 family protein [Arabidopsis thaliana]
  misc_feature (62)..(167): Homolog of NCBI NO: 7487133 NR Description: hypothetical protein T18B16.150 - Arabidopsis >gi|2828293|emb|CAA16707.1| putative protein [Arabidopsis >gi|7268713|emb|CAB78920.1| putative protein [Arabidopsis
  misc_feature (1)..(45): Homolog of NCBI NO: 7487133 NR Description: hypothetical protein T18B16.150 - Arabidopsis >gi|2828293|emb|CAA16707.1| putative protein [Arabidopsis >gi|7268713|emb|CAB78920.1| putative protein [Arabidopsis
  misc_feature (62)..(215): Homolog of NCBI NO: 9758727 NR Description: nodulin-like protein [Arabidopsis thaliana]
  misc_feature (1)..(44): Homolog of NCBI NO: 9758727 NR Description: nodulin-like protein [Arabidopsis thaliana]
  misc_feature (1)..(233): Homolog of NCBI NO: 15231274 NR Description: putative protein; protein id: At3g45870.1
  misc_feature (62)..(233): Homolog of NCBI NO: 18415262 NR Description: Expressed protein; protein id: At4g19185.1, by cDNA: 36576., supported by cDNA: gi_16974592 [Arabidopsis >gi|16974593|gb|AAL31201.1| AT4g19180/T18B16_150 [Arabidopsis
  misc_feature (1)..(45): Homolog of NCBI NO: 18415262 NR Description: Expressed protein; protein id: At4g19185.1, by cDNA: 36576., supported by cDNA: gi_16974592 [Arabidopsis >gi|16974593|gb|AAL31201.1| AT4g19180/T18B16_150 [Arabidopsis
  misc_feature (62)..(233): Homolog of NCBI NO: 21593145 NR Description: unknown [Arabidopsis thaliana]
  misc_feature (1)..(45): Homolog of NCBI NO: 21593145 NR Description: unknown [Arabidopsis thaliana]
MGTERLNLFKLEGQAKVGGTLICVAGAVLMVLFRGLALFGETEAESLGHGESRHTETSGHFMHAPVLKKYPANLSVTAYSYFFGTMFMVTSAFFMTNESTNWSLTRSEFFAVVYAGVIASALNYGLLTWSNKILGPSLVALYNPLQPAASAFLSRIFLGSPIYLGSILGGCAIIAGLYSVTWASYKEKKAAAAMAVIPITSKEAEPLIYKDHKNKPIGHLFTKSPISSPKSDD

SEQ ID NO: 70826 - DNA, 849 bp, Arabidopsis thaliana
  misc_feature (1)..(849): Ceres Seq. ID no. 2999210
  misc_feature: MA Experiment ID: 20000180 Result: Up-regulated in Transcription
  misc_feature: MA Experiment 20000180 PARAMETER Experiment Name: At_Germinating_Seeds_P Parameter: Age (hr) Value: 24 vs. 0
  misc_feature: MA Experiment 20000180 PARAMETER Experiment Name: At_Germinating_Seeds_P Parameter: Tissue Value: Germinating Seeds
  misc_feature: MA Experiment ID: 20000184 Result: Down-regulated in Transcription
  misc_feature: MA Experiment 20000184 PARAMETER Experiment Name: At_Shoots__P Parameter: Age (day) Value: 7
  misc_feature: MA Experiment 20000184 PARAMETER Experiment Name: At_Shoots__P Parameter: Tissue Value: Shoots vs. Whole Plant
  misc_feature: MA Experiment ID: 20000185 Result: Up-regulated in Transcription
  misc_feature: MA Experiment 20000185 PARAMETER Experiment Name: At_Roots__P Parameter: Age (day) Value: 7 vs. 21
  misc_feature: MA Experiment 20000185 PARAMETER Experiment Name: At_Roots__P Parameter: Organism Value: A. thaliana
  misc_feature: MA Experiment 20000185 PARAMETER Experiment Name: At_Roots__P Parameter: Tissue Value: Roots vs. Whole Plant
  misc_feature: MA Experiment ID: 20000227 Result: Up-regulated in Transcription
  misc_feature: MA Experiment 20000227 PARAMETER Experiment Name: At_Root-Tips-vs-Tops_P Parameter: Tissue Value: Root Tips vs. Root Tops
  misc_feature: MA Experiment ID: 20000264 Result: Down-regulated in Transcription
  misc_feature: MA Experiment 20000264 PARAMETER Experiment Name: At_Open_Flower_P Parameter: Age (day) Value: 21
  misc_feature: MA Experiment 20000264 PARAMETER Experiment Name: At_Open_Flower_P Parameter: Plant Line Value: WS
  misc_feature: MA Experiment 20000264 PARAMETER Experiment Name: At_Open_Flower_P Parameter: Tissue Value: Open Flower vs. Whole Plant
  misc_feature: MA Experiment ID: 20000438 Result: Down-regulated in Transcription
  misc_feature: MA Experiment 20000438 PARAMETER Experiment Name: At_Shoots__P Parameter: Age (day) Value: 14
  misc_feature: MA Experiment 20000438 PARAMETER Experiment Name: At_Shoots__P Parameter: Tissue Value: Shoots vs. Whole Plant
  misc_feature: MA Experiment ID: 20000439 Result: Up-regulated in Transcription
  misc_feature: MA Experiment 20000439 PARAMETER Experiment Name: At_Roots__P Parameter: Age (day) Value: 14 vs. 21
  misc_feature: MA Experiment 20000439 PARAMETER Experiment Name: At_Roots__P Parameter: Organism Value: A. thaliana
  misc_feature: MA Experiment 20000439 PARAMETER Experiment Name: At_Roots__P Parameter: Tissue Value: Roots vs. Whole Plant
  misc_feature: MA Experiment ID: 20000451 Result: Down-regulated in Transcription
  misc_feature: MA Experiment 20000451 PARAMETER Experiment Name: At_CS6879_Shoots-Roots_P Parameter: Age (day) Value: 14
  misc_feature: MA Experiment 20000451 PARAMETER Experiment Name: At_CS6879_Shoots-Roots_P Parameter: Organism Value: A. thaliana
  misc_feature: MA Experiment 20000451 PARAMETER Experiment Name: At_CS6879_Shoots-Roots_P Parameter: Plant Line Value: CS6879 vs. WS
  misc_feature: MA Experiment 20000451 PARAMETER Experiment Name: At_CS6879_Shoots-Roots_P Parameter: Tissue Value: Roots
  misc_feature: MA Experiment ID: 20001773 Result: Up-regulated in Transcription
  misc_feature: MA Experiment 20001773 PARAMETER Experiment Name: At_Far-red-enriched-adult_P Parameter: Age (day) Value: 30
  misc_feature: MA Experiment 20001773 PARAMETER Experiment Name: At_Far-red-enriched-adult_P Parameter: Light Value: Far-red enriched vs. White
  misc_feature: MA Experiment 20001773 PARAMETER Experiment Name: At_Far-red-enriched-adult_P Parameter: Organism Value: A. thaliana
  misc_feature: MA Experiment 20001773 PARAMETER Experiment Name: At_Far-red-enriched-adult_P Parameter: Plant Line Value: Columbia
  misc_feature: MA Experiment 20001773 PARAMETER Experiment Name: At_Far-red-enriched-adult_P Parameter: Timepoint (hr) Value: 48
  misc_feature: MA Experiment 20001773 PARAMETER Experiment Name: At_Far-red-enriched-adult_P Parameter: Tissue Value: Aerial
atggattgctcaatctgcaccacaatgccatctatattaagaccaccaagaaacacaatatgtggatcatgctacgaaggggctagaacaacaattgcgctgctcaagaaacttgagggctcgaaagaagatcgtcatgacaaatcgaaccataattccaccatcaataatggctcctctatttcttcgtctcctttgttttcttgtgagccgcaaccattagagaaggtgatcaaatggatgaaaaacatgaaagaaaccgaagaagaacagaagaaaagaatagtcttcttaagcagctttgtgtcgggtttcaaagaacagcttcatgctgatattcttctaaaaccgggcgatgatggccctccaattcctgcacatagagctttgctggcttcaaaatctgagatctttaagaacattctagactcagatggatgcaaaaccgctccagaatacgccataacgctccaagaactaaattccgagcaacttcaagctctcttggagtttctatacaccggtacattggcttcagataagttggagaaaaatgtctacgcgttgtttattgcagcagataagtacatgattcattacttgcaagagttgtgcgagcaatatatgttaagttccttggacatctctagtgttcttaacgttcttgatgtctcggatcttggttcgagcaagacgctgaaggaggcttgtgtagggttcgtggtgcggaacatggacgacgtcgttttctcggataagtacgaacctttctctcagaaaaaccaacatctatgtgtggagatcacaagggcgttcttgatggaaacgagaagcaagagacgtgactaa

SEQ ID NO: 70827 - protein, 282 aa, Arabidopsis thaliana
  peptide (1)..(282): Ceres Seq. ID no. 2999211
  misc_feature (105)..(213): Pfam Name: BTB/POZ domain Pfam Description: BTB/POZ domain
  misc_feature (1)..(282): Homolog of NCBI NO: 15228868 NR Description: putative protein; protein id: At3g56230.1
  misc_feature (87)..(282): Homolog of NCBI NO: 15223447 NR Description: hypothetical protein; protein id: At1g01640.1
  misc_feature (87)..(282): Homolog of NCBI NO: 33589788 NR Description: At3g01790 [Arabidopsis thaliana]
  misc_feature (91)..(281): Homolog of NCBI NO: 15226686 NR Description: hypothetical protein; protein id: At2g40450.1
  misc_feature (107)..(274): Homolog of NCBI NO: 15238994 NR Description: putative protein; protein id: At5g48510.1 thaliana] >gi|8777381|dbj|BAA96971.1|
  misc_feature (130)..(278): Homolog of NCBI NO: 15224510 NR Description: hypothetical protein; protein id: At2g05330.1
  misc_feature (91)..(271): Homolog of NCBI NO: 15233388 NR Description: hypothetical protein; protein id: At4g04090.1
  misc_feature (82)..(273): Homolog of NCBI NO: 22328490 NR Description: hypothetical protein; protein id: At4g08455.1
  misc_feature (86)..(273): Homolog of NCBI NO: 34900926 NR Description: Speckle-type POZ protein-like~contains ESTs
  misc_feature (82)..(273): Homolog of NCBI NO: 17552682 NR Description: MATH domain and BTB/POZ domain containing protein member [Caenorhabditis elegans] >gi|465837|sp|P34371|YLJ8_CAEEL
MDCSICTTMPSILRPPRNTICGSCYEGARTTIALLKKLEGSKEDRHDKSNHNSTINNGSSISSSPLFSCEPQPLEKVIKWMKNMKETEEEQKKRIVFLSSFVSGFKEQLHADILLKPGDDGPPIPAHRALLASKSEIFKNILDSDGCKTAPEYAITLQELNSEQLQALLEFLYTGTLASDKLEKNVYALFIAADKYMIHYLQELCEQYMLSSLDISSVLNVLDVSDLGSSKTLKEACVGFVVRNMDDVVFSDKYEPFSQKNQHLCVEITRAFLMETRSKRRD

SEQ ID NO: 70828 - protein, 274 aa, Arabidopsis thaliana
  peptide (1)..(274): Ceres Seq. ID no. 2999212
  misc_feature (97)..(205): Pfam Name: BTB/POZ domain Pfam Description: BTB/POZ domain
  misc_feature (1)..(274): Homolog of NCBI NO: 15228868 NR Description: putative protein; protein id: At3g56230.1
  misc_feature (79)..(274): Homolog of NCBI NO: 15223447 NR Description: hypothetical protein; protein id: At1g01640.1
  misc_feature (79)..(274): Homolog of NCBI NO: 33589788 NR Description: At3g01790 [Arabidopsis thaliana]
  misc_feature (83)..(273): Homolog of NCBI NO: 15226686 NR Description: hypothetical protein; protein id: At2g40450.1
  misc_feature (99)..(266): Homolog of NCBI NO: 15238994 NR Description: putative protein; protein id: At5g48510.1 thaliana] >gi|8777381|dbj|BAA96971.1|
  misc_feature (122)..(270): Homolog of NCBI NO: 15224510 NR Description: hypothetical protein; protein id: At2g05330.1
  misc_feature (83)..(263): Homolog of NCBI NO: 15233388 NR Description: hypothetical protein; protein id: At4g04090.1
  misc_feature (74)..(265): Homolog of NCBI NO: 22328490 NR Description: hypothetical protein; protein id: At4g08455.1
  misc_feature (78)..(265): Homolog of NCBI NO: 34900926 NR Description: Speckle-type POZ protein-like~contains ESTs
  misc_feature (74)..(265): Homolog of NCBI NO: 17552682 NR Description: MATH domain and BTB/POZ domain containing protein member [Caenorhabditis elegans] >gi|465837|sp|P34371|YLJ8_CAEEL
MPSILRPPRNTICGSCYEGARTTIALLKKLEGSKEDRHDKSNHNSTINNGSSISSSPLFSCEPQPLEKVIKWMKNMKETEEEQKKRIVFLSSFVSGFKEQLHADILLKPGDDGPPIPAHRALLASKSEIFKNILDSDGCKTAPEYAITLQELNSEQLQALLEFLYTGTLASDKLEKNVYALFIAADKYMIHYLQELCEQYMLSSLDISSVLNVLDVSDLGSSKTLKEACVGFVVRNMDDVVFSDKYEPFSQKNQHLCVEITRAFLMETRSKRRD

SEQ ID NO: 70829 - protein, 202 aa, Arabidopsis thaliana
  peptide (1)..(202): Ceres Seq. ID no. 2999213
  misc_feature (25)..(133): Pfam Name: BTB/POZ domain Pfam Description: BTB/POZ domain
  misc_feature (1)..(202): Homolog of NCBI NO: 15228868 NR Description: putative protein; protein id: At3g56230.1
  misc_feature (7)..(202): Homolog of NCBI NO: 15223447 NR Description: hypothetical protein; protein id: At1g01640.1
  misc_feature (7)..(202): Homolog of NCBI NO: 33589788 NR Description: At3g01790 [Arabidopsis thaliana]
  misc_feature (11)..(201): Homolog of NCBI NO: 15226686 NR Description: hypothetical protein; protein id: At2g40450.1
  misc_feature (27)..(194): Homolog of NCBI NO: 15238994 NR Description: putative protein; protein id: At5g48510.1 thaliana] >gi|8777381|dbj|BAA96971.1|
  misc_feature (50)..(198): Homolog of NCBI NO: 15224510 NR Description: hypothetical protein; protein id: At2g05330.1
  misc_feature (11)..(191): Homolog of NCBI NO: 15233388 NR Description: hypothetical protein; protein id: At4g04090.1
  misc_feature (2)..(193): Homolog of NCBI NO: 22328490 NR Description: hypothetical protein; protein id: At4g08455.1
  misc_feature (6)..(193): Homolog of NCBI NO: 34900926 NR Description: Speckle-type POZ protein-like~contains ESTs
  misc_feature (2)..(193): Homolog of NCBI NO: 17552682 NR Description: MATH domain and BTB/POZ domain containing protein member [Caenorhabditis elegans] >gi|465837|sp|P34371|YLJ8_CAEEL
MKNMKETEEEQKKRIVFLSSFVSGFKEQLHADILLKPGDDGPPIPAHRALLASKSEIFKNILDSDGCKTAPEYAITLQELNSEQLQALLEFLYTGTLASDKLEKNVYALFIAADKYMIHYLQELCEQYMLSSLDISSVLNVLDVSDLGSSKTLKEACVGFVVRNMDDVVFSDKYEPFSQKNQHLCVEITRAFLMETRSKRRD

SEQ ID NO: 70830 - DNA, 1719 bp, Arabidopsis thaliana
  misc_feature (1)..(1719): Ceres Seq. ID no. 2999252
  misc_feature: MA Experiment ID: 20000069 Result: Up-regulated in Transcription
  misc_feature: MA Experiment 20000069 PARAMETER Experiment Name: At_100uM_ABA_Mutants_cDNA_P Parameter: Plant Line Value: CS23
  misc_feature: MA Experiment 20000069 PARAMETER Experiment Name: At_100uM_ABA_Mutants_cDNA_P Parameter: Timepoint (hr) Value: 6
  misc_feature: MA Experiment 20000069 PARAMETER Experiment Name: At_100uM_ABA_Mutants_cDNA_P Parameter: Tissue Value: Aerial
  misc_feature: MA Experiment 20000069 PARAMETER Experiment Name: At_100uM_ABA_Mutants_cDNA_P Parameter: Treatment Value: 100uM ABA vs. No Treatment
  misc_feature: MA Experiment ID: 20000070 Result: Up-regulated in Transcription
  misc_feature: MA Experiment 20000070 PARAMETER Experiment Name: At_100uM_ABA_Mutants_cDNA_P Parameter: Plant Line Value: CS24
  misc_feature: MA Experiment 20000070 PARAMETER Experiment Name: At_100uM_ABA_Mutants_cDNA_P Parameter: Timepoint (hr) Value: 6
  misc_feature: MA Experiment 20000070 PARAMETER Experiment Name: At_100uM_ABA_Mutants_cDNA_P Parameter: Tissue Value: Aerial
  misc_feature: MA Experiment 20000070 PARAMETER Experiment Name: At_100uM_ABA_Mutants_cDNA_P Parameter: Treatment Value: 100uM ABA vs. No Treatment
  misc_feature: MA Experiment ID: 20000071 Result: Up-regulated in Transcription
  misc_feature: MA Experiment 20000071 PARAMETER Experiment Name: At_100uM_ABA_Mutants_cDNA_P Parameter: Plant Line Value: CS8104
  misc_feature: MA Experiment 20000071 PARAMETER Experiment Name: At_100uM_ABA_Mutants_cDNA_P Parameter: Timepoint (hr) Value: 6
  misc_feature: MA Experiment 20000071 PARAMETER Experiment Name: At_100uM_ABA_Mutants_cDNA_P Parameter: Tissue Value: Aerial
  misc_feature: MA Experiment 20000071 PARAMETER Experiment Name: At_100uM_ABA_Mutants_cDNA_P Parameter: Treatment Value: 100uM ABA vs. No Treatment
  misc_feature: MA Experiment ID: 20000117 Result: Up-regulated in Transcription
  misc_feature: MA Experiment 20000117 PARAMETER Experiment Name: At_100uM_ABA_Mutants_cDNA_P Parameter: Plant Line Value: Columbia
  misc_feature: MA Experiment 20000117 PARAMETER Experiment Name: At_100uM_ABA_Mutants_cDNA_P Parameter: Timepoint (hr) Value: 6
  misc_feature: MA Experiment 20000117 PARAMETER Experiment Name: At_100uM_ABA_Mutants_cDNA_P Parameter: Tissue Value: Aerial
  misc_feature: MA Experiment 20000117 PARAMETER Experiment Name: At_100uM_ABA_Mutants_cDNA_P Parameter: Treatment Value: 100uM ABA vs. No Treatment
  misc_feature: MA Experiment ID: 20000171 Result: Down-regulated in Transcription
  misc_feature: MA Experiment 20000171 PARAMETER Experiment Name: At_42deg_Heat_P Parameter: Age (day) Value: 14
  misc_feature: MA Experiment 20000171 PARAMETER Experiment Name: At_42deg_Heat_P Parameter: Organism Value: A. thaliana
  misc_feature: MA Experiment 20000171 PARAMETER Experiment Name: At_42deg_Heat_P Parameter: Plant Line Value: WS
  misc_feature: MA Experiment 20000171 PARAMETER Experiment Name: At_42deg_Heat_P Parameter: Temperature (deg C) Value: 42 vs. 22
  misc_feature: MA Experiment 20000171 PARAMETER Experiment Name: At_42deg_Heat_P Parameter: Timepoint (hr) Value: 1
  misc_feature: MA Experiment 20000171 PARAMETER Experiment Name: At_42deg_Heat_P Parameter: Tissue Value: Aerial
  misc_feature: MA Experiment ID: 20000173 Result: Down-regulated in Transcription
  misc_feature: MA Experiment 20000173 PARAMETER Experiment Name: At_42deg_Heat_P Parameter: Age (day) Value: 14
  misc_feature: MA Experiment 20000173 PARAMETER Experiment Name: At_42deg_Heat_P Parameter: Organism Value: A. thaliana
  misc_feature: MA Experiment 20000173 PARAMETER Experiment Name: At_42deg_Heat_P Parameter: Plant Line Value: WS
  misc_feature: MA Experiment 20000173 PARAMETER Experiment Name: At_42deg_Heat_P Parameter: Temperature (deg C) Value: 42 vs. 22
  misc_feature: MA Experiment 20000173 PARAMETER Experiment Name: At_42deg_Heat_P Parameter: Timepoint (hr) Value: 6
  misc_feature: MA Experiment 20000173 PARAMETER Experiment Name: At_42deg_Heat_P Parameter: Tissue Value: Aerial
  misc_feature: MA Experiment ID: 20000224 Result: Down-regulated in Transcription
  misc_feature: MA Experiment ID: 20000234 Result: Up-regulated in Transcription
  misc_feature: MA Experiment 20000234 PARAMETER Experiment Name: At_Siliques_P Parameter: Age (day) Value: 21
  misc_feature: MA Experiment 20000234 PARAMETER Experiment Name: At_Siliques_P Parameter: Organism Value: A. thaliana
  misc_feature: MA Experiment 20000234 PARAMETER Experiment Name: At_Siliques_P Parameter: Plant Line Value: WS
  misc_feature: MA Experiment 20000234 PARAMETER Experiment Name: At_Siliques_P Parameter: Tissue Value: Less Than 5mm Siliques vs. Whole Plant
  misc_feature: MA Experiment ID: 20000235 Result: Up-regulated in Transcription
  misc_feature: MA Experiment 20000235 PARAMETER Experiment Name: At_Siliques_P Parameter: Age (day) Value: 21
  misc_feature: MA Experiment 20000235 PARAMETER Experiment Name: At_Siliques_P Parameter: Organism Value: A. thaliana
  misc_feature: MA Experiment 20000235 PARAMETER Experiment Name: At_Siliques_P Parameter: Plant Line Value: WS
  misc_feature: MA Experiment 20000235 PARAMETER Experiment Name: At_Siliques_P Parameter: Tissue Value: 5-10mm Siliques vs. Whole Plant
  misc_feature: MA Experiment ID: 20000437 Result: Up-regulated in Transcription
  misc_feature: MA Experiment 20000437 PARAMETER Experiment Name: At_Drought_P Parameter: Age (day) Value: 8
  misc_feature: MA Experiment 20000437 PARAMETER Experiment Name: At_Drought_P Parameter: Organism Value: A. thaliana
  misc_feature: MA Experiment 20000437 PARAMETER Experiment Name: At_Drought_P Parameter: Plant Line Value: WS
  misc_feature: MA Experiment 20000437 PARAMETER Experiment Name: At_Drought_P Parameter: Timepoint (hr) Value: 24
  misc_feature: MA Experiment 20000437 PARAMETER Experiment Name: At_Drought_P Parameter: Tissue Value: Whole Plant
  misc_feature: MA Experiment 20000437 PARAMETER Experiment Name: At_Drought_P Parameter: Treatment Value: Drought vs. No Drought
  misc_feature: MA Experiment ID: 20000439 Result: Up-regulated in Transcription
  misc_feature: MA Experiment 20000439 PARAMETER Experiment Name: At_Roots__P Parameter: Age (day) Value: 14 vs. 21
  misc_feature: MA Experiment 20000439 PARAMETER Experiment Name: At_Roots__P Parameter: Organism Value: A. thaliana
  misc_feature: MA Experiment 20000439 PARAMETER Experiment Name: At_Roots__P Parameter: Tissue Value: Roots vs. Whole Plant
atggcgactccgacggagctaggtttctcttcacctggtggtggtggtgacgactctgacgataaccctccacagaagcgtacttcaaaacgtactgcttccgaaacagcaacagaagaagaaacgaagaagaagaaaaagaagaagacgaagcacaacacaaaaatggcttctcctccgagcaaccggatctggaacgaagaagacgagctctctatcttaaagggattggtggattttcgagctaaaacaggactcgaatccaaaattgattgggatgcgttttattgttacgtcaaaggttccattcatgtgaaagtttccaagtgccagcttatgagtaagaccaggaagttgaagaagaagttccttgatcaaatggagaaaatcgatcaaggaaatgatccacattttactaggtctagtgaaactgaagcttttggatattccatgatgatttggcgtaaaattgatgctgaatacactaatggtgttatggataaagcacatcaaagcgagagtggagaggaggtgtttgaggaggatgaggaagtggccttaattgacaaaggggctgcgaaaagtggcaagtcacctcatgaagctgttgttgttgttgacaaaataactacgaagaagaacgggactgctggaaaagagagtgatgatgatgatgatgatgtgttgtgtgctgtgcgggatgcgtttgagaccaccatgatgtcgcaaggattaagtgattatcaaaagaagttgcagcttgagaagctgatgaaccttggaactggtaaaagaagagagttgagcaatgaatggaaagcactatgtgttgaggaactaaaattgaatatcaacaagcttcgattttccgccaagcttgcagaggcagcaaatgatgattattcttcttcttcttcttcttccattgtctcttgggttgagattccgatctcaatgtcgatcaatatcggagaaatctcaattccagaccttcctatcttcttctccatgttcttaaccatctacctaatcgcttacttcatcgtcttccgcaattggaaaccacaaatccgtcccgaagcttcaagctgcctgatctcaatcttccatggatctccagcggttttcctcgccacacgcgcagttttctcctcctccgaacgctccttcgcctccgcaaacaccgccgcacaaaacaccgtcctcgatttcagcgtcgcttacttcctcaccgatctcttccactacatcgtcttcaaccctaacgacgtactcttcatcggccatcacgtagccactctattcgtcttcctaacctgcagattcctcgtcttccacggggcttgcgccatcttaggcctcctgattctagctgaagtaacaagcgcgtgtcagaacgcgtggacgctcgccggagcaaggaagaatgatccggaatcacgattagctgtgaaagtgtacgatctcttgtctcctccgttttacgccttctacagtatcgttaggggtgtgttgggacctttgtttttcgggaaaatggtagcgttttacgctcgaggtggtgctcatggtgtgatacctaattggttgtggatttcttgggcaattgttgttggaattgctattactgttagtatactttggatttggaatctctggatagaattgtttagtgaaaggaaagctaacaaaatcagagtagacaagaaaattagatag

SEQ ID NO: 70831 - protein, 572 aa, Arabidopsis thaliana
  peptide (1)..(572): Ceres Seq. ID no. 2999253
  misc_feature (59)..(156): Pfam Name: Protein of unknown function, DUF573 Pfam Description: Protein of unknown function, DUF573
  misc_feature (1)..(572): Homolog of NCBI NO: 15241364 NR Description: putative protein; protein id: At5g14280.1
  misc_feature (319)..(572): Homolog of NCBI NO: 26450181 NR Description: unknown protein [Arabidopsis thaliana]
  misc_feature (1)..(168): Homolog of NCBI NO: 18400896 NR Description: expressed protein; protein id: At2g25650.1, by cDNA: 100283., supported by cDNA: gi_18176115, supported by gi_20465306 [Arabidopsis thaliana] >gi|18176116|gb|AAL59986.1|
  misc_feature (163)..(299): Homolog of NCBI NO: 18400896 NR Description: expressed protein; protein id: At2g25650.1, by cDNA: 100283., supported by cDNA: gi_18176115, supported by gi_20465306 [Arabidopsis thaliana] >gi|18176116|gb|AAL59986.1|
  misc_feature (1)..(299): Homolog of NCBI NO: 18411272 NR Description: contains similarity to S. cerevisiae ADR1 gene protein id: At4g00270.1, supported by cDNA: gi_13605528, by cDNA: gi_18491132 [Arabidopsis thaliana]
  misc_feature (330)..(572): Homolog of NCBI NO: 15232128 NR Description: unknown protein; protein id: At3g27270.1 thaliana] >gi|9294220|dbj|BAB02122.1| gene_id:K17E12.9~unknown
  misc_feature (1)..(299): Homolog of NCBI NO: 25412336 NR Description: hypothetical protein At2g25650 [imported] -
  misc_feature (1)..(299): Homolog of NCBI NO: 7485258 NR Description: hypothetical protein A_IG005I10.11 - Arabidopsis >gi|2252832|gb|AAB62831.1| contains similarity to S. cerevisiae gene (PID:g924931) [Arabidopsis thaliana]
  misc_feature (332)..(564): Homolog of NCBI NO: 15230950 NR Description: hypothetical protein; protein id: At3g25950.1
  misc_feature (332)..(572): Homolog of NCBI NO: 9279600 NR Description: gene_id:MPE11.12~unknown protein [Arabidopsis
MATPTELGFSSPGGGGDDSDDNPPQKRTSKRTASETATEEETKKKKKKKTKHNTKMASPPSNRIWNEEDELSILKGLVDFRAKTGLESKIDWDAFYCYVKGSIHVKVSKCQLMSKTRKLKKKFLDQMEKIDQGNDPHFTRSSETEAFGYSMMIWRKIDAEYTNGVMDKAHQSESGEEVFEEDEEVALIDKGAAKSGKSPHEAVVVVDKITTKKNGTAGKESDDDDDDVLCAVRDAFETTMMSQGLSDYQKKLQLEKLMNLGTGKRRELSNEWKALCVEELKLNINKLRFSAKLAEAANDDYSSSSSSSIVSWVEIPISMSINIGEISIPDLPIFFSMFLTIYLIAYFIVFRNWKPQIRPEASSCLISIFHGSPAVFLATRAVFSSSERSFASANTAAQNTVLDFSVAYFLTDLFHYIVFNPNDVLFIGHHVATLFVFLTCRFLVFHGACAILGLLILAEVTSACQNAWTLAGARKNDPESRLAVKVYDLLSPPFYAFYSIVRGVLGPLFFGKMVAFYARGGAHGVIPNWLWISWAIVVGIAITVSILWIWNLWIELFSERKANKIRVDKKIR

SEQ ID NO: 70832 - protein, 517 aa, Arabidopsis thaliana
  peptide (1)..(517): Ceres Seq. ID no. 2999254
  misc_feature (4)..(101): Pfam Name: Protein of unknown function, DUF573 Pfam Description: Protein of unknown function, DUF573
  misc_feature (1)..(517): Homolog of NCBI NO: 15241364 NR Description: putative protein; protein id: At5g14280.1
  misc_feature (264)..(517): Homolog of NCBI NO: 26450181 NR Description: unknown protein [Arabidopsis thaliana]
  misc_feature (1)..(113): Homolog of NCBI NO: 18400896 NR Description: expressed protein; protein id: At2g25650.1, by cDNA: 100283., supported by cDNA: gi_18176115, supported by gi_20465306 [Arabidopsis thaliana] >gi|18176116|gb|AAL59986.1|
  misc_feature (108)..(244): Homolog of NCBI NO: 18400896 NR Description: expressed protein; protein id: At2g25650.1, by cDNA: 100283., supported by cDNA: gi_18176115, supported by gi_20465306 [Arabidopsis thaliana] >gi|18176116|gb|AAL59986.1|
  misc_feature (1)..(244): Homolog of NCBI NO: 18411272 NR Description: contains similarity to S. cerevisiae ADR1 gene protein id: At4g00270.1, supported by cDNA: gi_13605528, by cDNA: gi_18491132 [Arabidopsis thaliana]
  misc_feature (275)..(517): Homolog of NCBI NO: 15232128 NR Description: unknown protein; protein id: At3g27270.1 thaliana] >gi|9294220|dbj|BAB02122.1| gene_id:K17E12.9~unknown
  misc_feature (1)..(244): Homolog of NCBI NO: 25412336 NR Description: hypothetical protein At2g25650 [imported] -
  misc_feature (1)..(244): Homolog of NCBI NO: 7485258 NR Description: hypothetical protein A_IG005I10.11 - Arabidopsis >gi|2252832|gb|AAB62831.1| contains similarity to S. cerevisiae gene (PID:g924931) [Arabidopsis thaliana]
  misc_feature (277)..(509): Homolog of NCBI NO: 15230950 NR Description: hypothetical protein; protein id: At3g25950.1
  misc_feature (277)..(517): Homolog of NCBI NO: 9279600 NR Description: gene_id:MPE11.12~unknown protein [Arabidopsis
MASPPSNRIWNEEDELSILKGLVDFRAKTGLESKIDWDAFYCYVKGSIHVKVSKCQLMSKTRKLKKKFLDQMEKIDQGNDPHFTRSSETEAFGYSMMIWRKIDAEYTNGVMDKAHQSESGEEVFEEDEEVALIDKGAAKSGKSPHEAVVVVDKITTKKNGTAGKESDDDDDDVLCAVRDAFETTMMSQGLSDYQKKLQLEKLMNLGTGKRRELSNEWKALCVEELKLNINKLRFSAKLAEAANDDYSSSSSSSIVSWVEIPISMSINIGEISIPDLPIFFSMFLTIYLIAYFIVFRNWKPQIRPEASSCLISIFHGSPAVFLATRAVFSSSERSFASANTAAQNTVLDFSVAYFLTDLFHYIVFNPNDVLFIGHHVATLFVFLTCRFLVFHGACAILGLLILAEVTSACQNAWTLAGARKNDPESRLAVKVYDLLSPPFYAFYSIVRGVLGPLFFGKMVAFYARGGAHGVIPNWLWISWAIVVGIAITVSILWIWNLWIELFSERKANKIRVDKKIR

SEQ ID NO: 70833 - protein, 460 aa, Arabidopsis thaliana
  peptide (1)..(460): Ceres Seq. ID no. 2999255
  misc_feature (1)..(460): Homolog of NCBI NO: 15241364 NR Description: putative protein; protein id: At5g14280.1
  misc_feature (207)..(460): Homolog of NCBI NO: 26450181 NR Description: unknown protein [Arabidopsis thaliana]
  misc_feature (1)..(56): Homolog of NCBI NO: 18400896 NR Description: expressed protein; protein id: At2g25650.1, by cDNA: 100283., supported by cDNA: gi_18176115, supported by gi_20465306 [Arabidopsis thaliana] >gi|18176116|gb|AAL59986.1|
  misc_feature (51)..(187): Homolog of NCBI NO: 18400896 NR Description: expressed protein; protein id: At2g25650.1, by cDNA: 100283., supported by cDNA: gi_18176115, supported by gi_20465306 [Arabidopsis thaliana] >gi|18176116|gb|AAL59986.1|
  misc_feature (1)..(187): Homolog of NCBI NO: 18411272 NR Description: contains similarity to S. cerevisiae ADR1 gene protein id: At4g00270.1, supported by cDNA: gi_13605528, by cDNA: gi_18491132 [Arabidopsis thaliana]
  misc_feature (218)..(460): Homolog of NCBI NO: 15232128 NR Description: unknown protein; protein id: At3g27270.1 thaliana] >gi|9294220|dbj|BAB02122.1| gene_id:K17E12.9~unknown
  misc_feature (1)..(187): Homolog of NCBI NO: 25412336 NR Description: hypothetical protein At2g25650 [imported] -
  misc_feature (1)..(187): Homolog of NCBI NO: 7485258 NR Description: hypothetical protein A_IG005I10.11 - Arabidopsis >gi|2252832|gb|AAB62831.1| contains similarity to S. cerevisiae gene (PID:g924931) [Arabidopsis thaliana]
  misc_feature (220)..(452): Homolog of NCBI NO: 15230950 NR Description: hypothetical protein; protein id: At3g25950.1
  misc_feature (220)..(460): Homolog of NCBI NO: 9279600 NR Description: gene_id:MPE11.12~unknown protein [Arabidopsis
MSKTRKLKKKFLDQMEKIDQGNDPHFTRSSETEAFGYSMMIWRKIDAEYTNGVMDKAHQSESGEEVFEEDEEVALIDKGAAKSGKSPHEAVVVVDKITTKKNGTAGKESDDDDDDVLCAVRDAFETTMMSQGLSDYQKKLQLEKLMNLGTGKRRELSNEWKALCVEELKLNINKLRFSAKLAEAANDDYSSSSSSSIVSWVEIPISMSINIGEISIPDLPIFFSMFLTIYLIAYFIVFRNWKPQIRPEASSCLISIFHGSPAVFLATRAVFSSSERSFASANTAAQNTVLDFSVAYFLTDLFHYIVFNPNDVLFIGHHVATLFVFLTCRFLVFHGACAILGLLILAEVTSACQNAWTLAGARKNDPESRLAVKVYDLLSPPFYAFYSIVRGVLGPLFFGKMVAFYARGGAHGVIPNWLWISWAIVVGIAITVSILWIWNLWIELFSERKANKIRVDKKIR

SEQ ID NO: 70834 - DNA, 798 bp, Arabidopsis thaliana
  misc_feature (1)..(798): Ceres Seq. ID no. 2999911
  misc_feature: MA Experiment ID: 20000307 Result: Up-regulated in Transcription
  misc_feature: MA Experiment 20000307 PARAMETER Experiment Name: At_Germinating_Seeds_Sub_P Parameter: Age (hr) Value: 24 vs. 0
  misc_feature: MA Experiment 20000307 PARAMETER Experiment Name: At_Germinating_Seeds_Sub_P Parameter: Organism Value: A. thaliana
  misc_feature: MA Experiment 20000307 PARAMETER Experiment Name: At_Germinating_Seeds_Sub_P Parameter: Plant Line Value: WS
  misc_feature: MA Experiment 20000307 PARAMETER Experiment Name: At_Germinating_Seeds_Sub_P Parameter: Tissue Value: Germinating Seeds
  misc_feature: MA Experiment ID: 20000314 Result: Up-regulated in Transcription
  misc_feature: MA Experiment 20000314 PARAMETER Experiment Name: At_14day_Shoots-Roots_Sub_P Parameter: Age (day) Value: 14
  misc_feature: MA Experiment 20000314 PARAMETER Experiment Name: At_14day_Shoots-Roots_Sub_P Parameter: Organism Value: A. thaliana
  misc_feature: MA Experiment 20000314 PARAMETER Experiment Name: At_14day_Shoots-Roots_Sub_P Parameter: Plant Line Value: WS
  misc_feature: MA Experiment 20000314 PARAMETER Experiment Name: At_14day_Shoots-Roots_Sub_P Parameter: Tissue Value: Roots vs. Whole Plant
  misc_feature: MA Experiment ID: 20000327 Result: Down-regulated in Transcription
  misc_feature: MA Experiment 20000327 PARAMETER Experiment Name: At_42deg_Heat_Sub_P Parameter: Age (day) Value: 14
  misc_feature: MA Experiment 20000327 PARAMETER Experiment Name: At_42deg_Heat_Sub_P Parameter: Organism Value: A. thaliana
  misc_feature: MA Experiment 20000327 PARAMETER Experiment Name: At_42deg_Heat_Sub_P Parameter: Plant Line Value: WS
  misc_feature: MA Experiment 20000327 PARAMETER Experiment Name: At_42deg_Heat_Sub_P Parameter: Temperature (deg C) Value: 42 vs. 22
  misc_feature: MA Experiment 20000327 PARAMETER Experiment Name: At_42deg_Heat_Sub_P Parameter: Timepoint (hr) Value: 1
  misc_feature: MA Experiment 20000327 PARAMETER Experiment Name: At_42deg_Heat_Sub_P Parameter: Tissue Value: Aerial
  misc_feature: MA Experiment ID: 20000328 Result: Down-regulated in Transcription
  misc_feature: MA Experiment 20000328 PARAMETER Experiment Name: At_42deg_Heat_Sub_P Parameter: Age (day) Value: 14
  misc_feature: MA Experiment 20000328 PARAMETER Experiment Name: At_42deg_Heat_Sub_P Parameter: Organism Value: A. thaliana
  misc_feature: MA Experiment 20000328 PARAMETER Experiment Name: At_42deg_Heat_Sub_P Parameter: Plant Line Value: WS
  misc_feature: MA Experiment 20000328 PARAMETER Experiment Name: At_42deg_Heat_Sub_P Parameter: Temperature (deg C) Value: 42 vs. 22
  misc_feature: MA Experiment 20000328 PARAMETER Experiment Name: At_42deg_Heat_Sub_P Parameter: Timepoint (hr) Value: 6
  misc_feature: MA Experiment 20000328 PARAMETER Experiment Name: At_42deg_Heat_Sub_P Parameter: Tissue Value: Aerial
  misc_feature: MA Experiment ID: 20000440 Result: Down-regulated in Transcription
  misc_feature: MA Experiment 20000440 PARAMETER Experiment Name: At_Closed-Flower__Sub_P Parameter: Tissue Value: Closed Flower vs. Whole Plant
  misc_feature: Pfam Name: Hin1 Pfam Description: Harpin-induced protein 1 (Hin1)
atggcgggagagactctacttaaaccggtgcttcaaaaaccaccaggctaccgtgagctccactcgcaacctcaaactccactcggttcatcttcatcatcatcatcaatgcttcgtcgcccaccaaaacatgccattcctgcggcgttttatccgacgaagaagagacaatggagtcgttgccgcgtcttttgctgctgcgtctgcatcaccgtcgccattgtcattctcctccttatcctcaccgtctccgttttctttctttattacagcccgagactccccgtcgtacgtctctcctctttccgcgtcagcaatttcaacttttccggtgggaaagccggcgacggtttatcgcagttgacggcggaggctacagcgaggcttgatttcagaaaccctaacgggaagttacgttactattacggtaacgttgacgtggcggtgagtgtaggagaagatgatttcgaaacgagtctcgggtcaacgaaagtcaaaggatttgtggagaagccagggaatcggacggttgtgattgttccgataaaagtgaagaagcaacaggtggatgatccgacggttaagaggctaagagcggacatgaagagtaaaaagttggtggtgaaagtgatggctaaaacgaaggtaggattgggtgtgggaaggcgtaagattgttacggtgggggttactatcagttgcggtggcgtgagattacaaacgcttgattcaaagatgagtaaatgcaccatcaaaatgcttaaatggtacgtacctatccaagttaaatgtatatga

SEQ ID NO: 70835 - protein, 265 aa, Arabidopsis thaliana
  peptide (1)..(265): Ceres Seq. ID no. 2999912
  misc_feature: Pfam Name: Hin1 Pfam Description: Harpin-induced protein 1 (Hin1)
  misc_feature (1)..(265): Homolog of NCBI NO: 15234066 NR Description: hypothetical protein; protein id: At4g01110.1
  misc_feature (1)..(258): Homolog of NCBI NO: 25518342 NR Description: hypothetical protein F22L4.1 [imported] - thaliana >gi|8920583|gb|AAF81305.1|AC061957_1 Contains similarity a photoreceptor from Ceratodon purpureus gb|Y10901 and contains
  misc_feature (7)..(257): Homolog of NCBI NO: 25408980 NR Description: hypothetical protein At2g46300 [imported] - thaliana >gi|3702319|gb|AAC62876.1| hypothetical protein
  misc_feature (7)..(261): Homolog of NCBI NO: 30690312 NR Description: expressed protein [Arabidopsis thaliana]
  misc_feature (7)..(261): Homolog of NCBI NO: 26449684 NR Description: unknown protein [Arabidopsis thaliana]
  misc_feature (47)..(239): Homolog of NCBI NO: 11762174 NR Description: At1g17620 [Arabidopsis thaliana]
  misc_feature (47)..(239): Homolog of NCBI NO: 18394509 NR Description: expressed protein; protein id: At1g17620.1, by cDNA: gi_13358204, supported by cDNA: gi_15450634, supported cDNA: gi_17386165 [Arabidopsis thaliana]
  misc_feature (41)..(236): Homolog of NCBI NO: 34914304 NR Description: B1151A10.19 [Oryza sativa (japonica
  misc_feature (41)..(256): Homolog of NCBI NO: 18401317 NR Description: expressed protein; protein id: At2g27080.1, by cDNA: gi_13877664, supported by cDNA: gi_15450380, supported cDNA: gi_16974488 [Arabidopsis thaliana] >gi|25407856|pir||E84668
  misc_feature (41)..(252): Homolog of NCBI NO: 15221846 NR Description: hypothetical protein; protein id: At1g54540.1
MAGETLLKPVLQKPPGYRELHSQPQTPLGSSSSSSSMLRRPPKHAIPAAFYPTKKRQWSRCRVFCCCVCITVAIVILLLILTVSVFFLYYSPRLPVVRLSSFRVSNFNFSGGKAGDGLSQLTAEATARLDFRNPNGKLRYYYGNVDVAVSVGEDDFETSLGSTKVKGFVEKPGNRTVVIVPIKVKKQQVDDPTVKRLRADMKSKKLVVKVMAKTKVGLGVGRRKIVTVGVTISCGGVRLQTLDSKMSKCTIKMLKWYVPIQVKCI

SEQ ID NO: 70836 - protein, 229 aa, Arabidopsis thaliana
  peptide (1)..(229): Ceres Seq. ID no. 2999913
  misc_feature: Pfam Name: Hin1 Pfam Description: Harpin-induced protein 1 (Hin1)
  misc_feature (1)..(229): Homolog of NCBI NO: 15234066 NR Description: hypothetical protein; protein id: At4g01110.1
  misc_feature (1)..(222): Homolog of NCBI NO: 25518342 NR Description: hypothetical protein F22L4.1 [imported] - thaliana >gi|8920583|gb|AAF81305.1|AC061957_1 Contains similarity a photoreceptor from Ceratodon purpureus gb|Y10901 and contains
  misc_feature (1)..(221): Homolog of NCBI NO: 25408980 NR Description: hypothetical protein At2g46300 [imported] - thaliana >gi|3702319|gb|AAC62876.1| hypothetical protein
  misc_feature (1)..(225): Homolog of NCBI NO: 30690312 NR Description: expressed protein [Arabidopsis thaliana]
  misc_feature (1)..(225): Homolog of NCBI NO: 26449684 NR Description: unknown protein [Arabidopsis thaliana]
  misc_feature (11)..(203): Homolog of NCBI NO: 11762174 NR Description: At1g17620 [Arabidopsis thaliana]
  misc_feature (11)..(203): Homolog of NCBI NO: 18394509 NR Description: expressed protein; protein id: At1g17620.1, by cDNA: gi_13358204, supported by cDNA: gi_15450634, supported cDNA: gi_17386165 [Arabidopsis thaliana]
  misc_feature (5)..(200): Homolog of NCBI NO: 34914304 NR Description: B1151A10.19 [Oryza sativa (japonica
  misc_feature (5)..(220): Homolog of NCBI NO: 18401317 NR Description: expressed protein; protein id: At2g27080.1, by cDNA: gi_13877664, supported by cDNA: gi_15450380, supported cDNA: gi_16974488 [Arabidopsis thaliana] >gi|25407856|pir||E84668
  misc_feature (5)..(216): Homolog of NCBI NO: 15221846 NR Description: hypothetical protein; protein id: At1g54540.1
MLRRPPKHAIPAAFYPTKKRQWSRCRVFCCCVCITVAIVILLLILTVSVFFLYYSPRLPVVRLSSFRVSNFNFSGGKAGDGLSQLTAEATARLDFRNPNGKLRYYYGNVDVAVSVGEDDFETSLGSTKVKGFVEKPGNRTVVIVPIKVKKQQVDDPTVKRLRADMKSKKLVVKVMAKTKVGLGVGRRKIVTVGVTISCGGVRLQTLDSKMSKCTIKMLKWYVPIQVKCI

SEQ ID NO: 70837 - DNA, 2103 bp, Arabidopsis thaliana
  misc_feature (1)..(2103): Ceres Seq. ID no. 3000012
  misc_feature: MA Experiment ID: 20000166 Result: Down-regulated in Transcription
  misc_feature: MA Experiment 20000166 PARAMETER Experiment Name: At_100uM_ABA_P Parameter: Age (day) Value: 14
  misc_feature: MA Experiment 20000166 PARAMETER Experiment Name: At_100uM_ABA_P Parameter: Organism Value: A. thaliana
  misc_feature: MA Experiment 20000166 PARAMETER Experiment Name: At_100uM_ABA_P Parameter: Plant Line Value: WS
  misc_feature: MA Experiment 20000166 PARAMETER Experiment Name: At_100uM_ABA_P Parameter: Timepoint (hr) Value: 1
  misc_feature: MA Experiment 20000166 PARAMETER Experiment Name: At_100uM_ABA_P Parameter: Tissue Value: Aerial
  misc_feature: MA Experiment 20000166 PARAMETER Experiment Name: At_100uM_ABA_P Parameter: Treatment Value: 100uM ABA vs. No Treatment
  misc_feature: MA Experiment ID: 20000184 Result: Up-regulated in Transcription
  misc_feature: MA Experiment 20000184 PARAMETER Experiment Name: At_Shoots__P Parameter: Age (day) Value: 7
  misc_feature: MA Experiment 20000184 PARAMETER Experiment Name: At_Shoots__P Parameter: Tissue Value: Shoots vs. Whole Plant
  misc_feature: MA Experiment ID: 20000436 Result: Down-regulated in Transcription
  misc_feature: MA Experiment 20000436 PARAMETER Experiment Name: At_Drought_P Parameter: Age (day) Value: 7
  misc_feature: MA Experiment 20000436 PARAMETER Experiment Name: At_Drought_P Parameter: Organism Value: A. thaliana
  misc_feature: MA Experiment 20000436 PARAMETER Experiment Name: At_Drought_P Parameter: Plant Line Value: WS
  misc_feature: MA Experiment 20000436 PARAMETER Experiment Name: At_Drought_P Parameter: Timepoint (hr) Value: 12
  misc_feature: MA Experiment 20000436 PARAMETER Experiment Name: At_Drought_P Parameter: Tissue Value: Whole Plant
  misc_feature: MA Experiment 20000436 PARAMETER Experiment Name: At_Drought_P Parameter: Treatment Value: Drought vs. No Drought
  misc_feature: MA Experiment ID: 20000453 Result: Down-regulated in Transcription
  misc_feature: MA Experiment 20000453 PARAMETER Experiment Name: At_100uM_ABA_P Parameter: Age (day) Value: 15
  misc_feature: MA Experiment 20000453 PARAMETER Experiment Name: At_100uM_ABA_P Parameter: Organism Value: A. thaliana
  misc_feature: MA Experiment 20000453 PARAMETER Experiment Name: At_100uM_ABA_P Parameter: Plant Line Value: WS
  misc_feature: MA Experiment 20000453 PARAMETER Experiment Name: At_100uM_ABA_P Parameter: Timepoint (hr) Value: 24
  misc_feature: MA Experiment 20000453 PARAMETER Experiment Name: At_100uM_ABA_P Parameter: Tissue Value: Aerial
  misc_feature: MA Experiment 20000453 PARAMETER Experiment Name: At_100uM_ABA_P Parameter: Treatment Value: 100uM ABA vs. No Treatment
  misc_feature: MA Experiment ID: 20001554 Result: Down-regulated in Transcription
  misc_feature: MA Experiment 20001554 PARAMETER Experiment Name: At_Drought_Soil_Dry_P Parameter: Age (day) Value: 21
  misc_feature: MA Experiment 20001554 PARAMETER Experiment Name: At_Drought_Soil_Dry_P Parameter: Organism Value: A. thaliana
  misc_feature: MA Experiment 20001554 PARAMETER Experiment Name: At_Drought_Soil_Dry_P Parameter: Plant Line Value: WS
  misc_feature: MA Experiment 20001554 PARAMETER Experiment Name: At_Drought_Soil_Dry_P Parameter: Post Timepoint (hr) Value: None
  misc_feature: MA Experiment 20001554 PARAMETER Experiment Name: At_Drought_Soil_Dry_P Parameter: Post-Treatment Value: None
  misc_feature: MA Experiment 20001554 PARAMETER Experiment Name: At_Drought_Soil_Dry_P Parameter: Timepoint (day) Value: 7
  misc_feature: MA Experiment 20001554 PARAMETER Experiment Name: At_Drought_Soil_Dry_P Parameter: Treatment Value: Drought vs. No Drought
  misc_feature: MA Experiment ID: 20001555 Result: Down-regulated in Transcription
  misc_feature: MA Experiment 20001555 PARAMETER Experiment Name: At_Drought_Soil_Dry_P Parameter: Age (day) Value: 24
  misc_feature: MA Experiment 20001555 PARAMETER Experiment Name: At_Drought_Soil_Dry_P Parameter: Organism Value: A. thaliana
  misc_feature: MA Experiment 20001555 PARAMETER Experiment Name: At_Drought_Soil_Dry_P Parameter: Plant Line Value: WS
  misc_feature: MA Experiment 20001555 PARAMETER Experiment Name: At_Drought_Soil_Dry_P Parameter: Post Timepoint (hr) Value: None
  misc_feature: MA Experiment 20001555 PARAMETER Experiment Name: At_Drought_Soil_Dry_P Parameter: Post-Treatment Value: None
  misc_feature: MA Experiment 20001555 PARAMETER Experiment Name: At_Drought_Soil_Dry_P Parameter: Timepoint (day) Value: 10
  misc_feature: MA Experiment 20001555 PARAMETER Experiment Name: At_Drought_Soil_Dry_P Parameter: Treatment Value: Drought vs. No Drought
  misc_feature: MA Experiment ID: 20001556 Result: Down-regulated in Transcription
  misc_feature: MA Experiment 20001556 PARAMETER Experiment Name: At_Drought_Soil_Dry_P Parameter: Age (day) Value: 26
  misc_feature: MA Experiment 20001556 PARAMETER Experiment Name: At_Drought_Soil_Dry_P Parameter: Organism Value: A. thaliana
  misc_feature: MA Experiment 20001556 PARAMETER Experiment Name: At_Drought_Soil_Dry_P Parameter: Plant Line Value: WS
  misc_feature: MA Experiment 20001556 PARAMETER Experiment Name: At_Drought_Soil_Dry_P Parameter: Post Timepoint (hr) Value: None
  misc_feature: MA Experiment 20001556 PARAMETER Experiment Name: At_Drought_Soil_Dry_P Parameter: Post-Treatment Value: None
  misc_feature: MA Experiment 20001556 PARAMETER Experiment Name: At_Drought_Soil_Dry_P Parameter: Timepoint (day) Value: 12
  misc_feature: MA Experiment 20001556 PARAMETER Experiment Name: At_Drought_Soil_Dry_P Parameter: Treatment Value: Drought vs. No Drought
  misc_feature: Pfam Name: Pkinase Pfam Description: Protein kinase domain
atgcgtcaaaataatctcttctcattgatcttctggcttgtccctgtgagcttaattattgttgtctctgcacagttatgctcggagaagtttggaacttttacaccaggtggtacatttgacaagaaccgccgaatcattctctcatctcttccatctgaagtcacagctcaagatggcttctacaacgcttcgattggaacagatcctgaccaactctacgcaatggggatgtgcatcccaggtgctaaacaaaagctttgtagggattgtatcatggacgtcacaagacagttaatacagacatgtcccaaccagacagcagcaattcactggtcaggtggagggaaaactgtatgtatggcacgttactataaccagccgtcttctagaccattggatttggaatcagtttctattggttataacgttggaaatctcagcacaaacttaacagattttgatagattatgggagcgattgatagctcatatggtgactaaagcttcatcagcatcaataaaatatttatcatttgataacagtagattctatgcagctgatgaaacaaacttgacaaattctcaaatggtctacgctttgatgcaatgcacgccagacgtctctccttccaactgtaacacttgtttaaaacaaagtgttgatgactatgttggttgttgtcatgggaagcaaggcggctatgtgtatcggcctagttgcattttccggtgggatctataccctttcaatggcgcctttgatcttcttacgctagcgcctccaccctcatctcagctgcaatccccacctccagtgaccaacaaagatgaaaaaacgattcatacaggaactatcattgggattgtcattgtcgttgcaatggtcataatcatggctctgcttgctctaggggtttctgtttgcaggagtagaaaaaaatatcaagcttttgcctcagaaactgccgatgatattacaacagttggatatctccagtttgatattaaagacattgaagctgcaacaagtaactttttggcgagtaacaagattggtcaaggtggtttcggcgaagtttacaagggtacgttatcaaatggaactgaagttgcagtcaagaggctgtcaagaacttcagatcaaggtgaattggagttcaagaacgaggtgcttcttgtagcaaaacttcagcaccggaatctcgttaggcttctcggttttgctctgcaaggagaagaaaagatactcgtctttgagtttgttcccaacaagagcctcgattatttcctcttcggtagtactaacccaacaaaaaagggtcagctggactggacaagacggtacaacatcattggagggattacacgagggcttctctatcttcatcaagactctaggctcaccatcatacaccgtgacatcaaagcgagtaacattcttttagatgctgatatgaacccgaaaatagcggatttcgggatggctaggaatttcagagatcatcaaactgaagacagtacaggaagagtcgttggaaccttcggttacatgcctccagaatatgttgcgcatggccaattctctaccaaatccgatgtctatagcttcggagtattgattctagagattgttagtggcaggaagaatagcagcttctatcagatggatggttctgtttgcaacttggtcacatatgtttggagactttggaacactgattcatctttagagctcgtagatccggcgattagcggaagctatgagaaagatgaagtcactagatgcatccatatcggacttttatgcgttcaagaaaatcctgtgaatcgaccagcattgtctacaatattccaaatgctcactaatagctccattactctaaatgtccctcaaccacctggatttttcttcaggaacagacctgagtcagacacattacgccgtggattggagccagaccaatataacaatgaatctgttacttgttctatcgacaatgcaacaatcactacactcctcggtaaaactcttgcttctgcactctgttgtattacctcaactctattttcaaagtcaatgtatagaaacactgaggattga

SEQ ID NO: 70838 - protein, 700 aa, Arabidopsis thaliana
  peptide (1)..(700): Ceres Seq. ID no. 3000013
  misc_feature: Pfam Name: Pkinase Pfam Description: Protein kinase domain
  misc_feature (4)..(671): Homolog of NCBI NO: 15233389 NR Description: serine/threonine kinase-like protein; protein id:
  misc_feature (1)..(664): Homolog of NCBI NO: 30686091 NR Description: serine/threonine kinase - like protein
  misc_feature (310)..(673): Homolog of NCBI NO: 30686129 NR Description: serine/threonine kinase - like protein
  misc_feature (1)..(321): Homolog of NCBI NO: 30686129 NR Description: serine/threonine kinase - like protein
  misc_feature (1)..(664): Homolog of NCBI NO: 4127461 NR Description: receptor-like protein kinase, RLK3 [Arabidopsis
  misc_feature (11)..(671): Homolog of NCBI NO: 7488201 NR Description: probable serine/threonine-specific protein kinase
  misc_feature (11)..(671): Homolog of NCBI NO: 15233396 NR Description: serine/threonine kinase-like protein (fragment);
  misc_feature (6)..(671): Homolog of NCBI NO: 4008012 NR Description: receptor-like protein kinase [Arabidopsis
  misc_feature (6)..(693): Homolog of NCBI NO: 15236444 NR Description: protein kinase - like protein; protein id:
  misc_feature (78)..(671): Homolog of NCBI NO: 19699091 NR Description: AT4g23250/F21P8_140 [Arabidopsis thaliana]
MRQNNLFSLIFWLVPVSLIIVVSAQLCSEKFGTFTPGGTFDKNRRIILSSLPSEVTAQDGFYNASIGTDPDQLYAMGMCIPGAKQKLCRDCIMDVTRQLIQTCPNQTAAIHWSGGGKTVCMARYYNQPSSRPLDLESVSIGYNVGNLSTNLTDFDRLWERLIAHMVTKASSASIKYLSFDNSRFYAADETNLTNSQMVYALMQCTPDVSPSNCNTCLKQSVDDYVGCCHGKQGGYVYRPSCIFRWDLYPFNGAFDLLTLAPPPSSQLQSPPPVTNKDEKTIHTGTIIGIVIVVAMVIIMALLALGVSVCRSRKKYQAFASETADDITTVGYLQFDIKDIEAATSNFLASNKIGQGGFGEVYKGTLSNGTEVAVKRLSRTSDQGELEFKNEVLLVAKLQHRNLVRLLGFALQGEEKILVFEFVPNKSLDYFLFGSTNPTKKGQLDWTRRYNIIGGITRGLLYLHQDSRLTIIHRDIKASNILLDADMNPKIADFGMARNFRDHQTEDSTGRVVGTFGYMPPEYVAHGQFSTKSDVYSFGVLILEIVSGRKNSSFYQMDGSVCNLVTYVWRLWNTDSSLELVDPAISGSYEKDEVTRCIHIGLLCVQENPVNRPALSTIFQMLTNSSITLNVPQPPGFFFRNRPESDTLRRGLEPDQYNNESVTCSIDNATITTLLGKTLASALCCITSTLFSKSMYRNTED

SEQ ID NO: 70839 - protein, 625 aa, Arabidopsis thaliana
  peptide (1)..(625): Ceres Seq. ID no. 3000014
  misc_feature: Pfam Name: Pkinase Pfam Description: Protein kinase domain
  misc_feature (3)..(596): Homolog of NCBI NO: 19699091 NR Description: AT4g23250/F21P8_140 [Arabidopsis thaliana]
  misc_feature (1)..(596): Homolog of NCBI NO: 15233389 NR Description: serine/threonine kinase-like protein; protein id:
  misc_feature (1)..(589): Homolog of NCBI NO: 30686091 NR Description: serine/threonine kinase - like protein
  misc_feature (235)..(598): Homolog of NCBI NO: 30686129 NR Description: serine/threonine kinase - like protein
  misc_feature (1)..(246): Homolog of NCBI NO: 30686129 NR Description: serine/threonine kinase - like protein
  misc_feature (1)..(589): Homolog of NCBI NO: 4127461 NR Description: receptor-like protein kinase, RLK3 [Arabidopsis
  misc_feature (1)..(596): Homolog of NCBI NO: 7488201 NR Description: probable serine/threonine-specific protein kinase
  misc_feature (1)..(596): Homolog of NCBI NO: 15233396 NR Description: serine/threonine kinase-like protein (fragment);
  misc_feature (1)..(596): Homolog of NCBI NO: 4008012 NR Description: receptor-like protein kinase [Arabidopsis
  misc_feature (1)..(618): Homolog of NCBI NO: 15236444 NR Description: protein kinase - like protein; protein id:
MGMCIPGAKQKLCRDCIMDVTRQLIQTCPNQTAAIHWSGGGKTVCMARYYNQPSSRPLDLESVSIGYNVGNLSTNLTDFDRLWERLIAHMVTKASSASIKYLSFDNSRFYAADETNLTNSQMVYALMQCTPDVSPSNCNTCLKQSVDDYVGCCHGKQGGYVYRPSCIFRWDLYPFNGAFDLLTLAPPPSSQLQSPPPVTNKDEKTIHTGTIIGIVIVVAMVIIMALLALGVSVCRSRKKYQAFASETADDITTVGYLQFDIKDIEAATSNFLASNKIGQGGFGEVYKGTLSNGTEVAVKRLSRTSDQGELEFKNEVLLVAKLQHRNLVRLLGFALQGEEKILVFEFVPNKSLDYFLFGSTNPTKKGQLDWTRRYNIIGGITRGLLYLHQDSRLTIIHRDIKASNILLDADMNPKIADFGMARNFRDHQTEDSTGRVVGTFGYMPPEYVAHGQFSTKSDVYSFGVLILEIVSGRKNSSFYQMDGSVCNLVTYVWRLWNTDSSLELVDPAISGSYEKDEVTRCIHIGLLCVQENPVNRPALSTIFQMLTNSSITLNVPQPPGFFFRNRPESDTLRRGLEPDQYNNESVTCSIDNATITTLLGKTLASALCCITSTLFSKSMYRNTED

SEQ ID NO: 70840 - protein, 623 aa, Arabidopsis thaliana
  peptide (1)..(623): Ceres Seq. ID no. 3000015
  misc_feature: Pfam Name: Pkinase Pfam Description: Protein kinase domain
  misc_feature (1)..(594): Homolog of NCBI NO: 15233389 NR Description: serine/threonine kinase-like protein; protein id:
  misc_feature (1)..(587): Homolog of NCBI NO: 30686091 NR Description: serine/threonine kinase - like protein
  misc_feature (233)..(596): Homolog of NCBI NO: 30686129 NR Description: serine/threonine kinase - like protein
  misc_feature (1)..(244): Homolog of NCBI NO: 30686129 NR Description: serine/threonine kinase - like protein
  misc_feature (1)..(587): Homolog of NCBI NO: 4127461 NR Description: receptor-like protein kinase, RLK3 [Arabidopsis
  misc_feature (1)..(594): Homolog of NCBI NO: 7488201 NR Description: probable serine/threonine-specific protein kinase
  misc_feature (1)..(594): Homolog of NCBI NO: 15233396 NR Description: serine/threonine kinase-like protein (fragment);
  misc_feature (1)..(594): Homolog of NCBI NO: 4008012 NR Description: receptor-like protein kinase [Arabidopsis
  misc_feature (1)..(616): Homolog of NCBI NO: 15236444 NR Description: protein kinase - like protein; protein id:
  misc_feature (1)..(594): Homolog of NCBI NO: 19699091 NR Description: AT4g23250/F21P8_140 [Arabidopsis thaliana]
MCIPGAKQKLCRDCIMDVTRQLIQTCPNQTAAIHWSGGGKTVCMARYYNQPSSRPLDLESVSIGYNVGNLSTNLTDFDRLWERLIAHMVTKASSASIKYLSFDNSRFYAADETNLTNSQMVYALMQCTPDVSPSNCNTCLKQSVDDYVGCCHGKQGGYVYRPSCIFRWDLYPFNGAFDLLTLAPPPSSQLQSPPPVTNKDEKTIHTGTIIGIVIVVAMVIIMALLALGVSVCRSRKKYQAFASETADDITTVGYLQFDIKDIEAATSNFLASNKIGQGGFGEVYKGTLSNGTEVAVKRLSRTSDQGELEFKNEVLLVAKLQHRNLVRLLGFALQGEEKILVFEFVPNKSLDYFLFGSTNPTKKGQLDWTRRYNIIGGITRGLLYLHQDSRLTIIHRDIKASNILLDADMNPKIADFGMARNFRDHQTEDSTGRVVGTFGYMPPEYVAHGQFSTKSDVYSFGVLILEIVSGRKNSSFYQMDGSVCNLVTYVWRLWNTDSSLELVDPAISGSYEKDEVTRCIHIGLLCVQENPVNRPALSTIFQMLTNSSITLNVPQPPGFFFRNRPESDTLRRGLEPDQYNNESVTCSIDNATITTLLGKTLASALCCITSTLFSKSMYRNTED

SEQ ID NO: 70841 - DNA, 1698 bp, Arabidopsis thaliana
  misc_feature (1)..(1698): Ceres Seq. ID no. 3015739
  misc_feature: MA Experiment ID: 20000347 Result: Up-regulated in Transcription
  misc_feature: MA Experiment 20000347 PARAMETER Experiment Name: At_2mM_SA_Sub_P Parameter: Age (day) Value: 14
  misc_feature: MA Experiment 20000347 PARAMETER Experiment Name: At_2mM_SA_Sub_P Parameter: Organism Value: A. thaliana
  misc_feature: MA Experiment 20000347 PARAMETER Experiment Name: At_2mM_SA_Sub_P Parameter: Plant Line Value: WS
  misc_feature: MA Experiment 20000347 PARAMETER Experiment Name: At_2mM_SA_Sub_P Parameter: Timepoint (hr) Value: 6
  misc_feature: MA Experiment 20000347 PARAMETER Experiment Name: At_2mM_SA_Sub_P Parameter: Tissue Value: Aerial
  misc_feature: MA Experiment 20000347 PARAMETER Experiment Name: At_2mM_SA_Sub_P Parameter: Treatment Value: 2mM SA vs. No Treatment
atggaccgaccaaagaaacgggacgtactacgagcggtgaattcgatgagctctctatgcgagaatggcaaaaaaaaggaaggaattcgagcagtaaactcgatgtgctcgatatccgaactgacggatgaagacctactgtctcggctgcttgaccgtccaagactcaaacttgaacggaaaatatcatacgaggaaatgtctttaagcctttacgacagtgcacattcactagacggtaagtctggttgggatactccggttttctccatgaaagactcaatggatcgtaacccgatggtcacagaagcttgggaggctctctgccagtctcaggtctacttccggggaaaaccggtaggaaccatcgccgcctacgaccatgcttcagaagaggtcttgaactatgatcaggtgttcgtacgtgattttgtaccgagtgctctagcatttctgatgaatggagagcctgaaattgtgaagaactttctcctgaagacacttcatattcagggacaagacaaaatgatcgacaagttcaagcttggtgacggcgcaatgccagcaagctttaaagttctacataatcctatcaagaagacggatacgattatcgctgactttggagaaagcgccatcgggagagtggctccagtcgactctggcttctggtggatcattctcctccgagcttacactaagtctacaggagatcattctctagcagagagaccagagtgccaaaagggaatgagactcatactttctttgtgtctctctgagggttttgatacttttccgactttgctttgcgcagatggttgctcgatggtcgatcgtagaatgggcatttacggctatccgattgagatccaagccctctttttcatggctcttcgatccgcactctcaatgctgaaacatgattctgagggtaaagagttcatggaaaagatagtgaagcggctgcacgcactaagcttccatatgagaagctacttttggctcgatttccagcagctcaatgacatttaccgttacaagacggaggagtactctcacaccgcggtaaacaagttcaacgtaatccctgactccatccctgattggatctttgacttcatgcctctccgaggtggctacttcgttggaaatgtcagtcccgcccgcatggacttcaggtggtttgcgttaggaaattgtatcgcaattctttcctcattggccacaccagagcagtccatggcgatcatggacctgattgaggcccggtgggaagaacttgtgggagagatgccgttgaagatatgttatccggcgatggagagtcacgagtgggggattgtcactggctgtgaccctaagaacacaaggtggagctaccacaacggaggctcttggccagtgcttctatggttactaacggcggcaagcataaagactggacggccacaaatagcacgacgggctatagagttggcggaggcacgactgttgaaggatggatggccggagtactacgacggaaagtctggaagattcatcggaaaacaggctaggaaatctcagacatggtcaatcgctggctatttggtcgccaagatgatgatggatgatccaacgcatgtgggaatgatctcaatggaagaagagaaacatatgaaacctcctcttagaagatcttcttcttggacttaa

SEQ ID NO: 70842 - protein, 565 aa, Arabidopsis thaliana
  peptide (1)..(565): Ceres Seq. ID no. 3015740
  misc_feature (92)..(559): Pfam Name: Plant neutral invertase Pfam Description: Plant neutral invertase
  misc_feature (67)..(565): Homolog of NCBI NO: 15218303 NR Description: neutral invertase, putative; protein id: [Arabidopsis thaliana] >gi|25354735|pir||A96743 probable neutral
  misc_feature (29)..(565): Homolog of NCBI NO: 18395144 NR Description: putative invertase; protein id: At1g22650.1,
  misc_feature (29)..(565): Homolog of NCBI NO: 21594008 NR Description: putative invertase [Arabidopsis thaliana]
  misc_feature (21)..(565): Homolog of NCBI NO: 18413234 NR Description: neutral invertase like protein; protein id:
  misc_feature (21)..(565): Homolog of NCBI NO: 25354737 NR Description: neutral invertase like protein [imported] - thaliana >gi|7267646|emb|CAB78074.1| neutral invertase like
  misc_feature (28)..(564): Homolog of NCBI NO: 30693221 NR Description: invertase -related [Arabidopsis thaliana]
  misc_feature (69)..(565): Homolog of NCBI NO: 7487359 NR Description: hypothetical protein T22J18.18 - Arabidopsis >gi|3287693|gb|AAC25521.1|AAC25521 Similar to LIM17 gene product from the genome of Synechocystis sp. gb|D90916. [Arabidopsis
  misc_feature (43)..(565): Homolog of NCBI NO: 15236209 NR Description: invertase - like protein; protein id: supported by cDNA: gi_15215775 [Arabidopsis thaliana]
  misc_feature (64)..(565): Homolog of NCBI NO: 38344939 NR Description: OSJNBa0084A10.15 [Oryza sativa (japonica
  misc_feature (27)..(555): Homolog of NCBI NO: 15242261 NR Description: alkaline/neutral invertase; protein id: supported by cDNA: gi_15912342 [Arabidopsis thaliana] alkaline/neutral invertase [Arabidopsis thaliana]
MDRPKKRDVLRAVNSMSSLCENGKKKEGIRAVNSMCSISELTDEDLLSRLLDRPRLKLERKISYEEMSLSLYDSAHSLDGKSGWDTPVFSMKDSMDRNPMVTEAWEALCQSQVYFRGKPVGTIAAYDHASEEVLNYDQVFVRDFVPSALAFLMNGEPEIVKNFLLKTLHIQGQDKMIDKFKLGDGAMPASFKVLHNPIKKTDTIIADFGESAIGRVAPVDSGFWWIILLRAYTKSTGDHSLAERPECQKGMRLILSLCLSEGFDTFPTLLCADGCSMVDRRMGIYGYPIEIQALFFMALRSALSMLKHDSEGKEFMEKIVKRLHALSFHMRSYFWLDFQQLNDIYRYKTEEYSHTAVNKFNVIPDSIPDWIFDFMPLRGGYFVGNVSPARMDFRWFALGNCIAILSSLATPEQSMAIMDLIEARWEELVGEMPLKICYPAMESHEWGIVTGCDPKNTRWSYHNGGSWPVLLWLLTAASIKTGRPQIARRAIELAEARLLKDGWPEYYDGKSGRFIGKQARKSQTWSIAGYLVAKMMMDDPTHVGMISMEEEKHMKPPLRRSSSWT

SEQ ID NO: 70843 - protein, 550 aa, Arabidopsis thaliana
  peptide (1)..(550): Ceres Seq. ID no. 3015741
  misc_feature (77)..(544): Pfam Name: Plant neutral invertase Pfam Description: Plant neutral invertase
  misc_feature (52)..(550): Homolog of NCBI NO: 15218303 NR Description: neutral invertase, putative; protein id: [Arabidopsis thaliana] >gi|25354735|pir||A96743 probable neutral
  misc_feature (14)..(550): Homolog of NCBI NO: 18395144 NR Description: putative invertase; protein id: At1g22650.1,
  misc_feature (14)..(550): Homolog of NCBI NO: 21594008 NR Description: putative invertase [Arabidopsis thaliana]
  misc_feature (6)..(550): Homolog of NCBI NO: 18413234 NR Description: neutral invertase like protein; protein id:
  misc_feature (6)..(550): Homolog of NCBI NO: 25354737 NR Description: neutral invertase like protein [imported] - thaliana >gi|7267646|emb|CAB78074.1| neutral invertase like
  misc_feature (13)..(549): Homolog of NCBI NO: 30693221 NR Description: invertase -related [Arabidopsis thaliana]
  misc_feature (54)..(550): Homolog of NCBI NO: 7487359 NR Description: hypothetical protein T22J18.18 - Arabidopsis >gi|3287693|gb|AAC25521.1|AAC25521 Similar to LIM17 gene product from the genome of Synechocystis sp. gb|D90916. [Arabidopsis
  misc_feature (28)..(550): Homolog of NCBI NO: 15236209 NR Description: invertase - like protein; protein id: supported by cDNA: gi_15215775 [Arabidopsis thaliana]
  misc_feature (49)..(550): Homolog of NCBI NO: 38344939 NR Description: OSJNBa0084A10.15 [Oryza sativa (japonica
  misc_feature (12)..(540): Homolog of NCBI NO: 15242261 NR Description: alkaline/neutral invertase; protein id: supported by cDNA: gi_15912342 [Arabidopsis thaliana] alkaline/neutral invertase [Arabidopsis thaliana]
MSSLCENGKKKEGIRAVNSMCSISELTDEDLLSRLLDRPRLKLERKISYEEMSLSLYDSAHSLDGKSGWDTPVFSMKDSMDRNPMVTEAWEALCQSQVYFRGKPVGTIAAYDHASEEVLNYDQVFVRDFVPSALAFLMNGEPEIVKNFLLKTLHIQGQDKMIDKFKLGDGAMPASFKVLHNPIKKTDTIIADFGESAIGRVAPVDSGFWWIILLRAYTKSTGDHSLAERPECQKGMRLILSLCLSEGFDTFPTLLCADGCSMVDRRMGIYGYPIEIQALFFMALRSALSMLKHDSEGKEFMEKIVKRLHALSFHMRSYFWLDFQQLNDIYRYKTEEYSHTAVNKFNVIPDSIPDWIFDFMPLRGGYFVGNVSPARMDFRWFALGNCIAILSSLATPEQSMAIMDLIEARWEELVGEMPLKICYPAMESHEWGIVTGCDPKNTRWSYHNGGSWPVLLWLLTAASIKTGRPQIARRAIELAEARLLKDGWPEYYDGKSGRFIGKQARKSQTWSIAGYLVAKMMMDDPTHVGMISMEEEKHMKPPLRRSSSWT

SEQ ID NO: 70844 - protein, 531 aa, Arabidopsis thaliana
  peptide (1)..(531): Ceres Seq. ID no. 3015742
  misc_feature (58)..(525): Pfam Name: Plant neutral invertase Pfam Description: Plant neutral invertase
  misc_feature (33)..(531): Homolog of NCBI NO: 15218303 NR Description: neutral invertase, putative; protein id: [Arabidopsis thaliana] >gi|25354735|pir||A96743 probable neutral
  misc_feature (1)..(531): Homolog of NCBI NO: 18395144 NR Description: putative invertase; protein id: At1g22650.1,
  misc_feature (1)..(531): Homolog of NCBI NO: 21594008 NR Description: putative invertase [Arabidopsis thaliana]
  misc_feature (1)..(531): Homolog of NCBI NO: 18413234 NR Description: neutral invertase like protein; protein id:
  misc_feature (1)..(531): Homolog of NCBI NO: 25354737 NR Description: neutral invertase like protein [imported] - thaliana >gi|7267646|emb|CAB78074.1| neutral invertase like
  misc_feature (1)..(530): Homolog of NCBI NO: 30693221 NR Description: invertase -related [Arabidopsis thaliana]
  misc_feature (35)..(531): Homolog of NCBI NO: 7487359 NR Description: hypothetical protein T22J18.18 - Arabidopsis >gi|3287693|gb|AAC25521.1|AAC25521 Similar to LIM17 gene product from the genome of Synechocystis sp. gb|D90916. [Arabidopsis
  misc_feature (9)..(531): Homolog of NCBI NO: 15236209 NR Description: invertase - like protein; protein id: supported by cDNA: gi_15215775 [Arabidopsis thaliana]
  misc_feature (30)..(531): Homolog of NCBI NO: 38344939 NR Description: OSJNBa0084A10.15 [Oryza sativa (japonica
  misc_feature (1)..(521): Homolog of NCBI NO: 15242261 NR Description: alkaline/neutral invertase; protein id: supported by cDNA: gi_15912342 [Arabidopsis thaliana] alkaline/neutral invertase [Arabidopsis thaliana]
MCSISELTDEDLLSRLLDRPRLKLERKISYEEMSLSLYDSAHSLDGKSGWDTPVFSMKDSMDRNPMVTEAWEALCQSQVYFRGKPVGTIAAYDHASEEVLNYDQVFVRDFVPSALAFLMNGEPEIVKNFLLKTLHIQGQDKMIDKFKLGDGAMPASFKVLHNPIKKTDTIIADFGESAIGRVAPVDSGFWWIILLRAYTKSTGDHSLAERPECQKGMRLILSLCLSEGFDTFPTLLCADGCSMVDRRMGIYGYPIEIQALFFMALRSALSMLKHDSEGKEFMEKIVKRLHALSFHMRSYFWLDFQQLNDIYRYKTEEYSHTAVNKFNVIPDSIPDWIFDFMPLRGGYFVGNVSPARMDFRWFALGNCIAILSSLATPEQSMAIMDLIEARWEELVGEMPLKICYPAMESHEWGIVTGCDPKNTRWSYHNGGSWPVLLWLLTAASIKTGRPQIARRAIELAEARLLKDGWPEYYDGKSGRFIGKQARKSQTWSIAGYLVAKMMMDDPTHVGMISMEEEKHMKPPLRRSSSWT

SEQ ID NO: 70845 - DNA, 1098 bp, Arabidopsis thaliana
  misc_feature (1)..(1098): Ceres Seq. ID no. 3017043
  misc_feature: MA Experiment ID: 20000185 Result: Up-regulated in Transcription
  misc_feature: MA Experiment 20000185 PARAMETER Experiment Name: At_Roots__P Parameter: Age (day) Value: 7 vs. 21
  misc_feature: MA Experiment 20000185 PARAMETER Experiment Name: At_Roots__P Parameter: Organism Value: A. thaliana
  misc_feature: MA Experiment 20000185 PARAMETER Experiment Name: At_Roots__P Parameter: Tissue Value: Roots vs. Whole Plant
  misc_feature: MA Experiment ID: 20000227 Result: Down-regulated in Transcription
  misc_feature: MA Experiment 20000227 PARAMETER Experiment Name: At_Root-Tips-vs-Tops_P Parameter: Tissue Value: Root Tips vs. Root Tops
  misc_feature: MA Experiment ID: 20000439 Result: Up-regulated in Transcription
  misc_feature: MA Experiment 20000439 PARAMETER Experiment Name: At_Roots__P Parameter: Age (day) Value: 14 vs. 21
  misc_feature: MA Experiment 20000439 PARAMETER Experiment Name: At_Roots__P Parameter: Organism Value: A. thaliana
  misc_feature: MA Experiment 20000439 PARAMETER Experiment Name: At_Roots__P Parameter: Tissue Value: Roots vs. Whole Plant
atggattacactgtttcctctctacaatgcttcttcttagttttatgtctctctcttttggtttgctctaactctgaaactagttacaagtcaaacaagaaacctatattgataaacttcggcgactctaactccgacaccggaggagttcttgctggagttggacttcctatcggactccctcatggcattaccttcttccatagaggcactggtcgtctcggtgacggtcgactcatcgttgacttctactgtgaacatttaaagatgacatatttgagtccatatttggattcactttcaccaaatttcaaaagaggagtcaatttcgcagtctcgggcgccaccgctcttccgatcttttccttccctcttgccattcaaattcgtcaattcgtccatttcaaaaaccgttctcaagaacttatctcttccggtagaagagaccttattgatgataatggatttagaaacgcgttgtacatgatcgatattggacaaaacgatcttttacttgctctatatgattcgaatttaacctatgcacccgttgtcgaaaaaattccttccatgcttcttgagataaagaaagccatacagactgtatatttatacggagggagaaagttttgggtacacaacacaggcccattgggctgtgcaccaaaagaattggcgattcacctgcataacgattcggatcttgacccgattggttgtttccgggttcacaatgaagtcgccaaagccttcaacaaaggactccttagtctctgcaacgaactgagatcccaattcaaagacgccactctcgtctacgttgatatttactccatcaaatataaactctccgccgatttcaaactatacggatttgtggacccgttgatggcttgttgcggttatggaggaagacctaacaactatgatcgaaaagcaacgtgtggtcaacccggttcaactatttgtcgtgatgtaaccaaagcaattgtatgggatggggttcactatactgaagctgctaaccggtttgtcgttgatgctgttttgacgaatcggtactcttacccaaaaaattcccttgaccggttttggtag

SEQ ID NO: 70846 - protein, 365 aa, Arabidopsis thaliana
  peptide (1)..(365): Ceres Seq. ID no. 3017044
  misc_feature (37)..(220): Pfam Name: GDSL-like Lipase/Acylhydrolase Pfam Description: GDSL-like Lipase/Acylhydrolase
  misc_feature (1)..(220): Homolog of NCBI NO: 15228721 NR Description: putative protein; protein id: At3g62280.1
  misc_feature (224)..(365): Homolog of NCBI NO: 15228721 NR Description: putative protein; protein id: At3g62280.1
  misc_feature (11)..(357): Homolog of NCBI NO: 15223585 NR Description: nodule-specific protein, putative; protein id: [Arabidopsis thaliana] >gi|25404142|pir||D96608 hypothetical
  misc_feature (11)..(357): Homolog of NCBI NO: 15217506 NR Description: putative lipase; protein id: At1g09390.1
  misc_feature (33)..(358): Homolog of NCBI NO: 34894866 NR Description: putative lipase homolog [Oryza sativa (japonica group)] >gi|14164537|dbj|BAB55786.1| putative lipase homolog
  misc_feature (41)..(338): Homolog of NCBI NO: 25336281 NR Description: lipase-like protein Lip-4 [imported] - thaliana (fragment) >gi|3220021|gb|AAC23651.1| lipase homolog
  misc_feature (30)..(357): Homolog of NCBI NO: 34894838 NR Description: putative lipase homolog [Oryza sativa (japonica group)] >gi|13365800|dbj|BAB39238.1| putative lipase homolog
  misc_feature (5)..(357): Homolog of NCBI NO: 18405064 NR Description: early nodule-specific protein, putative; protein At1g54790.1, supported by cDNA: 122943. [Arabidopsis thaliana]
  misc_feature (8)..(357): Homolog of NCBI NO: 21537184 NR Description: early nodule-specific protein, putative
  misc_feature (33)..(357): Homolog of NCBI NO: 25405771 NR Description: hypothetical protein T22H22.20 [imported] - thaliana >gi|3776573|gb|AAC64890.1| Similar to nodulins and homolog F14J9.5 gi|3482914 from Arabidopsis thaliana BAC
MDYTVSSLQCFFLVLCLSLLVCSNSETSYKSNKKPILINFGDSNSDTGGVLAGVGLPIGLPHGITFFHRGTGRLGDGRLIVDFYCEHLKMTYLSPYLDSLSPNFKRGVNFAVSGATALPIFSFPLAIQIRQFVHFKNRSQELISSGRRDLIDDNGFRNALYMIDIGQNDLLLALYDSNLTYAPVVEKIPSMLLEIKKAIQTVYLYGGRKFWVHNTGPLGCAPKELAIHLHNDSDLDPIGCFRVHNEVAKAFNKGLLSLCNELRSQFKDATLVYVDIYSIKYKLSADFKLYGFVDPLMACCGYGGRPNNYDRKATCGQPGSTICRDVTKAIVWDGVHYTEAANRFVVDAVLTNRYSYPKNSLDRFW

SEQ ID NO: 70847 - protein, 276 aa, Arabidopsis thaliana
  peptide (1)..(276): Ceres Seq. ID no. 3017045
  misc_feature (1)..(131): Pfam Name: GDSL-like Lipase/Acylhydrolase Pfam Description: GDSL-like Lipase/Acylhydrolase
  misc_feature (1)..(131): Homolog of NCBI NO: 15228721 NR Description: putative protein; protein id: At3g62280.1
  misc_feature (135)..(276): Homolog of NCBI NO: 15228721 NR Description: putative protein; protein id: At3g62280.1
  misc_feature (1)..(268): Homolog of NCBI NO: 15223585 NR Description: nodule-specific protein, putative; protein id: [Arabidopsis thaliana] >gi|25404142|pir||D96608 hypothetical
  misc_feature (1)..(268): Homolog of NCBI NO: 15217506 NR Description: putative lipase; protein id: At1g09390.1
  misc_feature (1)..(269): Homolog of NCBI NO: 34894866 NR Description: putative lipase homolog [Oryza sativa (japonica group)] >gi|14164537|dbj|BAB55786.1| putative lipase homolog
  misc_feature (1)..(249): Homolog of NCBI NO: 25336281 NR Description: lipase-like protein Lip-4 [imported] - thaliana (fragment) >gi|3220021|gb|AAC23651.1| lipase homolog
  misc_feature (1)..(268): Homolog of NCBI NO: 34894838 NR Description: putative lipase homolog [Oryza sativa (japonica group)] >gi|13365800|dbj|BAB39238.1| putative lipase homolog
  misc_feature (1)..(268): Homolog of NCBI NO: 18405064 NR Description: early nodule-specific protein, putative; protein At1g54790.1, supported by cDNA: 122943. [Arabidopsis thaliana]
  misc_feature (1)..(268): Homolog of NCBI NO: 21537184 NR Description: early nodule-specific protein, putative
  misc_feature (1)..(268): Homolog of NCBI NO: 25405771 NR Description: hypothetical protein T22H22.20 [imported] - thaliana >gi|3776573|gb|AAC64890.1| Similar to nodulins and homolog F14J9.5 gi|3482914 from Arabidopsis thaliana BAC
MTYLSPYLDSLSPNFKRGVNFAVSGATALPIFSFPLAIQIRQFVHFKNRSQELISSGRRDLIDDNGFRNALYMIDIGQNDLLLALYDSNLTYAPVVEKIPSMLLEIKKAIQTVYLYGGRKFWVHNTGPLGCAPKELAIHLHNDSDLDPIGCFRVHNEVAKAFNKGLLSLCNELRSQFKDATLVYVDIYSIKYKLSADFKLYGFVDPLMACCGYGGRPNNYDRKATCGQPGSTICRDVTKAIVWDGVHYTEAANRFVVDAVLTNRYSYPKNSLDRFW

SEQ ID NO: 70848 - protein, 204 aa, Arabidopsis thaliana
  peptide (1)..(204): Ceres Seq. ID no. 3017046
  misc_feature (1)..(59): Pfam Name: GDSL-like Lipase/Acylhydrolase Pfam Description: GDSL-like Lipase/Acylhydrolase
  misc_feature (1)..(59): Homolog of NCBI NO: 15228721 NR Description: putative protein; protein id: At3g62280.1
  misc_feature (63)..(204): Homolog of NCBI NO: 15228721 NR Description: putative protein; protein id: At3g62280.1
  misc_feature (1)..(196): Homolog of NCBI NO: 15223585 NR Description: nodule-specific protein, putative; protein id: [Arabidopsis thaliana] >gi|25404142|pir||D96608 hypothetical
  misc_feature (1)..(196): Homolog of NCBI NO: 15217506 NR Description: putative lipase; protein id: At1g09390.1
  misc_feature (1)..(197): Homolog of NCBI NO: 34894866 NR Description: putative lipase homolog [Oryza sativa (japonica group)] >gi|14164537|dbj|BAB55786.1| putative lipase homolog
  misc_feature (1)..(177): Homolog of NCBI NO: 25336281 NR Description: lipase-like protein Lip-4 [imported] - thaliana (fragment) >gi|3220021|gb|AAC23651.1| lipase homolog
  misc_feature (1)..(196): Homolog of NCBI NO: 34894838 NR Description: putative lipase homolog [Oryza sativa (japonica group)] >gi|13365800|dbj|BAB39238.1| putative lipase homolog
  misc_feature (1)..(196): Homolog of NCBI NO: 18405064 NR Description: early nodule-specific protein, putative; protein At1g54790.1, supported by cDNA: 122943. [Arabidopsis thaliana]
  misc_feature (1)..(196): Homolog of NCBI NO: 21537184 NR Description: early nodule-specific protein, putative
  misc_feature (1)..(196): Homolog of NCBI NO: 25405771 NR Description: hypothetical protein T22H22.20 [imported] - thaliana >gi|3776573|gb|AAC64890.1| Similar to nodulins and homolog F14J9.5 gi|3482914 from Arabidopsis thaliana BAC
MIDIGQNDLLLALYDSNLTYAPVVEKIPSMLLEIKKAIQTVYLYGGRKFWVHNTGPLGCAPKELAIHLHNDSDLDPIGCFRVHNEVAKAFNKGLLSLCNELRSQFKDATLVYVDIYSIKYKLSADFKLYGFVDPLMACCGYGGRPNNYDRKATCGQPGSTICRDVTKAIVWDGVHYTEAANRFVVDAVLTNRYSYPKNSLDRFW

SEQ ID NO: 70849 - DNA, 606 bp, Arabidopsis thaliana
  misc_feature (1)..(606): Ceres Seq. ID no. 3017321
  misc_feature: MA Experiment ID: 20000180 Result: Up-regulated in Transcription
  misc_feature: MA Experiment 20000180 PARAMETER Experiment Name: At_Germinating_Seeds_P Parameter: Age (hr) Value: 24 vs. 0
  misc_feature: MA Experiment 20000180 PARAMETER Experiment Name: At_Germinating_Seeds_P Parameter: Tissue Value: Germinating Seeds
  misc_feature: MA Experiment ID: 20000495 Result: Up-regulated in Transcription
  misc_feature: MA Experiment 20000495 PARAMETER Experiment Name: At_Guard_Cells_P Parameter: Harvest Date Value: 8/2/2002
  misc_feature: MA Experiment 20000495 PARAMETER Experiment Name: At_Guard_Cells_P Parameter: Organism Value: A. thaliana
  misc_feature: MA Experiment 20000495 PARAMETER Experiment Name: At_Guard_Cells_P Parameter: Tissue Value: Guard Cells vs. Leaves
  misc_feature: MA Experiment ID: 20000496 Result: Up-regulated in Transcription
  misc_feature: MA Experiment 20000496 PARAMETER Experiment Name: At_Guard_Cells_P Parameter: Harvest Date Value: 7/19/2002
  misc_feature: MA Experiment 20000496 PARAMETER Experiment Name: At_Guard_Cells_P Parameter: Organism Value: Canola
  misc_feature: MA Experiment 20000496 PARAMETER Experiment Name: At_Guard_Cells_P Parameter: Tissue Value: Guard Cells vs. Leaves
  misc_feature: MA Experiment ID: 20001451 Result: Up-regulated in Transcription
  misc_feature: MA Experiment 20001451 PARAMETER Experiment Name: At_Far-red-induction_P Parameter: Age (day) Value: 7
  misc_feature: MA Experiment 20001451 PARAMETER Experiment Name: At_Far-red-induction_P Parameter: Light Value: Far-red vs. White
  misc_feature: MA Experiment 20001451 PARAMETER Experiment Name: At_Far-red-induction_P Parameter: Organism Value: A. thaliana
  misc_feature: MA Experiment 20001451 PARAMETER Experiment Name: At_Far-red-induction_P Parameter: Plant Line Value: Columbia
  misc_feature: MA Experiment 20001451 PARAMETER Experiment Name: At_Far-red-induction_P Parameter: Timepoint (hr) Value: 24
  misc_feature: MA Experiment 20001451 PARAMETER Experiment Name: At_Far-red-induction_P Parameter: Tissue Value: Whole Plant
atgtgtgagtgtgacataaaaaaggttatggcaaacagaaaaccttggtaccagagagctatggcggttgccagattcgcaacgaattggagaacaatccctaaatcatcatcacaacaacaaccagagaattttcgtccgtctcgaaaccctagcgtcaacagcaagtcatccaatcataaccaaatttatcaccagctgagaaaatgctcgtctctcaaggtagctgcgaattctttcactagggtttgcctctgcgctccgattggtccatacgacgacgtttttcggattcacgtcccgccgagaagaagttcaagctatcctccgtcgaagcctcttcctatggagacggcagtggcggtggcgacggcgaggatgagtgtggattcagggaggaggatatttagagggaagtcgttgagggaaaacgcgttgatgaggagattcgtggtggcggaagaagaagcgataatggagaatagaaagagagatcaaatggagattgtgaggaagagaaatcagatgaggaggaagaagaagcttggacctagtcctcttagtcgtatggttatcgctgaagatcaagaagtttgtcttctttga

SEQ ID NO: 70850 - protein, 201 aa, Arabidopsis thaliana
  peptide (1)..(201): Ceres Seq. ID no. 3017322
  misc_feature (1)..(201): Homolog of NCBI NO: 11288883 NR Description: hypothetical protein T16L24.230 - Arabidopsis >gi|6996304|emb|CAB75465.1| putative protein [Arabidopsis
  misc_feature (2)..(201): Homolog of NCBI NO: 30695040 NR Description: expressed protein [Arabidopsis thaliana]
  misc_feature (9)..(196): Homolog of NCBI NO: 21740779 NR Description: OSJNBa0067K08.20 [Oryza sativa (japonica
  misc_feature (106)..(196): Homolog of NCBI NO: 34905624 NR Description: hypothetical protein [Oryza sativa (japonica group)] >gi|23307550|dbj|BAC16686.1| hypothetical protein [Oryza
MCECDIKKVMANRKPWYQRAMAVARFATNWRTIPKSSSQQQPENFRPSRNPSVNSKSSNHNQIYHQLRKCSSLKVAANSFTRVCLCAPIGPYDDVFRIHVPPRRSSSYPPSKPLPMETAVAVATARMSVDSGRRIFRGKSLRENALMRRFVVAEEEAIMENRKRDQMEIVRKRNQMRRKKKLGPSPLSRMVIAEDQEVCLL

SEQ ID NO: 70851 - protein, 192 aa, Arabidopsis thaliana
  peptide (1)..(192): Ceres Seq. ID no. 3017323
  misc_feature (1)..(192): Homolog of NCBI NO: 11288883 NR Description: hypothetical protein T16L24.230 - Arabidopsis >gi|6996304|emb|CAB75465.1| putative protein [Arabidopsis
  misc_feature (1)..(192): Homolog of NCBI NO: 30695040 NR Description: expressed protein [Arabidopsis thaliana]
  misc_feature (1)..(187): Homolog of NCBI NO: 21740779 NR Description: OSJNBa0067K08.20 [Oryza sativa (japonica
  misc_feature (97)..(187): Homolog of NCBI NO: 34905624 NR Description: hypothetical protein [Oryza sativa (japonica group)] >gi|23307550|dbj|BAC16686.1| hypothetical protein [Oryza
MANRKPWYQRAMAVARFATNWRTIPKSSSQQQPENFRPSRNPSVNSKSSNHNQIYHQLRKCSSLKVAANSFTRVCLCAPIGPYDDVFRIHVPPRRSSSYPPSKPLPMETAVAVATARMSVDSGRRIFRGKSLRENALMRRFVVAEEEAIMENRKRDQMEIVRKRNQMRRKKKLGPSPLSRMVIAEDQEVCLL

SEQ ID NO: 70852 - protein, 181 aa, Arabidopsis thaliana
  peptide (1)..(181): Ceres Seq. ID no. 3017324
  misc_feature (1)..(181): Homolog of NCBI NO: 11288883 NR Description: hypothetical protein T16L24.230 - Arabidopsis >gi|6996304|emb|CAB75465.1| putative protein [Arabidopsis
  misc_feature (1)..(181): Homolog of NCBI NO: 30695040 NR Description: expressed protein [Arabidopsis thaliana]
  misc_feature (1)..(176): Homolog of NCBI NO: 21740779 NR Description: OSJNBa0067K08.20 [Oryza sativa (japonica
  misc_feature (86)..(176): Homolog of NCBI NO: 34905624 NR Description: hypothetical protein [Oryza sativa (japonica group)] >gi|23307550|dbj|BAC16686.1| hypothetical protein [Oryza
MAVARFATNWRTIPKSSSQQQPENFRPSRNPSVNSKSSNHNQIYHQLRKCSSLKVAANSFTRVCLCAPIGPYDDVFRIHVPPRRSSSYPPSKPLPMETAVAVATARMSVDSGRRIFRGKSLRENALMRRFVVAEEEAIMENRKRDQMEIVRKRNQMRRKKKLGPSPLSRMVIAEDQEVCLL

SEQ ID NO: 70853 - DNA, 1623 bp, Arabidopsis thaliana
  misc_feature (1)..(1623): Ceres Seq. ID no. 3017447
  misc_feature: MA Experiment ID: 20000527 Result: Down-regulated in Transcription
  misc_feature: MA Experiment 20000527 PARAMETER Experiment Name: At_10percent_PEG_P Parameter: Age (day) Value: 20
  misc_feature: MA Experiment 20000527 PARAMETER Experiment Name: At_10percent_PEG_P Parameter: Organism Value: A. thaliana
  misc_feature: MA Experiment 20000527 PARAMETER Experiment Name: At_10percent_PEG_P Parameter: Plant Line Value: WS
  misc_feature: MA Experiment 20000527 PARAMETER Experiment Name: At_10percent_PEG_P Parameter: Timepoint (day) Value: 20
  misc_feature: MA Experiment 20000527 PARAMETER Experiment Name: At_10percent_PEG_P Parameter: Tissue Value: Whole Plant
  misc_feature: MA Experiment 20000527 PARAMETER Experiment Name: At_10percent_PEG_P Parameter: Treatment Value: 10percent PEG vs. No Treatment
atgacgcaaaggaagaatatgtactcgaagaaaaactcgttcggccgatcagatttcccagagggtttccttttcggtacagcttcatcggcttaccaatatgaaggagccagaaacgaagctcctcgaggagagagtgtttgggacacatttgttcgcaaatatccagagagaaattgctactctaatgcggaccaagcaatcgagttctataaccattacaaggacgatatccagagaatgaaggatattaacatggatgctttcagattctctatctcttggcctaggatttttcctcttggaaagaaaagcaaaggagtgaacaaagaaggaatacaattctataacgatctcatcgatgaactcctcgctaacggaataacacctctcgccactttatttcactgggatactcctcaagcacttgaagatgaatacagtggatttttaagcgaagaagctgttgatgacttcaaggattttgcggccttatgttttgaggagtttggcgaccgtgtaaaattgtgggtcacactaaacgaaccatgggtgtacagtattggtggctatgacacgggaagaaaagcccccggacgtgcctccaaatacatgaacgaagcagccgtggcaggagaatctggtctcgaggtttacactgttagtcacaatctacttctggctcacgccgaagctgttgaggtcttcaggaacaatcccaaatgtaaagatggcaagatcggtatcgctcattgtcccgtatggttcgagccttatgactcgaactgccctaaagacatagaagcatgcgaacgagctatggagtttatgtttggatggcacatggatcctacggtgtatggagattaccctgcagtcatgaaaaaatcgatcggaaaaagattaccatcatttaccgcagcacaatccaagaagcttagaggatcttttgatttcgttggggtgaattattacagtgctttctacgtcaaaaatattgatgaagtgaatcatgacaagcccaattggagatcagacgcacgcatcgaatggagaaaagaaaacaacgcagggcaaacattaggtgtaagaggtggttcggaatgggactttctatatccacaaggccttagaaagtttctaaattatgccaagaataaatatgaaagcccgaaatttatgattaccgaaaacggacactgtgatatagattatgagaaaaagcctaaactttctaacttgatggatctccaaaggacagagtaccacaagaaacatctccaaagcatccaacaagccatccaggaggatggggttgtagttgaaggatactttgcgtggtcattactagacaattgtgaatggaacgccggttatggagttcgatatggactattctacgtcgattataacaatggactaaaacgtttcccgaaaatgtcggcgatgtggttcaaagaattcttgaagagagaagaagaaattgaagattcagaagaagaagagtacgtgttgaagtcaacaatgaacaagaagagattcttattagcaactggttcatcagcttcatgctttattcctaagatgtctgaatcttctaaagccctcgaactattattctag

SEQ ID NO: 70854 - protein, 540 aa, Arabidopsis thaliana
  peptide (1)..(540): Ceres Seq. ID no. 3017448
  misc_feature (7)..(540): Homolog of NCBI NO: 15232260 NR Description: glycosyl hydrolase family 1; protein id:
  misc_feature (1)..(512): Homolog of NCBI NO: 15224886 NR Description: glycosyl hydrolase family 1; protein id: supported by cDNA: gi_20259434 [Arabidopsis thaliana]
  misc_feature (16)..(534): Homolog of NCBI NO: 15232262 NR Description: glycosyl hydrolase family 1, beta-glucosidase; id: At3g60140.1, supported by cDNA: gi_10834547 [Arabidopsis
  misc_feature (16)..(534): Homolog of NCBI NO: 10834548 NR Description: beta-glucosidase [Arabidopsis thaliana]
  misc_feature (1)..(491): Homolog of NCBI NO: 15238569 NR Description: glycosyl hydrolase family 1; protein id:
  misc_feature (14)..(520): Homolog of NCBI NO: 30689721 NR Description: glycosyl hydrolase family 1 [Arabidopsis thaliana]
  misc_feature (3)..(491): Homolog of NCBI NO: 22327030 NR Description: glycosyl hydrolase family 1; protein id:
  misc_feature (14)..(520): Homolog of NCBI NO: 7435453 NR Description: probable beta-glucosidase At2g44460 [imported] -
  misc_feature (12)..(491): Homolog of NCBI NO: 15228597 NR Description: glycosyl hydrolase family 1; protein id: supported by cDNA: gi_3420934 [Arabidopsis thaliana]
  misc_feature (3)..(491): Homolog of NCBI NO: 10177855 NR Description: beta-glucosidase [Arabidopsis thaliana]
MTQRKNMYSKKNSFGRSDFPEGFLFGTASSAYQYEGARNEAPRGESVWDTFVRKYPERNCYSNADQAIEFYNHYKDDIQRMKDINMDAFRFSISWPRIFPLGKKSKGVNKEGIQFYNDLIDELLANGITPLATLFHWDTPQALEDEYSGFLSEEAVDDFKDFAALCFEEFGDRVKLWVTLNEPWVYSIGGYDTGRKAPGRASKYMNEAAVAGESGLEVYTVSHNLLLAHAEAVEVFRNNPKCKDGKIGIAHCPVWFEPYDSNCPKDIEACERAMEFMFGWHMDPTVYGDYPAVMKKSIGKRLPSFTAAQSKKLRGSFDFVGVNYYSAFYVKNIDEVNHDKPNWRSDARIEWRKENNAGQTLGVRGGSEWDFLYPQGLRKFLNYAKNKYESPKFMITENGHCDIDYEKKPKLSNLMDLQRTEYHKKHLQSIQQAIQEDGVVVEGYFAWSLLDNCEWNAGYGVRYGLFYVDYNNGLKRFPKMSAMWFKEFLKREEEIEDSEEEEYVLKSTMNKKRFLLATGSSASCFIPKMSESSKALELLF

SEQ ID NO: 70855 - protein, 534 aa, Arabidopsis thaliana
  peptide (1)..(534): Ceres Seq. ID no. 3017449
  misc_feature (8)..(514): Homolog of NCBI NO: 7435453 NR Description: probable beta-glucosidase At2g44460 [imported] -
  misc_feature (6)..(485): Homolog of NCBI NO: 15228597 NR Description: glycosyl hydrolase family 1; protein id: supported by cDNA: gi_3420934 [Arabidopsis thaliana]
  misc_feature (1)..(485): Homolog of NCBI NO: 10177855 NR Description: beta-glucosidase [Arabidopsis thaliana]
  misc_feature (1)..(534): Homolog of NCBI NO: 15232260 NR Description: glycosyl hydrolase family 1; protein id:
  misc_feature (1)..(506): Homolog of NCBI NO: 15224886 NR Description: glycosyl hydrolase family 1; protein id: supported by cDNA: gi_20259434 [Arabidopsis thaliana]
  misc_feature (10)..(528): Homolog of NCBI NO: 15232262 NR Description: glycosyl hydrolase family 1, beta-glucosidase; id: At3g60140.1, supported by cDNA: gi_10834547 [Arabidopsis
  misc_feature (10)..(528): Homolog of NCBI NO: 10834548 NR Description: beta-glucosidase [Arabidopsis thaliana]
  misc_feature (1)..(485): Homolog of NCBI NO: 15238569 NR Description: glycosyl hydrolase family 1; protein id:
  misc_feature (8)..(514): Homolog of NCBI NO: 30689721 NR Description: glycosyl hydrolase family 1 [Arabidopsis thaliana]
  misc_feature (1)..(485): Homolog of NCBI NO: 22327030 NR Description: glycosyl hydrolase family 1; protein id:
MYSKKNSFGRSDFPEGFLFGTASSAYQYEGARNEAPRGESVWDTFVRKYPERNCYSNADQAIEFYNHYKDDIQRMKDINMDAFRFSISWPRIFPLGKKSKGVNKEGIQFYNDLIDELLANGITPLATLFHWDTPQALEDEYSGFLSEEAVDDFKDFAALCFEEFGDRVKLWVTLNEPWVYSIGGYDTGRKAPGRASKYMNEAAVAGESGLEVYTVSHNLLLAHAEAVEVFRNNPKCKDGKIGIAHCPVWFEPYDSNCPKDIEACERAMEFMFGWHMDPTVYGDYPAVMKKSIGKRLPSFTAAQSKKLRGSFDFVGVNYYSAFYVKNIDEVNHDKPNWRSDARIEWRKENNAGQTLGVRGGSEWDFLYPQGLRKFLNYAKNKYESPKFMITENGHCDIDYEKKPKLSNLMDLQRTEYHKKHLQSIQQAIQEDGVVVEGYFAWSLLDNCEWNAGYGVRYGLFYVDYNNGLKRFPKMSAMWFKEFLKREEEIEDSEEEEYVLKSTMNKKRFLLATGSSASCFIPKMSESSKALELLF

SEQ ID NO: 70856 - protein, 460 aa, Arabidopsis thaliana
  peptide (1)..(460): Ceres Seq. ID no. 3017450
  misc_feature (1)..(460): Homolog of NCBI NO: 15232260 NR Description: glycosyl hydrolase family 1; protein id:
  misc_feature (1)..(432): Homolog of NCBI NO: 15224886 NR Description: glycosyl hydrolase family 1; protein id: supported by cDNA: gi_20259434 [Arabidopsis thaliana]
  misc_feature (1)..(454): Homolog of NCBI NO: 15232262 NR Description: glycosyl hydrolase family 1, beta-glucosidase; id: At3g60140.1, supported by cDNA: gi_10834547 [Arabidopsis
  misc_feature (1)..(454): Homolog of NCBI NO: 10834548 NR Description: beta-glucosidase [Arabidopsis thaliana]
  misc_feature (1)..(411): Homolog of NCBI NO: 15238569 NR Description: glycosyl hydrolase family 1; protein id:
  misc_feature (1)..(440): Homolog of NCBI NO: 30689721 NR Description: glycosyl hydrolase family 1 [Arabidopsis thaliana]
  misc_feature (1)..(411): Homolog of NCBI NO: 22327030 NR Description: glycosyl hydrolase family 1; protein id:
  misc_feature (1)..(440): Homolog of NCBI NO: 7435453 NR Description: probable beta-glucosidase At2g44460 [imported] -
  misc_feature (1)..(411): Homolog of NCBI NO: 15228597 NR Description: glycosyl hydrolase family 1; protein id: supported by cDNA: gi_3420934 [Arabidopsis thaliana]
  misc_feature (1)..(411): Homolog of NCBI NO: 10177855 NR Description: beta-glucosidase [Arabidopsis thaliana]
MKDINMDAFRFSISWPRIFPLGKKSKGVNKEGIQFYNDLIDELLANGITPLATLFHWDTPQALEDEYSGFLSEEAVDDFKDFAALCFEEFGDRVKLWVTLNEPWVYSIGGYDTGRKAPGRASKYMNEAAVAGESGLEVYTVSHNLLLAHAEAVEVFRNNPKCKDGKIGIAHCPVWFEPYDSNCPKDIEACERAMEFMFGWHMDPTVYGDYPAVMKKSIGKRLPSFTAAQSKKLRGSFDFVGVNYYSAFYVKNIDEVNHDKPNWRSDARIEWRKENNAGQTLGVRGGSEWDFLYPQGLRKFLNYAKNKYESPKFMITENGHCDIDYEKKPKLSNLMDLQRTEYHKKHLQSIQQAIQEDGVVVEGYFAWSLLDNCEWNAGYGVRYGLFYVDYNNGLKRFPKMSAMWFKEFLKREEEIEDSEEEEYVLKSTMNKKRFLLATGSSASCFIPKMSESSKALELLF

SEQ ID NO: 70857 - DNA, 348 bp, Arabidopsis thaliana
  misc_feature (1)..(348): Ceres Seq. ID no. 3017472
  misc_feature: MA Experiment ID: 20000315 Result: Up-regulated in Transcription
  misc_feature: MA Experiment 20000315 PARAMETER Experiment Name: At_14day_Shoots-Roots_Sub_P Parameter: Age (day) Value: 14
  misc_feature: MA Experiment 20000315 PARAMETER Experiment Name: At_14day_Shoots-Roots_Sub_P Parameter: Organism Value: A. thaliana
  misc_feature: MA Experiment 20000315 PARAMETER Experiment Name: At_14day_Shoots-Roots_Sub_P Parameter: Plant Line Value: WS
  misc_feature: MA Experiment 20000315 PARAMETER Experiment Name: At_14day_Shoots-Roots_Sub_P Parameter: Tissue Value: Shoots vs. Whole Plant
  misc_feature: MA Experiment ID: 20000355 Result: Up-regulated in Transcription
  misc_feature: MA Experiment 20000355 PARAMETER Experiment Name: At_Siliques_Sub_P Parameter: Age (day) Value: 21
  misc_feature: MA Experiment 20000355 PARAMETER Experiment Name: At_Siliques_Sub_P Parameter: Organism Value: A. thaliana
  misc_feature: MA Experiment 20000355 PARAMETER Experiment Name: At_Siliques_Sub_P Parameter: Plant Line Value: WS
  misc_feature: MA Experiment 20000355 PARAMETER Experiment Name: At_Siliques_Sub_P Parameter: Tissue Value: Less Than 5mm Siliques vs. Whole Plant
atggcttctctcaactccgacgttatcatgggtgaatcctcctccatctccgtaccttcatcttcgtccaagaactcgaaacgatttgaattaaagaagtggagtgctgtcgctctctgggcttgggatatcgttgttgataactgcgcaatttgtaggaatcacatcatggatctctgtattgaatgtctagctaatcaagctagtgccactagtgaggaatgcactgttgcttggggggtttgcaaccacgcctttcacttccactgtatcagcagatggctcaaaactcgtcaagtgtgtccactagatgtctgcgagtgggaattccagaaatatggtcactaa

SEQ ID NO: 70858 - protein, 115 aa, Arabidopsis thaliana
  peptide (1)..(115): Ceres Seq. ID no. 3017473
  misc_feature (82)..(103): Pfam Name: Zinc finger, C3HC4 type (RING finger) Pfam Description: Zinc finger, C3HC4 type (RING finger)
  misc_feature (1)..(115): Homolog of NCBI NO: 15229164 NR Description: ring-box protein Roc1/Rbx1/Hrt1, putative;
  misc_feature (1)..(115): Homolog of NCBI NO: 18420256 NR Description: ring-box protein - like; protein id: At5g20570.1, by cDNA: 29408., supported by cDNA: gi_16186264, supported by
  misc_feature (4)..(115): Homolog of NCBI NO: 31747517 NR Description: ring box protein [Populus tomentosa]
  misc_feature (12)..(115): Homolog of NCBI NO: 18543187 NR Description: CG16982-PA [Drosophila melanogaster]
  misc_feature (7)..(115): Homolog of NCBI NO: 19387246 NR Description: putative ring box-1 protein [Oryza sativa
  misc_feature (3)..(115): Homolog of NCBI NO: 19067884 NR Description: hyperosmotic protein 21 [Salmo salar]
  misc_feature (5)..(115): Homolog of NCBI NO: 31210271 NR Description: ENSANGP00000010437 [Anopheles gambiae]
  misc_feature (10)..(115): Homolog of NCBI NO: 37537963 NR Description: RING-box protein 1 (Rbx1) (Hyperosmotic protein
  misc_feature (10)..(115): Homolog of NCBI NO: 7657508 NR Description: ring-box 1; RING box protein 1; regulator of
  misc_feature (10)..(115): Homolog of NCBI NO: 32425477 NR Description: RBX1 protein [Homo sapiens]
MASLNSDVIMGESSSISVPSSSSKNSKRFELKKWSAVALWAWDIVVDNCAICRNHIMDLCIECLANQASATSEECTVAWGVCNHAFHFHCISRWLKTRQVCPLDVCEWEFQKYGH

SEQ ID NO: 70859 - protein, 106 aa, Arabidopsis thaliana
  peptide (1)..(106): Ceres Seq. ID no. 3017474
  misc_feature (73)..(94): Pfam Name: Zinc finger, C3HC4 type (RING finger) Pfam Description: Zinc finger, C3HC4 type (RING finger)
  misc_feature (1)..(106): Homolog of NCBI NO: 15229164 NR Description: ring-box protein Roc1/Rbx1/Hrt1, putative;
  misc_feature (1)..(106): Homolog of NCBI NO: 18420256 NR Description: ring-box protein - like; protein id: At5g20570.1, by cDNA: 29408., supported by cDNA: gi_16186264, supported by
  misc_feature (1)..(106): Homolog of NCBI NO: 31747517 NR Description: ring box protein [Populus tomentosa]
  misc_feature (3)..(106): Homolog of NCBI NO: 18543187 NR Description: CG16982-PA [Drosophila melanogaster]
  misc_feature (1)..(106): Homolog of NCBI NO: 19387246 NR Description: putative ring box-1 protein [Oryza sativa
  misc_feature (1)..(106): Homolog of NCBI NO: 19067884 NR Description: hyperosmotic protein 21 [Salmo salar]
  misc_feature (1)..(106): Homolog of NCBI NO: 31210271 NR Description: ENSANGP00000010437 [Anopheles gambiae]
  misc_feature (1)..(106): Homolog of NCBI NO: 37537963 NR Description: RING-box protein 1 (Rbx1) (Hyperosmotic protein
  misc_feature (1)..(106): Homolog of NCBI NO: 7657508 NR Description: ring-box 1; RING box protein 1; regulator of
  misc_feature (1)..(106): Homolog of NCBI NO: 32425477 NR Description: RBX1 protein [Homo sapiens]
MGESSSISVPSSSSKNSKRFELKKWSAVALWAWDIVVDNCAICRNHIMDLCIECLANQASATSEECTVAWGVCNHAFHFHCISRWLKTRQVCPLDVCEWEFQKYGH

SEQ ID NO: 70860 - protein, 59 aa, Arabidopsis thaliana
  peptide (1)..(59): Ceres Seq. ID no. 3017475
  misc_feature (26)..(47): Pfam Name: Zinc finger, C3HC4 type (RING finger) Pfam Description: Zinc finger, C3HC4 type (RING finger)
  misc_feature (1)..(59): Homolog of NCBI NO: 15229164 NR Description: ring-box protein Roc1/Rbx1/Hrt1, putative;
  misc_feature (1)..(59): Homolog of NCBI NO: 18420256 NR Description: ring-box protein - like; protein id: At5g20570.1, by cDNA: 29408., supported by cDNA: gi_16186264, supported by
  misc_feature (1)..(59): Homolog of NCBI NO: 31747517 NR Description: ring box protein [Populus tomentosa]
  misc_feature (1)..(59): Homolog of NCBI NO: 18543187 NR Description: CG16982-PA [Drosophila melanogaster]
  misc_feature (1)..(59): Homolog of NCBI NO: 19387246 NR Description: putative ring box-1 protein [Oryza sativa
  misc_feature (1)..(59): Homolog of NCBI NO: 19067884 NR Description: hyperosmotic protein 21 [Salmo salar]
  misc_feature (1)..(59): Homolog of NCBI NO: 31210271 NR Description: ENSANGP00000010437 [Anopheles gambiae]
  misc_feature (1)..(59): Homolog of NCBI NO: 37537963 NR Description: RING-box protein 1 (Rbx1) (Hyperosmotic protein
  misc_feature (1)..(59): Homolog of NCBI NO: 7657508 NR Description: ring-box 1; RING box protein 1; regulator of
  misc_feature (1)..(59): Homolog of NCBI NO: 32425477 NR Description: RBX1 protein [Homo sapiens]
MDLCIECLANQASATSEECTVAWGVCNHAFHFHCISRWLKTRQVCPLDVCEWEFQKYGH

SEQ ID NO: 70861 - DNA, 1008 bp, Arabidopsis thaliana
  misc_feature (1)..(1008): Ceres Seq. ID no. 3018088
  misc_feature: MA Experiment ID: 20000171 Result: Down-regulated in Transcription
  misc_feature: MA Experiment 20000171 PARAMETER Experiment Name: At_42deg_Heat_P Parameter: Age (day) Value: 14
  misc_feature: MA Experiment 20000171 PARAMETER Experiment Name: At_42deg_Heat_P Parameter: Organism Value: A. thaliana
  misc_feature: MA Experiment 20000171 PARAMETER Experiment Name: At_42deg_Heat_P Parameter: Plant Line Value: WS
  misc_feature: MA Experiment 20000171 PARAMETER Experiment Name: At_42deg_Heat_P Parameter: Temperature (deg C) Value: 42 vs. 22
  misc_feature: MA Experiment 20000171 PARAMETER Experiment Name: At_42deg_Heat_P Parameter: Timepoint (hr) Value: 1
  misc_feature: MA Experiment 20000171 PARAMETER Experiment Name: At_42deg_Heat_P Parameter: Tissue Value: Aerial
  misc_feature: MA Experiment ID: 20000173 Result: Down-regulated in Transcription
  misc_feature: MA Experiment 20000173 PARAMETER Experiment Name: At_42deg_Heat_P Parameter: Age (day) Value: 14
  misc_feature: MA Experiment 20000173 PARAMETER Experiment Name: At_42deg_Heat_P Parameter: Organism Value: A. thaliana
  misc_feature: MA Experiment 20000173 PARAMETER Experiment Name: At_42deg_Heat_P Parameter: Plant Line Value: WS
  misc_feature: MA Experiment 20000173 PARAMETER Experiment Name: At_42deg_Heat_P Parameter: Temperature (deg C) Value: 42 vs. 22
  misc_feature: MA Experiment 20000173 PARAMETER Experiment Name: At_42deg_Heat_P Parameter: Timepoint (hr) Value: 6
  misc_feature: MA Experiment 20000173 PARAMETER Experiment Name: At_42deg_Heat_P Parameter: Tissue Value: Aerial
  misc_feature: MA Experiment ID: 20000180 Result: Up-regulated in Transcription
  misc_feature: MA Experiment 20000180 PARAMETER Experiment Name: At_Germinating_Seeds_P Parameter: Age (hr) Value: 24 vs. 0
  misc_feature: MA Experiment 20000180 PARAMETER Experiment Name: At_Germinating_Seeds_P Parameter: Tissue Value: Germinating Seeds
  misc_feature: MA Experiment ID: 20000182 Result: Up-regulated in Transcription
  misc_feature: MA Experiment 20000182 PARAMETER Experiment Name: At_2mM_SA_P Parameter: Age (day) Value: 14
  misc_feature: MA Experiment 20000182 PARAMETER Experiment Name: At_2mM_SA_P Parameter: Organism Value: A. thaliana
  misc_feature: MA Experiment 20000182 PARAMETER Experiment Name: At_2mM_SA_P Parameter: Plant Line Value: WS
  misc_feature: MA Experiment 20000182 PARAMETER Experiment Name: At_2mM_SA_P Parameter: Timepoint (hr) Value: 6
  misc_feature: MA Experiment 20000182 PARAMETER Experiment Name: At_2mM_SA_P Parameter: Tissue Value: Aerial
  misc_feature: MA Experiment 20000182 PARAMETER Experiment Name: At_2mM_SA_P Parameter: Treatment Value: 2mM SA vs. No Treatment
  misc_feature: MA Experiment ID: 20000439 Result: Up-regulated in Transcription
  misc_feature: MA Experiment 20000439 PARAMETER Experiment Name: At_Roots__P Parameter: Age (day) Value: 14 vs. 21
  misc_feature: MA Experiment 20000439 PARAMETER Experiment Name: At_Roots__P Parameter: Organism Value: A. thaliana
  misc_feature: MA Experiment 20000439 PARAMETER Experiment Name: At_Roots__P Parameter: Tissue Value: Roots vs. Whole Plant
  misc_feature: MA Experiment ID: 20000527 Result: Down-regulated in Transcription
  misc_feature: MA Experiment 20000527 PARAMETER Experiment Name: At_10percent_PEG_P Parameter: Age (day) Value: 20
  misc_feature: MA Experiment 20000527 PARAMETER Experiment Name: At_10percent_PEG_P Parameter: Organism Value: A. thaliana
  misc_feature: MA Experiment 20000527 PARAMETER Experiment Name: At_10percent_PEG_P Parameter: Plant Line Value: WS
  misc_feature: MA Experiment 20000527 PARAMETER Experiment Name: At_10percent_PEG_P Parameter: Timepoint (day) Value: 20
  misc_feature: MA Experiment 20000527 PARAMETER Experiment Name: At_10percent_PEG_P Parameter: Tissue Value: Whole Plant
  misc_feature: MA Experiment 20000527 PARAMETER Experiment Name: At_10percent_PEG_P Parameter: Treatment Value: 10percent PEG vs. No Treatment
  misc_feature: MA Experiment ID: 20000794 Result: Down-regulated in Transcription
  misc_feature: MA Experiment 20000794 PARAMETER Experiment Name: At_Petals_P Parameter: Age (day) Value: 23-25 days
  misc_feature: MA Experiment 20000794 PARAMETER Experiment Name: At_Petals_P Parameter: Plant Line Value: WS
  misc_feature: MA Experiment 20000794 PARAMETER Experiment Name: At_Petals_P Parameter: Tissue Value: Petals vs. Whole plant
  misc_feature: MA Experiment ID: 20001247 Result: Up-regulated in Transcription
  misc_feature: MA Experiment 20001247 PARAMETER Experiment Name: At_Far-red-induction_P Parameter: Age (day) Value: 7
  misc_feature: MA Experiment 20001247 PARAMETER Experiment Name: At_Far-red-induction_P Parameter: Light Value: Far-red vs. White
  misc_feature: MA Experiment 20001247 PARAMETER Experiment Name: At_Far-red-induction_P Parameter: Organism Value: A. thaliana
  misc_feature: MA Experiment 20001247 PARAMETER Experiment Name: At_Far-red-induction_P Parameter: Plant Line Value: Columbia
  misc_feature: MA Experiment 20001247 PARAMETER Experiment Name: At_Far-red-induction_P Parameter: Timepoint (hr) Value: 1
  misc_feature: MA Experiment 20001247 PARAMETER Experiment Name: At_Far-red-induction_P Parameter: Tissue Value: Whole Plant
  misc_feature: MA Experiment ID: 20001557 Result: Down-regulated in Transcription
  misc_feature: MA Experiment 20001557 PARAMETER Experiment Name: At_Drought_Soil_Dry_P Parameter: Age (day) Value: 27
  misc_feature: MA Experiment 20001557 PARAMETER Experiment Name: At_Drought_Soil_Dry_P Parameter: Organism Value: A. thaliana
  misc_feature: MA Experiment 20001557 PARAMETER Experiment Name: At_Drought_Soil_Dry_P Parameter: Plant Line Value: WS
  misc_feature: MA Experiment 20001557 PARAMETER Experiment Name: At_Drought_Soil_Dry_P Parameter: Post Timepoint (hr) Value: 3
  misc_feature: MA Experiment 20001557 PARAMETER Experiment Name: At_Drought_Soil_Dry_P Parameter: Post-Treatment Value: Re-Water vs. No Drought
  misc_feature: MA Experiment 20001557 PARAMETER Experiment Name: At_Drought_Soil_Dry_P Parameter: Timepoint (day) Value: 13
  misc_feature: MA Experiment 20001557 PARAMETER Experiment Name: At_Drought_Soil_Dry_P Parameter: Treatment Value: Drought vs. No Drought
  misc_feature: MA Experiment ID: 20001905 Result: Down-regulated in Transcription
  misc_feature: MA Experiment 20001905 PARAMETER Experiment Name: At_Drought_Reproduction_P Parameter: Age (day) Value: 40
  misc_feature: MA Experiment 20001905 PARAMETER Experiment Name: At_Drought_Reproduction_P Parameter: Organism Value: A. thaliana
  misc_feature: MA Experiment 20001905 PARAMETER Experiment Name: At_Drought_Reproduction_P Parameter: Plant Line Value: WS
  misc_feature: MA Experiment 20001905 PARAMETER Experiment Name: At_Drought_Reproduction_P Parameter: Timepoint (day) Value: 10
  misc_feature: MA Experiment 20001905 PARAMETER Experiment Name: At_Drought_Reproduction_P Parameter: Tissue Value: Rosettes
  misc_feature: MA Experiment 20001905 PARAMETER Experiment Name: At_Drought_Reproduction_P Parameter: Treatment Value: Drought vs. No Drought
  misc_feature: MA Experiment ID: 20001911 Result: Down-regulated in Transcription
  misc_feature: MA Experiment 20001911 PARAMETER Experiment Name: At_Drought_Reproduction_P Parameter: Age (day) Value: 40
  misc_feature: MA Experiment 20001911 PARAMETER Experiment Name: At_Drought_Reproduction_P Parameter: Organism Value: A. thaliana
  misc_feature: MA Experiment 20001911 PARAMETER Experiment Name: At_Drought_Reproduction_P Parameter: Plant Line Value: WS
  misc_feature: MA Experiment 20001911 PARAMETER Experiment Name: At_Drought_Reproduction_P Parameter: Timepoint (day) Value: 10
  misc_feature: MA Experiment 20001911 PARAMETER Experiment Name: At_Drought_Reproduction_P Parameter: Tissue Value: Flowers
  misc_feature: MA Experiment 20001911 PARAMETER Experiment Name: At_Drought_Reproduction_P Parameter: Treatment Value: Drought vs. No Drought
atggtgtcaatgaaaagcttcgttcatattctccgtcgatacatctccattgcaatcactctcttctataacctcatttggtgtttattcgacaatttcgattacccgatcctaatcaagctcgctgatacattcttatcattatatttcctaatcttctgcgatctccgtccaatcaccgtcgatttaaacgatggagaaaccacattacatttctggatctccggccaccgtaaaatcaaccgccctaacctcgtcatgttacacggctacggaggaaattcgaaatggcagttcattcatcaagtctcagatctatcgaaatcgtttaatctctttatccctgatcttgtgttcttcgggaaatcgtactcgagaaacaccgatcggactatcgagtttcaggcgaggagtatcgtcggaggtttgaagaggttaggttgtggtgacggagatttatcggtttattcaattagttacggtggatttgttgcgtaccggatagcgaagatttggccggagatgattgagaaattggtgattgtgagtagtggagttgggtttacacaacagcaaaagatgacggagatgaaaaaacacggcggagatgtatcggagattcttgttccgagtaatccgagagatctacggttgttagttaaggtttcgatgaatacaggtatcagatttcttgactgggttccagatttcatcctctcccaattcatcgctgtgatgtatgagacaaatcggcaagagcttgttgatttagctaagaatttgctggaaagagaagaggagccagagttattttcaatatcacagagaacgttaatcgtttggggtgataaggataatgtgtttccgttggagcatggacgtcgtctacaaaggcatttgccgaattcgagtttagaggtattgaaggaaattggacatggtgtgaacattgaagcaccaactactcttaacaatttgattatctcgtttgttttaggtgttccttaa

SEQ ID NO: 70862 - protein, 335 aa, Arabidopsis thaliana
  peptide (1)..(335): Ceres Seq. ID no. 3018089
  misc_feature (110)..(329): Pfam Name: alpha/beta hydrolase fold Pfam Description: alpha/beta hydrolase fold
  misc_feature (1)..(335): Homolog of NCBI NO: 15218538 NR Description: unknown protein; protein id: At1g72620.1
  misc_feature (1)..(332): Homolog of NCBI NO: 21592821 NR Description: unknown [Arabidopsis thaliana]
  misc_feature (1)..(332): Homolog of NCBI NO: 18394481 NR Description: expressed protein; protein id: At1g17430.1, by cDNA: 32887. [Arabidopsis thaliana] >gi|25402829|pir||H86310
  misc_feature (8)..(298): Homolog of NCBI NO: 9665130 NR Description: Unknown protein [Arabidopsis thaliana]
  misc_feature (38)..(243): Homolog of NCBI NO: 27436747 NR Description: Hypothetical protein [Oryza sativa (japonica
  misc_feature (245)..(332): Homolog of NCBI NO: 27436747 NR Description: Hypothetical protein [Oryza sativa (japonica
  misc_feature (65)..(333): Homolog of NCBI NO: 30689631 NR Description: hydrolase, alpha/beta fold family [Arabidopsis
  misc_feature (56)..(334): Homolog of NCBI NO: 33146617 NR Description: hydrolase-like protein [Oryza sativa (japonica
  misc_feature (56)..(332): Homolog of NCBI NO: 15242419 NR Description: putative hydrolase; protein id: At5g09430.1 thaliana] >gi|9955530|emb|CAC05469.1| putative hydrolase
  misc_feature (56)..(332): Homolog of NCBI NO: 18411865 NR Description: hypothetical protein; protein id: At1g78210.1, by cDNA: gi_19699018 [Arabidopsis thaliana] unknown protein [Arabidopsis thaliana]
MVSMKSFVHILRRYISIAITLFYNLIWCLFDNFDYPILIKLADTFLSLYFLIFCDLRPITVDLNDGETTLHFWISGHRKINRPNLVMLHGYGGNSKWQFIHQVSDLSKSFNLFIPDLVFFGKSYSRNTDRTIEFQARSIVGGLKRLGCGDGDLSVYSISYGGFVAYRIAKIWPEMIEKLVIVSSGVGFTQQQKMTEMKKHGGDVSEILVPSNPRDLRLLVKVSMNTGIRFLDWVPDFILSQFIAVMYETNRQELVDLAKNLLEREEEPELFSISQRTLIVWGDKDNVFPLEHGRRLQRHLPNSSLEVLKEIGHGVNIEAPTTLNNLIISFVLGVP

SEQ ID NO: 70863 - protein, 332 aa, Arabidopsis thaliana
  peptide (1)..(332): Ceres Seq. ID no. 3018090
  misc_feature (107)..(326): Pfam Name: alpha/beta hydrolase fold Pfam Description: alpha/beta hydrolase fold
  misc_feature (1)..(332): Homolog of NCBI NO: 15218538 NR Description: unknown protein; protein id: At1g72620.1
  misc_feature (1)..(329): Homolog of NCBI NO: 21592821 NR Description: unknown [Arabidopsis thaliana]
  misc_feature (1)..(329): Homolog of NCBI NO: 18394481 NR Description: expressed protein; protein id: At1g17430.1, by cDNA: 32887. [Arabidopsis thaliana] >gi|25402829|pir||H86310
  misc_feature (5)..(295): Homolog of NCBI NO: 9665130 NR Description: Unknown protein [Arabidopsis thaliana]
  misc_feature (35)..(240): Homolog of NCBI NO: 27436747 NR Description: Hypothetical protein [Oryza sativa (japonica
  misc_feature (242)..(329): Homolog of NCBI NO: 27436747 NR Description: Hypothetical protein [Oryza sativa (japonica
  misc_feature (62)..(330): Homolog of NCBI NO: 30689631 NR Description: hydrolase, alpha/beta fold family [Arabidopsis
  misc_feature (53)..(331): Homolog of NCBI NO: 33146617 NR Description: hydrolase-like protein [Oryza sativa (japonica
  misc_feature (53)..(329): Homolog of NCBI NO: 15242419 NR Description: putative hydrolase; protein id: At5g09430.1 thaliana] >gi|9955530|emb|CAC05469.1| putative hydrolase
  misc_feature (53)..(329): Homolog of NCBI NO: 18411865 NR Description: hypothetical protein; protein id: At1g78210.1, by cDNA: gi_19699018 [Arabidopsis thaliana] unknown protein [Arabidopsis thaliana]
MKSFVHILRRYISIAITLFYNLIWCLFDNFDYPILIKLADTFLSLYFLIFCDLRPITVDLNDGETTLHFWISGHRKINRPNLVMLHGYGGNSKWQFIHQVSDLSKSFNLFIPDLVFFGKSYSRNTDRTIEFQARSIVGGLKRLGCGDGDLSVYSISYGGFVAYRIAKIWPEMIEKLVIVSSGVGFTQQQKMTEMKKHGGDVSEILVPSNPRDLRLLVKVSMNTGIRFLDWVPDFILSQFIAVMYETNRQELVDLAKNLLEREEEPELFSISQRTLIVWGDKDNVFPLEHGRRLQRHLPNSSLEVLKEIGHGVNIEAPTTLNNLIISFVLGVP

SEQ ID NO: 70864 - protein, 249 aa, Arabidopsis thaliana
  peptide (1)..(249): Ceres Seq. ID no. 3018091
  misc_feature (24)..(243): Pfam Name: alpha/beta hydrolase fold Pfam Description: alpha/beta hydrolase fold
  misc_feature (1)..(249): Homolog of NCBI NO: 15218538 NR Description: unknown protein; protein id: At1g72620.1
  misc_feature (1)..(246): Homolog of NCBI NO: 21592821 NR Description: unknown [Arabidopsis thaliana]
  misc_feature (1)..(246): Homolog of NCBI NO: 18394481 NR Description: expressed protein; protein id: At1g17430.1, by cDNA: 32887. [Arabidopsis thaliana] >gi|25402829|pir||H86310
  misc_feature (1)..(212): Homolog of NCBI NO: 9665130 NR Description: Unknown protein [Arabidopsis thaliana]
  misc_feature (1)..(157): Homolog of NCBI NO: 27436747 NR Description: Hypothetical protein [Oryza sativa (japonica
  misc_feature (159)..(246): Homolog of NCBI NO: 27436747 NR Description: Hypothetical protein [Oryza sativa (japonica
  misc_feature (1)..(247): Homolog of NCBI NO: 30689631 NR Description: hydrolase, alpha/beta fold family [Arabidopsis
  misc_feature (1)..(248): Homolog of NCBI NO: 33146617 NR Description: hydrolase-like protein [Oryza sativa (japonica
  misc_feature (1)..(246): Homolog of NCBI NO: 15242419 NR Description: putative hydrolase; protein id: At5g09430.1 thaliana] >gi|9955530|emb|CAC05469.1| putative hydrolase
  misc_feature (1)..(246): Homolog of NCBI NO: 18411865 NR Description: hypothetical protein; protein id: At1g78210.1, by cDNA: gi_19699018 [Arabidopsis thaliana] unknown protein [Arabidopsis thaliana]
MLHGYGGNSKWQFIHQVSDLSKSFNLFIPDLVFFGKSYSRNTDRTIEFQARSIVGGLKRLGCGDGDLSVYSISYGGFVAYRIAKIWPEMIEKLVIVSSGVGFTQQQKMTEMKKHGGDVSEILVPSNPRDLRLLVKVSMNTGIRFLDWVPDFILSQFIAVMYETNRQELVDLAKNLLEREEEPELFSISQRTLIVWGDKDNVFPLEHGRRLQRHLPNSSLEVLKEIGHGVNIEAPTTLNNLIISFVLGVP

SEQ ID NO: 70865 - DNA, 1737 bp, Arabidopsis thaliana
  misc_feature (1)..(1737): Ceres Seq. ID no. 3018727
  misc_feature: MA Experiment ID: 20000184 Result: Down-regulated in Transcription
  misc_feature: MA Experiment 20000184 PARAMETER Experiment Name: At_Shoots__P Parameter: Age (day) Value: 7
  misc_feature: MA Experiment 20000184 PARAMETER Experiment Name: At_Shoots__P Parameter: Tissue Value: Shoots vs. Whole Plant
  misc_feature: MA Experiment ID: 20000234 Result: Up-regulated in Transcription
  misc_feature: MA Experiment 20000234 PARAMETER Experiment Name: At_Siliques_P Parameter: Age (day) Value: 21
  misc_feature: MA Experiment 20000234 PARAMETER Experiment Name: At_Siliques_P Parameter: Organism Value: A. thaliana
  misc_feature: MA Experiment 20000234 PARAMETER Experiment Name: At_Siliques_P Parameter: Plant Line Value: WS
  misc_feature: MA Experiment 20000234 PARAMETER Experiment Name: At_Siliques_P Parameter: Tissue Value: Less Than 5mm Siliques vs. Whole Plant
  misc_feature: MA Experiment ID: 20000267 Result: Up-regulated in Transcription
  misc_feature: MA Experiment 20000267 PARAMETER Experiment Name: At_Drought_P Parameter: Age (day) Value: 7
  misc_feature: MA Experiment 20000267 PARAMETER Experiment Name: At_Drought_P Parameter: Organism Value: A. thaliana
  misc_feature: MA Experiment 20000267 PARAMETER Experiment Name: At_Drought_P Parameter: Plant Line Value: WS
  misc_feature: MA Experiment 20000267 PARAMETER Experiment Name: At_Drought_P Parameter: Timepoint (hr) Value: 6
  misc_feature: MA Experiment 20000267 PARAMETER Experiment Name: At_Drought_P Parameter: Tissue Value: Whole Plant
  misc_feature: MA Experiment 20000267 PARAMETER Experiment Name: At_Drought_P Parameter: Treatment Value: Drought vs. No Drought
  misc_feature: MA Experiment ID: 20000436 Result: Up-regulated in Transcription
  misc_feature: MA Experiment 20000436 PARAMETER Experiment Name: At_Drought_P Parameter: Age (day) Value: 7
  misc_feature: MA Experiment 20000436 PARAMETER Experiment Name: At_Drought_P Parameter: Organism Value: A. thaliana
  misc_feature: MA Experiment 20000436 PARAMETER Experiment Name: At_Drought_P Parameter: Plant Line Value: WS
  misc_feature: MA Experiment 20000436 PARAMETER Experiment Name: At_Drought_P Parameter: Timepoint (hr) Value: 12
  misc_feature: MA Experiment 20000436 PARAMETER Experiment Name: At_Drought_P Parameter: Tissue Value: Whole Plant
  misc_feature: MA Experiment 20000436 PARAMETER Experiment Name: At_Drought_P Parameter: Treatment Value: Drought vs. No Drought
  misc_feature: MA Experiment ID: 20000437 Result: Up-regulated in Transcription
  misc_feature: MA Experiment 20000437 PARAMETER Experiment Name: At_Drought_P Parameter: Age (day) Value: 8
  misc_feature: MA Experiment 20000437 PARAMETER Experiment Name: At_Drought_P Parameter: Organism Value: A. thaliana
  misc_feature: MA Experiment 20000437 PARAMETER Experiment Name: At_Drought_P Parameter: Plant Line Value: WS
  misc_feature: MA Experiment 20000437 PARAMETER Experiment Name: At_Drought_P Parameter: Timepoint (hr) Value: 24
  misc_feature: MA Experiment 20000437 PARAMETER Experiment Name: At_Drought_P Parameter: Tissue Value: Whole Plant
  misc_feature: MA Experiment 20000437 PARAMETER Experiment Name: At_Drought_P Parameter: Treatment Value: Drought vs. No Drought
  misc_feature: MA Experiment ID: 20000495 Result: Up-regulated in Transcription
  misc_feature: MA Experiment 20000495 PARAMETER Experiment Name: At_Guard_Cells_P Parameter: Harvest Date Value: 8/2/2002
  misc_feature: MA Experiment 20000495 PARAMETER Experiment Name: At_Guard_Cells_P Parameter: Organism Value: A. thaliana
  misc_feature: MA Experiment 20000495 PARAMETER Experiment Name: At_Guard_Cells_P Parameter: Tissue Value: Guard Cells vs. Leaves
  misc_feature: MA Experiment ID: 20000496 Result: Up-regulated in Transcription
  misc_feature: MA Experiment 20000496 PARAMETER Experiment Name: At_Guard_Cells_P Parameter: Harvest Date Value: 7/19/2002
  misc_feature: MA Experiment 20000496 PARAMETER Experiment Name: At_Guard_Cells_P Parameter: Organism Value: Canola
  misc_feature: MA Experiment 20000496 PARAMETER Experiment Name: At_Guard_Cells_P Parameter: Tissue Value: Guard Cells vs. Leaves
atgacgtctctattctctaaacctagagctctcacttctcatatcaccaactttaaaacttaccgtccggttatcggaaaactccacgtggcaactttaacgcttcttctcttcctaatcgccgccggtattgccgtcacttcctctctatggcttaacaagacgacaaaagcatttgatcgaccgacattagtagcaacaaaaccagaaccggagctagagccaccgcatgaaaccggagtattggtaaattgcacaagtttcttgaatcaaaaccggtccggttcttgctcaagaacacctctacttaacaagaaaaaaccatctcatcgaccgacaataacaacaataaaaccggtcccggtacgtgtatcagagaagaaatcaccggaggaaaccggaagctcggtagattgctcaagtttcttgaatcaaaaccggtctggttcttgctcaagaacactgcaatcgggttataatcaaaaccaaaccgaatctaaccggtcttgtcctgattacttcaagtggattcacgaggatctaaaaccatggagagaaacagggataacaaaagaaatggtggaaagaggcaaaactacagcacatttcaggttagttattttaaacggcaaggtgttcgtcgaaaactacaagaagtctatacaaactagagatgcgttcacactatgggggattcttcagctgctgagaaagtatccagggaagttacctgacgtggatctcatgtttgactgtgatgatcgaccagtcattagatcggacggttataatatattgaatcgtacggttgagaatgcgccacctccgttgtttagatattgcggtgataggtggacggtggatatcgtctttcctgattggtcattctggggatggcaggagataaacataagggagtggagcaaagtgttgaaagaaatggaagaaggaaagaagaagaagaaatttatggaaagagacgcctatgcatattggaaagggaacccttttgttgcatctccttcaagagaagatctcctcacttgcaatttatcctcactacatgattggaatgctagaattttcattcaggattggatatcagaaggacaaagaggatttgagaattcgaatgtagcaaatcaatgcacttacaggtacaagatctatatagaagggtatgcgtggtcagtgagtgagaaatacatattagcatgtgactcagtcacattgatggtgaaaccttattactatgatttcttctcaagaactcttcaacctctccaacactattggcccattagggataaagataaatgtagatccatcaaatttgctgttgattggcttaataatcacactcaaaaggctcaagagataggaagagaagcaagtgagttcatgcaaagagatctatcaatggaaaatgtttatgattacatgttccatctgttgaatgaatactccaagcttcttaagtacaagcctcaagttccaaagaatagtgttgagctatgcacagaagccttggtgtgcccttctgaaggggaagatgttaatggggttgataagaaatttatgataggctctttagttagtaggcctcatgcttctggcccatgttcacttcctcctccttttgattccaatggtcttgagaagttccataggaagaaattgaatctcatccggcaagtggagaaatgggaagactcttactggcaaaaggttctgtaa

SEQ ID NO: 70866 - protein, 578 aa, Arabidopsis thaliana
  peptide (1)..(578): Ceres Seq. ID no. 3018728
  misc_feature (165)..(364): Pfam Name: Arabidopsis thaliana protein of unknown function Pfam Description: Arabidopsis thaliana protein of unknown
  misc_feature (113)..(576): Homolog of NCBI NO: 15237842 NR Description: putative protein; protein id: At5g23850.1 thaliana] >gi|10176852|dbj|BAB10058.1| contains similarity to
  misc_feature (124)..(576): Homolog of NCBI NO: 15229061 NR Description: putative protein; protein id: At3g48980.1
  misc_feature (115)..(574): Homolog of NCBI NO: 7486461 NR Description: hypothetical protein At2g45830 [imported] - thaliana >gi|3386611|gb|AAC28541.1| unknown protein [Arabidopsis
  misc_feature (125)..(577): Homolog of NCBI NO: 15233070 NR Description: putative protein; protein id: At3g61270.1
  misc_feature (193)..(574): Homolog of NCBI NO: 30690136 NR Description: expressed protein [Arabidopsis thaliana]
  misc_feature (169)..(570): Homolog of NCBI NO: 38346998 NR Description: OSJNBb0039L24.21 [Oryza sativa (japonica
  misc_feature (193)..(570): Homolog of NCBI NO: 21742339 NR Description: OSJNBb0020O11.18 [Oryza sativa (japonica
  misc_feature (143)..(575): Homolog of NCBI NO: 15233074 NR Description: putative protein; protein id: At3g61290.1
  misc_feature (117)..(576): Homolog of NCBI NO: 15222341 NR Description: hypothetical protein; protein id: At1g07220.1
  misc_feature (110)..(546): Homolog of NCBI NO: 38637028 NR Description: unknown protein [Oryza sativa (japonica
MTSLFSKPRALTSHITNFKTYRPVIGKLHVATLTLLLFLIAAGIAVTSSLWLNKTTKAFDRPTLVATKPEPELEPPHETGVLVNCTSFLNQNRSGSCSRTPLLNKKKPSHRPTITTIKPVPVRVSEKKSPEETGSSVDCSSFLNQNRSGSCSRTLQSGYNQNQTESNRSCPDYFKWIHEDLKPWRETGITKEMVERGKTTAHFRLVILNGKVFVENYKKSIQTRDAFTLWGILQLLRKYPGKLPDVDLMFDCDDRPVIRSDGYNILNRTVENAPPPLFRYCGDRWTVDIVFPDWSFWGWQEINIREWSKVLKEMEEGKKKKKFMERDAYAYWKGNPFVASPSREDLLTCNLSSLHDWNARIFIQDWISEGQRGFENSNVANQCTYRYKIYIEGYAWSVSEKYILACDSVTLMVKPYYYDFFSRTLQPLQHYWPIRDKDKCRSIKFAVDWLNNHTQKAQEIGREASEFMQRDLSMENVYDYMFHLLNEYSKLLKYKPQVPKNSVELCTEALVCPSEGEDVNGVDKKFMIGSLVSRPHASGPCSLPPPFDSNGLEKFHRKKLNLIRQVEKWEDSYWQKVL

SEQ ID NO: 70867 - protein, 386 aa, Arabidopsis thaliana
  peptide (1)..(386): Ceres Seq. ID no. 3018729
  misc_feature (1)..(172): Pfam Name: Arabidopsis thaliana protein of unknown function Pfam Description: Arabidopsis thaliana protein of unknown
  misc_feature (1)..(384): Homolog of NCBI NO: 15237842 NR Description: putative protein; protein id: At5g23850.1 thaliana] >gi|10176852|dbj|BAB10058.1| contains similarity to
  misc_feature (1)..(384): Homolog of NCBI NO: 15229061 NR Description: putative protein; protein id: At3g48980.1
  misc_feature (1)..(382): Homolog of NCBI NO: 7486461 NR Description: hypothetical protein At2g45830 [imported] - thaliana >gi|3386611|gb|AAC28541.1| unknown protein [Arabidopsis
  misc_feature (1)..(385): Homolog of NCBI NO: 15233070 NR Description: putative protein; protein id: At3g61270.1
  misc_feature (1)..(382): Homolog of NCBI NO: 30690136 NR Description: expressed protein [Arabidopsis thaliana]
  misc_feature (1)..(378): Homolog of NCBI NO: 38346998 NR Description: OSJNBb0039L24.21 [Oryza sativa (japonica
  misc_feature (1)..(378): Homolog of NCBI NO: 21742339 NR Description: OSJNBb0020O11.18 [Oryza sativa (japonica
  misc_feature (1)..(383): Homolog of NCBI NO: 15233074 NR Description: putative protein; protein id: At3g61290.1
  misc_feature (1)..(384): Homolog of NCBI NO: 15222341 NR Description: hypothetical protein; protein id: At1g07220.1
  misc_feature (1)..(354): Homolog of NCBI NO: 38637028 NR Description: unknown protein [Oryza sativa (japonica
MVERGKTTAHFRLVILNGKVFVENYKKSIQTRDAFTLWGILQLLRKYPGKLPDVDLMFDCDDRPVIRSDGYNILNRTVENAPPPLFRYCGDRWTVDIVFPDWSFWGWQEINIREWSKVLKEMEEGKKKKKFMERDAYAYWKGNPFVASPSREDLLTCNLSSLHDWNARIFIQDWISEGQRGFENSNVANQCTYRYKIYIEGYAWSVSEKYILACDSVTLMVKPYYYDFFSRTLQPLQHYWPIRDKDKCRSIKFAVDWLNNHTQKAQEIGREASEFMQRDLSMENVYDYMFHLLNEYSKLLKYKPQVPKNSVELCTEALVCPSEGEDVNGVDKKFMIGSLVSRPHASGPCSLPPPFDSNGLEKFHRKKLNLIRQVEKWEDSYWQKVL

SEQ ID NO: 70868 - protein, 330 aa, Arabidopsis thaliana
  peptide (1)..(330): Ceres Seq. ID no. 3018730
  misc_feature (1)..(116): Pfam Name: Arabidopsis thaliana protein of unknown function Pfam Description: Arabidopsis thaliana protein of unknown
  misc_feature (1)..(328): Homolog of NCBI NO: 15237842 NR Description: putative protein; protein id: At5g23850.1 thaliana] >gi|10176852|dbj|BAB10058.1| contains similarity to
  misc_feature (1)..(328): Homolog of NCBI NO: 15229061 NR Description: putative protein; protein id: At3g48980.1
  misc_feature (1)..(326): Homolog of NCBI NO: 7486461 NR Description: hypothetical protein At2g45830 [imported] - thaliana >gi|3386611|gb|AAC28541.1| unknown protein [Arabidopsis
  misc_feature (1)..(329): Homolog of NCBI NO: 15233070 NR Description: putative protein; protein id: At3g61270.1
  misc_feature (1)..(326): Homolog of NCBI NO: 30690136 NR Description: expressed protein [Arabidopsis thaliana]
  misc_feature (1)..(322): Homolog of NCBI NO: 38346998 NR Description: OSJNBb0039L24.21 [Oryza sativa (japonica
  misc_feature (1)..(322): Homolog of NCBI NO: 21742339 NR Description: OSJNBb0020O11.18 [Oryza sativa (japonica
  misc_feature (1)..(327): Homolog of NCBI NO: 15233074 NR Description: putative protein; protein id: At3g61290.1
  misc_feature (1)..(328): Homolog of NCBI NO: 15222341 NR Description: hypothetical protein; protein id: At1g07220.1
  misc_feature (1)..(298): Homolog of NCBI NO: 38637028 NR Description: unknown protein [Oryza sativa (japonica
MFDCDDRPVIRSDGYNILNRTVENAPPPLFRYCGDRWTVDIVFPDWSFWGWQEINIREWSKVLKEMEEGKKKKKFMERDAYAYWKGNPFVASPSREDLLTCNLSSLHDWNARIFIQDWISEGQRGFENSNVANQCTYRYKIYIEGYAWSVSEKYILACDSVTLMVKPYYYDFFSRTLQPLQHYWPIRDKDKCRSIKFAVDWLNNHTQKAQEIGREASEFMQRDLSMENVYDYMFHLLNEYSKLLKYKPQVPKNSVELCTEALVCPSEGEDVNGVDKKFMIGSLVSRPHASGPCSLPPPFDSNGLEKFHRKKLNLIRQVEKWEDSYWQKVL

SEQ ID NO: 70869 - DNA, 606 bp, Arabidopsis thaliana
  misc_feature (1)..(606): Ceres Seq. ID no. 3021062
  misc_feature: MA Experiment ID: 20000180 Result: Up-regulated in Transcription
  misc_feature: MA Experiment 20000180 PARAMETER Experiment Name: At_Germinating_Seeds_P Parameter: Age (hr) Value: 24 vs. 0
  misc_feature: MA Experiment 20000180 PARAMETER Experiment Name: At_Germinating_Seeds_P Parameter: Tissue Value: Germinating Seeds
atggaagaatctgttcatcaatcgatacgattcggctcagttgcagatttaatcatgtggaagaatcgacgcggagggtttcttctacttggatcaacgacattgttatggttcctctttgagaaatgtggatacagtttcttcccctttgttgttaatactcagcttctctccgtcgttatactcttcctctgggccaaatctgctattctcttcaataggcctatgcctcaactacctaatcttgaaatcactgaggaatttgtgtttatggtggctgatgctatacgagtctggattaataccgtgctcgctgttgctcgtgagatttacgtgggaagaaatgcaaagcaactctttcgggtgagtgttgtgttgtggacagtatcatttgttggaaatttcttaaacttcctcacaatactctatcttggtgttgttctgagtctgttgattccctttttgtacgagagataccaggatcttattgacgagaagctatctttaactcatcgagtcattcagacacagtacaggaagatcgatgaaagattactacagaagattattgctaagcccacaaataagataaagaagatgcaatag

SEQ ID NO: 70870 - protein, 201 aa, Arabidopsis thaliana
  peptide (1)..(201): Ceres Seq. ID no. 3021063
  misc_feature (1)..(201): Homolog of NCBI NO: 30679374 NR Description: expressed protein [Arabidopsis thaliana]
  misc_feature (19)..(201): Homolog of NCBI NO: 25411624 NR Description: hypothetical protein At2g15280 [imported] - thaliana >gi|4662633|gb|AAD26905.1| hypothetical protein
  misc_feature (4)..(180): Homolog of NCBI NO: 18402246 NR Description: expressed protein; protein id: At3g19460.1, by cDNA: 37065. [Arabidopsis thaliana] gb|AAD26905.1~gene_id:MLD14.20~similar to unknown protein
  misc_feature (4)..(180): Homolog of NCBI NO: 21593206 NR Description: unknown [Arabidopsis thaliana]
  misc_feature (4)..(174): Homolog of NCBI NO: 38345298 NR Description: OSJNBa0043A12.26 [Oryza sativa (japonica
  misc_feature (2)..(198): Homolog of NCBI NO: 18406991 NR Description: expressed protein; protein id: At2g46170.1, by cDNA: gi_15450758, supported by cDNA: gi_18491130 [Arabidopsis >gi|25408969|pir||E84899 hypothetical protein At2g46170
  misc_feature (2)..(199): Homolog of NCBI NO: 15238125 NR Description: putative protein; protein id: At5g41600.1, by cDNA: gi_14334529, supported by cDNA: gi_16323068 [Arabidopsis >gi|10178014|dbj|BAB11466.1| contains similarity to 24 kDa seed
  misc_feature (2)..(192): Homolog of NCBI NO: 15222616 NR Description: hypothetical protein; protein id: At1g64090.1, by cDNA: gi_17381217 [Arabidopsis thaliana] F22C12.15 [Arabidopsis thaliana] >gi|17381218|gb|AAL36421.1|
  misc_feature (2)..(199): Homolog of NCBI NO: 15236556 NR Description: putative protein; protein id: At4g23630.1, by cDNA: 39185., supported by cDNA: gi_15215585 [Arabidopsis
  misc_feature (2)..(199): Homolog of NCBI NO: 34904202 NR Description: P0492F05.25 [Oryza sativa (japonica
MEESVHQSIRFGSVADLIMWKNRRGGFLLLGSTTLLWFLFEKCGYSFFPFVVNTQLLSVVILFLWAKSAILFNRPMPQLPNLEITEEFVFMVADAIRVWINTVLAVAREIYVGRNAKQLFRVSVVLWTVSFVGNFLNFLTILYLGVVLSLLIPFLYERYQDLIDEKLSLTHRVIQTQYRKIDERLLQKIIAKPTNKIKKMQ

SEQ ID NO: 70871 - protein, 183 aa, Arabidopsis thaliana
  peptide (1)..(183): Ceres Seq. ID no. 3021064
  misc_feature (1)..(162): Homolog of NCBI NO: 18402246 NR Description: expressed protein; protein id: At3g19460.1, by cDNA: 37065. [Arabidopsis thaliana] gb|AAD26905.1~gene_id:MLD14.20~similar to unknown protein
  misc_feature (1)..(162): Homolog of NCBI NO: 21593206 NR Description: unknown [Arabidopsis thaliana]
  misc_feature (1)..(156): Homolog of NCBI NO: 38345298 NR Description: OSJNBa0043A12.26 [Oryza sativa (japonica
  misc_feature (1)..(180): Homolog of NCBI NO: 18406991 NR Description: expressed protein; protein id: At2g46170.1, by cDNA: gi_15450758, supported by cDNA: gi_18491130 [Arabidopsis >gi|25408969|pir||E84899 hypothetical protein At2g46170
  misc_feature (1)..(181): Homolog of NCBI NO: 15238125 NR Description: putative protein; protein id: At5g41600.1, by cDNA: gi_14334529, supported by cDNA: gi_16323068 [Arabidopsis >gi|10178014|dbj|BAB11466.1| contains similarity to 24 kDa seed
  misc_feature (1)..(174): Homolog of NCBI NO: 15222616 NR Description: hypothetical protein; protein id: At1g64090.1, by cDNA: gi_17381217 [Arabidopsis thaliana] F22C12.15 [Arabidopsis thaliana] >gi|17381218|gb|AAL36421.1|
  misc_feature (1)..(181): Homolog of NCBI NO: 15236556 NR Description: putative protein; protein id: At4g23630.1, by cDNA: 39185., supported by cDNA: gi_15215585 [Arabidopsis
  misc_feature (1)..(181): Homolog of NCBI NO: 34904202 NR Description: P0492F05.25 [Oryza sativa (japonica
  misc_feature (1)..(183): Homolog of NCBI NO: 30679374 NR Description: expressed protein [Arabidopsis thaliana]
  misc_feature (1)..(183): Homolog of NCBI NO: 25411624 NR Description: hypothetical protein At2g15280 [imported] - thaliana >gi|4662633|gb|AAD26905.1| hypothetical protein
MWKNRRGGFLLLGSTTLLWFLFEKCGYSFFPFVVNTQLLSVVILFLWAKSAILFNRPMPQLPNLEITEEFVFMVADAIRVWINTVLAVAREIYVGRNAKQLFRVSVVLWTVSFVGNFLNFLTILYLGVVLSLLIPFLYERYQDLIDEKLSLTHRVIQTQYRKIDERLLQKIIAKPTNKIKKMQ

SEQ ID NO: 70872 - protein, 126 aa, Arabidopsis thaliana
  peptide (1)..(126): Ceres Seq. ID no. 3021065
  misc_feature (1)..(126): Homolog of NCBI NO: 30679374 NR Description: expressed protein [Arabidopsis thaliana]
  misc_feature (1)..(126): Homolog of NCBI NO: 25411624 NR Description: hypothetical protein At2g15280 [imported] - thaliana >gi|4662633|gb|AAD26905.1| hypothetical protein
  misc_feature (1)..(105): Homolog of NCBI NO: 18402246 NR Description: expressed protein; protein id: At3g19460.1, by cDNA: 37065. [Arabidopsis thaliana] gb|AAD26905.1~gene_id:MLD14.20~similar to unknown protein
  misc_feature (1)..(105): Homolog of NCBI NO: 21593206 NR Description: unknown [Arabidopsis thaliana]
  misc_feature (1)..(99): Homolog of NCBI NO: 38345298 NR Description: OSJNBa0043A12.26 [Oryza sativa (japonica
  misc_feature (1)..(123): Homolog of NCBI NO: 18406991 NR Description: expressed protein; protein id: At2g46170.1, by cDNA: gi_15450758, supported by cDNA: gi_18491130 [Arabidopsis >gi|25408969|pir||E84899 hypothetical protein At2g46170
  misc_feature (1)..(124): Homolog of NCBI NO: 15238125 NR Description: putative protein; protein id: At5g41600.1, by cDNA: gi_14334529, supported by cDNA: gi_16323068 [Arabidopsis >gi|10178014|dbj|BAB11466.1| contains similarity to 24 kDa seed
  misc_feature (1)..(117): Homolog of NCBI NO: 15222616 NR Description: hypothetical protein; protein id: At1g64090.1, by cDNA: gi_17381217 [Arabidopsis thaliana] F22C12.15 [Arabidopsis thaliana] >gi|17381218|gb|AAL36421.1|
  misc_feature (1)..(124): Homolog of NCBI NO: 15236556 NR Description: putative protein; protein id: At4g23630.1, by cDNA: 39185., supported by cDNA: gi_15215585 [Arabidopsis
  misc_feature (1)..(124): Homolog of NCBI NO: 34904202 NR Description: P0492F05.25 [Oryza sativa (japonica
MPQLPNLEITEEFVFMVADAIRVWINTVLAVAREIYVGRNAKQLFRVSVVLWTVSFVGNFLNFLTILYLGVVLSLLIPFLYERYQDLIDEKLSLTHRVIQTQYRKIDERLLQKIIAKPTNKIKKMQ

SEQ ID NO: 70873 - DNA, 1530 bp, Arabidopsis thaliana
  misc_feature (1)..(1530): Ceres Seq. ID no. 3021259
  misc_feature: MA Experiment ID: 20000314 Result: Up-regulated in Transcription
  misc_feature: MA Experiment 20000314 PARAMETER Experiment Name: At_14day_Shoots-Roots_Sub_P Parameter: Age (day) Value: 14
  misc_feature: MA Experiment 20000314 PARAMETER Experiment Name: At_14day_Shoots-Roots_Sub_P Parameter: Organism Value: A. thaliana
  misc_feature: MA Experiment 20000314 PARAMETER Experiment Name: At_14day_Shoots-Roots_Sub_P Parameter: Plant Line Value: WS
  misc_feature: MA Experiment 20000314 PARAMETER Experiment Name: At_14day_Shoots-Roots_Sub_P Parameter: Tissue Value: Roots vs. Whole Plant
  misc_feature: MA Experiment ID: 20000315 Result: Up-regulated in Transcription
  misc_feature: MA Experiment 20000315 PARAMETER Experiment Name: At_14day_Shoots-Roots_Sub_P Parameter: Age (day) Value: 14
  misc_feature: MA Experiment 20000315 PARAMETER Experiment Name: At_14day_Shoots-Roots_Sub_P Parameter: Organism Value: A. thaliana
  misc_feature: MA Experiment 20000315 PARAMETER Experiment Name: At_14day_Shoots-Roots_Sub_P Parameter: Plant Line Value: WS
  misc_feature: MA Experiment 20000315 PARAMETER Experiment Name: At_14day_Shoots-Roots_Sub_P Parameter: Tissue Value: Shoots vs. Whole Plant
atgctgctactgaagcaaatctcaccaccgttccatctccaccaactccgccgccgtatctccaccatcatctccgccggattcactctcaacctcccaaaactcgaaccttcctccgacgccgaactaatctcccaaatgttaataacaaatcacaacccattccacttcatggaatcatctctccaactcaacggcatctccctcactcccaacctcatccaccaaaccctcctccgtctccgtcacaattccaaaattgccctctccttcttccaatatctacgctccttaccctctccttcaacaacaccaacctctttcaatctcatcatcgatatcctcggccgtgttcgtcaattcgacgtcgttagacaacttatagtcgaaatggatcaaacttctcctgagaccttcttaatcctcgttaaacggttaatcgccgccgggcttactcgacaagcggttcgtgctttcgacgatgcgccttgttttctcgagaatcgtcgtttccgtttagtcgaattcgggtttttactcgatacgctttgtaaatacggttacacgaaaatggccgttggtgtttttaatgaaaggaaggaagagtttggttctgatgagaaggtttacactattttgatcgctggttggtgtaagcttaggaggattgatatggcggagaagtttttggtagagatgattgagtctgggattgagcctaatgttgttacgtataatgtattgcttaacgggatttgtaggacggcgagtttgcatccggaagagagatttgagaggaatgtgagaaatgcagagaaggtgttcgatgaaatgcgtcagagagggattgagcccgatgttacgagtttttctatcgtgcttcatatgtatagccgagctcataaagctgagttgacgttggataagatgaaattgatgaaagcgaaagggattagcccgacgattgaaacgtatacatcggttgttaaatgtttgtgttcttgtgggaggttagaggaagcggaggagttgcttgaaacaatggtggagagcgggattagcccgtcttccgcgacgtacaattgtttttttaaagagtacaaaggaaggaaagatgctaatggagcgatgaatctgtataggaagatgaagaatggattgtgtaagccaagtacgcagacgtataatgttttgttaggtacgtttatcaatttggggaagatggagactgtgaaagagatatgggatgatcttaaagcaagtgaaacgggtccggatttggactcgtacacatcgttggttcatgggttgtgtagtaaggagaaatggaaggaggcttgtggatactttgtggagatgatagagagaggtttcttaccacaaaagctaacttttgagactttgtataaaggattaatacagtctaataagatgaggacttggaggaggttgaagaagaaactcgacgaggaatctataaccttcgggtctgagtttcagagatatccttttgagccttacaagagatga

SEQ ID NO: 70874 - protein, 509 aa, Arabidopsis thaliana
  peptide (1)..(509): Ceres Seq. ID no. 3021260
  misc_feature (25)..(473): Homolog of NCBI NO: 15222036 NR Description: hypothetical protein; protein id: At1g74900.1
  misc_feature (36)..(478): Homolog of NCBI NO: 15229604 NR Description: putative protein; protein id: At3g49730.1
  misc_feature (5)..(472): Homolog of NCBI NO: 15239018 NR Description: putative protein; protein id: At5g11310.1 thaliana] >gi|8953393|emb|CAB96666.1| putative protein
  misc_feature (37)..(492): Homolog of NCBI NO: 15219049 NR Description: hypothetical protein; protein id: At1g52640.1
  misc_feature (63)..(493): Homolog of NCBI NO: 18394846 NR Description: expressed protein; protein id: At1g20300.1, by cDNA: gi_15450346, supported by cDNA: gi_17386103 [Arabidopsis
  misc_feature (1)..(488): Homolog of NCBI NO: 15217756 NR Description: hypothetical protein; protein id: At1g02420.1
  misc_feature (1)..(488): Homolog of NCBI NO: 25511622 NR Description: T6A9.11 protein - Arabidopsis thaliana
  misc_feature (36)..(478): Homolog of NCBI NO: 15239161 NR Description: putative protein; protein id: At5g65820.1
  misc_feature (36)..(489): Homolog of NCBI NO: 15223927 NR Description: hypothetical protein; protein id: At1g71060.1
  misc_feature (72)..(487): Homolog of NCBI NO: 34895880 NR Description: P0009G03.20 [Oryza sativa (japonica
MLLLKQISPPFHLHQLRRRISTIISAGFTLNLPKLEPSSDAELISQMLITNHNPFHFMESSLQLNGISLTPNLIHQTLLRLRHNSKIALSFFQYLRSLPSPSTTPTSFNLIIDILGRVRQFDVVRQLIVEMDQTSPETFLILVKRLIAAGLTRQAVRAFDDAPCFLENRRFRLVEFGFLLDTLCKYGYTKMAVGVFNERKEEFGSDEKVYTILIAGWCKLRRIDMAEKFLVEMIESGIEPNVVTYNVLLNGICRTASLHPEERFERNVRNAEKVFDEMRQRGIEPDVTSFSIVLHMYSRAHKAELTLDKMKLMKAKGISPTIETYTSVVKCLCSCGRLEEAEELLETMVESGISPSSATYNCFFKEYKGRKDANGAMNLYRKMKNGLCKPSTQTYNVLLGTFINLGKMETVKEIWDDLKASETGPDLDSYTSLVHGLCSKEKWKEACGYFVEMIERGFLPQKLTFETLYKGLIQSNKMRTWRRLKKKLDEESITFGSEFQRYPFEPYKR

SEQ ID NO: 70875 - protein, 463 aa, Arabidopsis thaliana
  peptide (1)..(463): Ceres Seq. ID no. 3021261
  misc_feature (1)..(427): Homolog of NCBI NO: 15222036 NR Description: hypothetical protein; protein id: At1g74900.1
  misc_feature (1)..(432): Homolog of NCBI NO: 15229604 NR Description: putative protein; protein id: At3g49730.1
  misc_feature (1)..(426): Homolog of NCBI NO: 15239018 NR Description: putative protein; protein id: At5g11310.1 thaliana] >gi|8953393|emb|CAB96666.1| putative protein
  misc_feature (1)..(446): Homolog of NCBI NO: 15219049 NR Description: hypothetical protein; protein id: At1g52640.1
  misc_feature (17)..(447): Homolog of NCBI NO: 18394846 NR Description: expressed protein; protein id: At1g20300.1, by cDNA: gi_15450346, supported by cDNA: gi_17386103 [Arabidopsis
  misc_feature (1)..(442): Homolog of NCBI NO: 15217756 NR Description: hypothetical protein; protein id: At1g02420.1
  misc_feature (1)..(442): Homolog of NCBI NO: 25511622 NR Description: T6A9.11 protein - Arabidopsis thaliana
  misc_feature (1)..(432): Homolog of NCBI NO: 15239161 NR Description: putative protein; protein id: At5g65820.1
  misc_feature (1)..(443): Homolog of NCBI NO: 15223927 NR Description: hypothetical protein; protein id: At1g71060.1
  misc_feature (26)..(441): Homolog of NCBI NO: 34895880 NR Description: P0009G03.20 [Oryza sativa (japonica
MLITNHNPFHFMESSLQLNGISLTPNLIHQTLLRLRHNSKIALSFFQYLRSLPSPSTTPTSFNLIIDILGRVRQFDVVRQLIVEMDQTSPETFLILVKRLIAAGLTRQAVRAFDDAPCFLENRRFRLVEFGFLLDTLCKYGYTKMAVGVFNERKEEFGSDEKVYTILIAGWCKLRRIDMAEKFLVEMIESGIEPNVVTYNVLLNGICRTASLHPEERFERNVRNAEKVFDEMRQRGIEPDVTSFSIVLHMYSRAHKAELTLDKMKLMKAKGISPTIETYTSVVKCLCSCGRLEEAEELLETMVESGISPSSATYNCFFKEYKGRKDANGAMNLYRKMKNGLCKPSTQTYNVLLGTFINLGKMETVKEIWDDLKASETGPDLDSYTSLVHGLCSKEKWKEACGYFVEMIERGFLPQKLTFETLYKGLIQSNKMRTWRRLKKKLDEESITFGSEFQRYPFEPYKR

SEQ ID NO: 70876 - protein, 452 aa, Arabidopsis thaliana
  peptide (1)..(452): Ceres Seq. ID no. 3021262
  misc_feature (1)..(416): Homolog of NCBI NO: 15222036 NR Description: hypothetical protein; protein id: At1g74900.1
  misc_feature (1)..(421): Homolog of NCBI NO: 15229604 NR Description: putative protein; protein id: At3g49730.1
  misc_feature (1)..(415): Homolog of NCBI NO: 15239018 NR Description: putative protein; protein id: At5g11310.1 thaliana] >gi|8953393|emb|CAB96666.1| putative protein
  misc_feature (1)..(435): Homolog of NCBI NO: 15219049 NR Description: hypothetical protein; protein id: At1g52640.1
  misc_feature (6)..(436): Homolog of NCBI NO: 18394846 NR Description: expressed protein; protein id: At1g20300.1, by cDNA: gi_15450346, supported by cDNA: gi_17386103 [Arabidopsis
  misc_feature (1)..(431): Homolog of NCBI NO: 15217756 NR Description: hypothetical protein; protein id: At1g02420.1
  misc_feature (1)..(431): Homolog of NCBI NO: 25511622 NR Description: T6A9.11 protein - Arabidopsis thaliana
  misc_feature (1)..(421): Homolog of NCBI NO: 15239161 NR Description: putative protein; protein id: At5g65820.1
  misc_feature (1)..(432): Homolog of NCBI NO: 15223927 NR Description: hypothetical protein; protein id: At1g71060.1
  misc_feature (15)..(430): Homolog of NCBI NO: 34895880 NR Description: P0009G03.20 [Oryza sativa (japonica
MESSLQLNGISLTPNLIHQTLLRLRHNSKIALSFFQYLRSLPSPSTTPTSFNLIIDILGRVRQFDVVRQLIVEMDQTSPETFLILVKRLIAAGLTRQAVRAFDDAPCFLENRRFRLVEFGFLLDTLCKYGYTKMAVGVFNERKEEFGSDEKVYTILIAGWCKLRRIDMAEKFLVEMIESGIEPNVVTYNVLLNGICRTASLHPEERFERNVRNAEKVFDEMRQRGIEPDVTSFSIVLHMYSRAHKAELTLDKMKLMKAKGISPTIETYTSVVKCLCSCGRLEEAEELLETMVESGISPSSATYNCFFKEYKGRKDANGAMNLYRKMKNGLCKPSTQTYNVLLGTFINLGKMETVKEIWDDLKASETGPDLDSYTSLVHGLCSKEKWKEACGYFVEMIERGFLPQKLTFETLYKGLIQSNKMRTWRRLKKKLDEESITFGSEFQRYPFEPYKR

SEQ ID NO: 70877 - DNA, 771 bp, Arabidopsis thaliana
  misc_feature (1)..(771): Ceres Seq. ID no. 3021265
  misc_feature: MA Experiment ID: 20000180 Result: Up-regulated in Transcription
  misc_feature: MA Experiment 20000180 PARAMETER Experiment Name: At_Germinating_Seeds_P Parameter: Age (hr) Value: 24 vs. 0
  misc_feature: MA Experiment 20000180 PARAMETER Experiment Name: At_Germinating_Seeds_P Parameter: Tissue Value: Germinating Seeds
  misc_feature: MA Experiment ID: 20000185 Result: Up-regulated in Transcription
  misc_feature: MA Experiment 20000185 PARAMETER Experiment Name: At_Roots__P Parameter: Age (day) Value: 7 vs. 21
  misc_feature: MA Experiment 20000185 PARAMETER Experiment Name: At_Roots__P Parameter: Organism Value: A. thaliana
  misc_feature: MA Experiment 20000185 PARAMETER Experiment Name: At_Roots__P Parameter: Tissue Value: Roots vs. Whole Plant
  misc_feature: MA Experiment ID: 20000227 Result: Up-regulated in Transcription
  misc_feature: MA Experiment 20000227 PARAMETER Experiment Name: At_Root-Tips-vs-Tops_P Parameter: Tissue Value: Root Tips vs. Root Tops
  misc_feature: MA Experiment ID: 20000439 Result: Up-regulated in Transcription
  misc_feature: MA Experiment 20000439 PARAMETER Experiment Name: At_Roots__P Parameter: Age (day) Value: 14 vs. 21
  misc_feature: MA Experiment 20000439 PARAMETER Experiment Name: At_Roots__P Parameter: Organism Value: A. thaliana
  misc_feature: MA Experiment 20000439 PARAMETER Experiment Name: At_Roots__P Parameter: Tissue Value: Roots vs. Whole Plant
atgggaattcagaaaccggcatggttggatgcgctatacgcagagaagttcttcgtgggatgtccataccatgagacggcgaagaagaacgagaggaacgtgtgttgtcttgattgttgcaccagtctctgccctcactgtgtaccctctcatagattccatagactccttcaagttcgccgttatgtgtatcacgacgttgttcggcttgaagatcttcagaaactcatcgactgctctaacgttcaagcttatacaataaatagtgcaaaagtggtgttcatcaagaagagaccacaaaatagacaattcaaaggagctggcaactattgcacttcttgtgaccgaagtcttcaagaaccttatatccattgctccttgggttgtaaggtggactttgtgatgaaacgttacagggacataaccccattcctcaagccatgccacactctaaccctaggtcctgactacatcatcccacaagacttactgacagatgatgaagtggcggcctacgagactcctcgatcaactgtggtagacggcgatgagtccatgagctggtcctcagcttcctcggataacaacaatgcgggtgcggcggctgcttatgccgcaaccaccacccatgtcgtgaggaaaaaaaggactggtttttgcctttgcgctaaatcggctaatagttataaagaagtttcggaggatcctgacgatatttctgcttgcatcaatcggcgaaaaggcgttcctcaacgatctcctctctgttaa

SEQ ID NO: 70878 - protein, 256 aa, Arabidopsis thaliana
  peptide (1)..(256): Ceres Seq. ID no. 3021266
  misc_feature (6)..(247): Pfam Name: Protein of unknown function, DUF597 Pfam Description: Protein of unknown function, DUF597
  misc_feature (6)..(255): Homolog of NCBI NO: 15232396 NR Description: putative protein; protein id: At3g60670.1
  misc_feature (5)..(198): Homolog of NCBI NO: 9755373 NR Description: F17F8.4 [Arabidopsis thaliana]
  misc_feature (5)..(145): Homolog of NCBI NO: 16117799 NR Description: zinc-binding protein [Pisum sativum]
  misc_feature (6)..(139): Homolog of NCBI NO: 6714272 NR Description: F6N18.8 [Arabidopsis thaliana]
  misc_feature (6)..(139): Homolog of NCBI NO: 18398555 NR Description: expressed protein; protein id: At1g32700.1,
  misc_feature (6)..(139): Homolog of NCBI NO: 38346725 NR Description: OSJNBa0086O06.23 [Oryza sativa (japonica
  misc_feature (3)..(149): Homolog of NCBI NO: 21536890 NR Description: unknown [Arabidopsis thaliana]
  misc_feature (3)..(149): Homolog of NCBI NO: 18411153 NR Description: expressed protein; protein id: At1g76590.1,
  misc_feature (3)..(149): Homolog of NCBI NO: 25337904 NR Description: unknown protein F14G6.19 [imported] - Arabidopsis
  misc_feature (6)..(139): Homolog of NCBI NO: 21554139 NR Description: unknown [Arabidopsis thaliana]
MGIQKPAWLDALYAEKFFVGCPYHETAKKNERNVCCLDCCTSLCPHCVPSHRFHRLLQVRRYVYHDVVRLEDLQKLIDCSNVQAYTINSAKVVFIKKRPQNRQFKGAGNYCTSCDRSLQEPYIHCSLGCKVDFVMKRYRDITPFLKPCHTLTLGPDYIIPQDLLTDDEVAAYETPRSTVVDGDESMSWSSASSDNNNAGAAAAYAATTTHVVRKKRTGFCLCAKSANSYKEVSEDPDDISACINRRKGVPQRSPLC

SEQ ID NO: 70879 - DNA, 663 bp, Arabidopsis thaliana
  misc_feature (1)..(663): Ceres Seq. ID no. 3021484
  misc_feature: MA Experiment ID: 20000307 Result: Up-regulated in Transcription
  misc_feature: MA Experiment 20000307 PARAMETER Experiment Name: At_Germinating_Seeds_Sub_P Parameter: Age (hr) Value: 24 vs. 0
  misc_feature: MA Experiment 20000307 PARAMETER Experiment Name: At_Germinating_Seeds_Sub_P Parameter: Organism Value: A. thaliana
  misc_feature: MA Experiment 20000307 PARAMETER Experiment Name: At_Germinating_Seeds_Sub_P Parameter: Plant Line Value: WS
  misc_feature: MA Experiment 20000307 PARAMETER Experiment Name: At_Germinating_Seeds_Sub_P Parameter: Tissue Value: Germinating Seeds
  misc_feature: MA Experiment ID: 20000327 Result: Down-regulated in Transcription
  misc_feature: MA Experiment 20000327 PARAMETER Experiment Name: At_42deg_Heat_Sub_P Parameter: Age (day) Value: 14
  misc_feature: MA Experiment 20000327 PARAMETER Experiment Name: At_42deg_Heat_Sub_P Parameter: Organism Value: A. thaliana
  misc_feature: MA Experiment 20000327 PARAMETER Experiment Name: At_42deg_Heat_Sub_P Parameter: Plant Line Value: WS
  misc_feature: MA Experiment 20000327 PARAMETER Experiment Name: At_42deg_Heat_Sub_P Parameter: Temperature (deg C) Value: 42 vs. 22
  misc_feature: MA Experiment 20000327 PARAMETER Experiment Name: At_42deg_Heat_Sub_P Parameter: Timepoint (hr) Value: 1
  misc_feature: MA Experiment 20000327 PARAMETER Experiment Name: At_42deg_Heat_Sub_P Parameter: Tissue Value: Aerial
atggttctcttaggggtgagtaaggtaatatggagaagggctgtctatgatgcagagaagaagaagatgaacagtgtagacagtgcgcgaaagggtaaaaggagaagcaggagatggttagtgcaaccacagttacatgggtttaggatctttactggcgacaagggaccttttgatccaggaggagctgattgtgtgtatgagctggttagagtatggaggctatttgagaagcctcatggaacttggccaaggggttgtagttcgaaagagaagataaagaacctctacttaggattcataaccatcttaggaatcgccactgtgcttgtttctctcctcccggagtttcgggtggtgggggcgtctctgttctttggaatgggattctctggcttagctccgattcttcacaagctgataatcttttgggaccaacctgaagcccttcacacgacatgttatgagattttgatgggtttgctttatgggttaggagctctggtttatgcaactaggatcccagagagatggatgccgggtaaattcgatatagcaggacatagccatcagttgtttcatgttctggtagttgctggtgcgttcacgcactatagagctgggctagtgtatcttaagtggagagatattgaaggatgttga

SEQ ID NO: 70880 - protein, 220 aa, Arabidopsis thaliana
  peptide (1)..(220): Ceres Seq. ID no. 3021485
  misc_feature (95)..(209): Pfam Name: Uncharacterised protein family (Hly-III / UPF0073) Pfam Description: Uncharacterised protein family (Hly-III /
  misc_feature (95)..(220): Homolog of NCBI NO: 15235657 NR Description: expressed protein; protein id: At4g37680.1, by cDNA: 262351., supported by cDNA: gi_13430521, supported by
  misc_feature (95)..(209): Homolog of NCBI NO: 15233813 NR Description: putative protein; protein id: At4g38320.1
  misc_feature (128)..(220): Homolog of NCBI NO: 15226736 NR Description: unknown protein; protein id: At2g40710.1
  misc_feature (148)..(220): Homolog of NCBI NO: 15233780 NR Description: putative protein; protein id: At4g38290.1
  misc_feature (96)..(220): Homolog of NCBI NO: 15241302 NR Description: putative protein; protein id: At5g20270.1, by cDNA: 24749., supported by cDNA: gi_15982833 [Arabidopsis >gi|15982834|gb|AAL09764.1| AT5g20270/F5O24_160 [Arabidopsis
  misc_feature (97)..(215): Homolog of NCBI NO: 18377749 NR Description: unknown protein [Arabidopsis thaliana]
  misc_feature (97)..(215): Homolog of NCBI NO: 25407688 NR Description: hypothetical protein AT4g30850 [imported] - thaliana >gi|2980781|emb|CAA18208.1| putative protein thaliana] >gi|7269986|emb|CAB79803.1| putative protein
  misc_feature (97)..(215): Homolog of NCBI NO: 30688829 NR Description: expressed protein [Arabidopsis thaliana]
  misc_feature (87)..(205): Homolog of NCBI NO: 24649051 NR Description: CG5315-PB [Drosophila melanogaster]
  misc_feature (87)..(205): Homolog of NCBI NO: 24649047 NR Description: CG5315-PA [Drosophila melanogaster]
MVLLGVSKVIWRRAVYDAEKKKMNSVDSARKGKRRSRRWLVQPQLHGFRIFTGDKGPFDPGGADCVYELVRVWRLFEKPHGTWPRGCSSKEKIKNLYLGFITILGIATVLVSLLPEFRVVGASLFFGMGFSGLAPILHKLIIFWDQPEALHTTCYEILMGLLYGLGALVYATRIPERWMPGKFDIAGHSHQLFHVLVVAGAFTHYRAGLVYLKWRDIEGC

SEQ ID NO: 70881 - protein, 198 aa, Arabidopsis thaliana
  peptide (1)..(198): Ceres Seq. ID no. 3021486
  misc_feature (73)..(187): Pfam Name: Uncharacterised protein family (Hly-III / UPF0073) Pfam Description: Uncharacterised protein family (Hly-III /
  misc_feature (73)..(198): Homolog of NCBI NO: 15235657 NR Description: expressed protein; protein id: At4g37680.1, by cDNA: 262351., supported by cDNA: gi_13430521, supported by
  misc_feature (73)..(187): Homolog of NCBI NO: 15233813 NR Description: putative protein; protein id: At4g38320.1
  misc_feature (106)..(198): Homolog of NCBI NO: 15226736 NR Description: unknown protein; protein id: At2g40710.1
  misc_feature (126)..(198): Homolog of NCBI NO: 15233780 NR Description: putative protein; protein id: At4g38290.1
  misc_feature (74)..(198): Homolog of NCBI NO: 15241302 NR Description: putative protein; protein id: At5g20270.1, by cDNA: 24749., supported by cDNA: gi_15982833 [Arabidopsis >gi|15982834|gb|AAL09764.1| AT5g20270/F5O24_160 [Arabidopsis
  misc_feature (75)..(193): Homolog of NCBI NO: 18377749 NR Description: unknown protein [Arabidopsis thaliana]
  misc_feature (75)..(193): Homolog of NCBI NO: 25407688 NR Description: hypothetical protein AT4g30850 [imported] - thaliana >gi|2980781|emb|CAA18208.1| putative protein thaliana] >gi|7269986|emb|CAB79803.1| putative protein
  misc_feature (75)..(193): Homolog of NCBI NO: 30688829 NR Description: expressed protein [Arabidopsis thaliana]
  misc_feature (65)..(183): Homolog of NCBI NO: 24649051 NR Description: CG5315-PB [Drosophila melanogaster]
  misc_feature (65)..(183): Homolog of NCBI NO: 24649047 NR Description: CG5315-PA [Drosophila melanogaster]
MNSVDSARKGKRRSRRWLVQPQLHGFRIFTGDKGPFDPGGADCVYELVRVWRLFEKPHGTWPRGCSSKEKIKNLYLGFITILGIATVLVSLLPEFRVVGASLFFGMGFSGLAPILHKLIIFWDQPEALHTTCYEILMGLLYGLGALVYATRIPERWMPGKFDIAGHSHQLFHVLVVAGAFTHYRAGLVYLKWRDIEGC

SEQ ID NO: 70882 - DNA, 1161 bp, Arabidopsis thaliana
  misc_feature (1)..(1161): Ceres Seq. ID no. 3022721
  misc_feature: MA Experiment ID: 20000179 Result: Up-regulated in Transcription
  misc_feature: MA Experiment 20000179 PARAMETER Experiment Name: At_Germinating_Seeds_P Parameter: Age (hr) Value: 6 vs. 0
  misc_feature: MA Experiment 20000179 PARAMETER Experiment Name: At_Germinating_Seeds_P Parameter: Tissue Value: Germinating Seeds
  misc_feature: MA Experiment ID: 20000180 Result: Up-regulated in Transcription
  misc_feature: MA Experiment 20000180 PARAMETER Experiment Name: At_Germinating_Seeds_P Parameter: Age (hr) Value: 24 vs. 0
  misc_feature: MA Experiment 20000180 PARAMETER Experiment Name: At_Germinating_Seeds_P Parameter: Tissue Value: Germinating Seeds
  misc_feature: MA Experiment ID: 20000437 Result: Down-regulated in Transcription
  misc_feature: MA Experiment 20000437 PARAMETER Experiment Name: At_Drought_P Parameter: Age (day) Value: 8
  misc_feature: MA Experiment 20000437 PARAMETER Experiment Name: At_Drought_P Parameter: Organism Value: A. thaliana
  misc_feature: MA Experiment 20000437 PARAMETER Experiment Name: At_Drought_P Parameter: Plant Line Value: WS
  misc_feature: MA Experiment 20000437 PARAMETER Experiment Name: At_Drought_P Parameter: Timepoint (hr) Value: 24
  misc_feature: MA Experiment 20000437 PARAMETER Experiment Name: At_Drought_P Parameter: Tissue Value: Whole Plant
  misc_feature: MA Experiment 20000437 PARAMETER Experiment Name: At_Drought_P Parameter: Treatment Value: Drought vs. No Drought
  misc_feature: MA Experiment ID: 20001555 Result: Down-regulated in Transcription
  misc_feature: MA Experiment 20001555 PARAMETER Experiment Name: At_Drought_Soil_Dry_P Parameter: Age (day) Value: 24
  misc_feature: MA Experiment 20001555 PARAMETER Experiment Name: At_Drought_Soil_Dry_P Parameter: Organism Value: A. thaliana
  misc_feature: MA Experiment 20001555 PARAMETER Experiment Name: At_Drought_Soil_Dry_P Parameter: Plant Line Value: WS
  misc_feature: MA Experiment 20001555 PARAMETER Experiment Name: At_Drought_Soil_Dry_P Parameter: Post Timepoint (hr) Value: None
  misc_feature: MA Experiment 20001555 PARAMETER Experiment Name: At_Drought_Soil_Dry_P Parameter: Post-Treatment Value: None
  misc_feature: MA Experiment 20001555 PARAMETER Experiment Name: At_Drought_Soil_Dry_P Parameter: Timepoint (day) Value: 10
  misc_feature: MA Experiment 20001555 PARAMETER Experiment Name: At_Drought_Soil_Dry_P Parameter: Treatment Value: Drought vs. No Drought
  misc_feature: MA Experiment ID: 20001560 Result: Up-regulated in Transcription
  misc_feature: MA Experiment 20001560 PARAMETER Experiment Name: At_Drought_Soil_Dry_P Parameter: Age (day) Value: 28
  misc_feature: MA Experiment 20001560 PARAMETER Experiment Name: At_Drought_Soil_Dry_P Parameter: Organism Value: A. thaliana
  misc_feature: MA Experiment 20001560 PARAMETER Experiment Name: At_Drought_Soil_Dry_P Parameter: Plant Line Value: WS
  misc_feature: MA Experiment 20001560 PARAMETER Experiment Name: At_Drought_Soil_Dry_P Parameter: Post Timepoint (hr) Value: None
  misc_feature: MA Experiment 20001560 PARAMETER Experiment Name: At_Drought_Soil_Dry_P Parameter: Post-Treatment Value: None
  misc_feature: MA Experiment 20001560 PARAMETER Experiment Name: At_Drought_Soil_Dry_P Parameter: Timepoint (day) Value: 14
  misc_feature: MA Experiment 20001560 PARAMETER Experiment Name: At_Drought_Soil_Dry_P Parameter: Treatment Value: Drought vs. No Drought
  misc_feature: MA Experiment ID: 20001911 Result: Down-regulated in Transcription
  misc_feature: MA Experiment 20001911 PARAMETER Experiment Name: At_Drought_Reproduction_P Parameter: Age (day) Value: 40
  misc_feature: MA Experiment 20001911 PARAMETER Experiment Name: At_Drought_Reproduction_P Parameter: Organism Value: A. thaliana
  misc_feature: MA Experiment 20001911 PARAMETER Experiment Name: At_Drought_Reproduction_P Parameter: Plant Line Value: WS
  misc_feature: MA Experiment 20001911 PARAMETER Experiment Name: At_Drought_Reproduction_P Parameter: Timepoint (day) Value: 10
  misc_feature: MA Experiment 20001911 PARAMETER Experiment Name: At_Drought_Reproduction_P Parameter: Tissue Value: Flowers
  misc_feature: MA Experiment 20001911 PARAMETER Experiment Name: At_Drought_Reproduction_P Parameter: Treatment Value: Drought vs. No Drought
atggaagaaattggaggagctgaagcagtgataaatctcaaatctggatattcgctaccaatttcttatcacccatgttttgggcctcacgaggatctacttcttcttgaagctgatgacaaactcgtctctgatatctttcatcaaagggtaacattgagaggacttcctgatgaagatgctgttctttgcaccaagtctaagacttatgctatcaaatttgttggtaattctaattccatgttccttattcctccttcaatttttcctggagatgcacaagtttctgataccaacaacaatgtatcggttctcaaaatcgctcctggtaatatggaacttgttgaggcttctcctaggcttgataaacttaagcagattctcttggcaaatccttttggtgctggtgaagttgaagctatgatggatgttgataatgatgacttagaccatagtgggaagaaagatctagcgttgtacacttggagcgatttggttaacacggttcaagcgagtgatgaggagttacgcaatggcttgcagagtctttctgctattgagattgatggtttctggagggttatagatgagaattacctagacgtgattctgagaatgcttcttcataactgtgtattgaaagattggtcatttgatgatcttgatgaagatgaagttgtgaatgctttggtagctgatgagtttcctagtcaactagcgagtcactgcttgcgtgtgtttggctctaaagttaatgaaactgataagtggaagttggaaccgaggcttgtgtgtttgcactttgctagacagatactgagagaagaaaagatgagactagagagtttcatggaagagtggaagaagaagataccagatgggatggaagaaagattcgagatgcttgaaggagaggttttaacagagaaaatcgggatcgagacacgggtctatacgtttagtgtgcgctctctgccttcaactccagaagaaaggttttcagtactctttaaacatagatcaaaatgggaatggaaagacttagagccttacctaagggatcttcatgttcctagactatctatggaagggttacttctgaaatacacacgcagagcacaacctaaagctgatgcaccacctgtctttagtgcaagataa

SEQ ID NO: 70883 - protein, 386 aa, Arabidopsis thaliana
  peptide (1)..(386): Ceres Seq. ID no. 3022722
  misc_feature (1)..(353): Homolog of NCBI NO: 15224911 NR Description: putative RING zinc finger protein; protein id: [Arabidopsis thaliana] >gi|7485548|pir||T01585 probable RING zinc
  misc_feature (2)..(371): Homolog of NCBI NO: 13129096 NR Description: hypothetical protein MGC5528 [Homo sapiens]
  misc_feature (2)..(371): Homolog of NCBI NO: 34866494 NR Description: similar to hypothetical protein MGC5528 [Rattus
  misc_feature (2)..(370): Homolog of NCBI NO: 16306709 NR Description: hypothetical protein MGC5528 [Homo sapiens]
  misc_feature (32)..(371): Homolog of NCBI NO: 31204943 NR Description: ENSANGP00000000566 [Anopheles gambiae]
  misc_feature (224)..(353): Homolog of NCBI NO: 8099129 NR Description: similar to a putative RING zinc finger protein of
  misc_feature (180)..(371): Homolog of NCBI NO: 34147053 NR Description: RIKEN cDNA 2600005O03 [Mus musculus]
  misc_feature (28)..(352): Homolog of NCBI NO: 24656130 NR Description: CG11788-PA [Drosophila melanogaster]
  misc_feature (21)..(363): Homolog of NCBI NO: 31746522 NR Description: Hypothetical protein K09H9.2 [Caenorhabditis
  misc_feature (29)..(363): Homolog of NCBI NO: 39595511 NR Description: Hypothetical protein CBG04176 [Caenorhabditis
MEEIGGAEAVINLKSGYSLPISYHPCFGPHEDLLLLEADDKLVSDIFHQRVTLRGLPDEDAVLCTKSKTYAIKFVGNSNSMFLIPPSIFPGDAQVSDTNNNVSVLKIAPGNMELVEASPRLDKLKQILLANPFGAGEVEAMMDVDNDDLDHSGKKDLALYTWSDLVNTVQASDEELRNGLQSLSAIEIDGFWRVIDENYLDVILRMLLHNCVLKDWSFDDLDEDEVVNALVADEFPSQLASHCLRVFGSKVNETDKWKLEPRLVCLHFARQILREEKMRLESFMEEWKKKIPDGMEERFEMLEGEVLTEKIGIETRVYTFSVRSLPSTPEERFSVLFKHRSKWEWKDLEPYLRDLHVPRLSMEGLLLKYTRRAQPKADAPPVFSAR

SEQ ID NO: 70884 - protein, 306 aa, Arabidopsis thaliana
  peptide (1)..(306): Ceres Seq. ID no. 3022723
  misc_feature (1)..(273): Homolog of NCBI NO: 15224911 NR Description: putative RING zinc finger protein; protein id: [Arabidopsis thaliana] >gi|7485548|pir||T01585 probable RING zinc
  misc_feature (1)..(291): Homolog of NCBI NO: 13129096 NR Description: hypothetical protein MGC5528 [Homo sapiens]
  misc_feature (1)..(291): Homolog of NCBI NO: 34866494 NR Description: similar to hypothetical protein MGC5528 [Rattus
  misc_feature (1)..(290): Homolog of NCBI NO: 16306709 NR Description: hypothetical protein MGC5528 [Homo sapiens]
  misc_feature (1)..(291): Homolog of NCBI NO: 31204943 NR Description: ENSANGP00000000566 [Anopheles gambiae]
  misc_feature (144)..(273): Homolog of NCBI NO: 8099129 NR Description: similar to a putative RING zinc finger protein of
  misc_feature (100)..(291): Homolog of NCBI NO: 34147053 NR Description: RIKEN cDNA 2600005O03 [Mus musculus]
  misc_feature (1)..(272): Homolog of NCBI NO: 24656130 NR Description: CG11788-PA [Drosophila melanogaster]
  misc_feature (1)..(283): Homolog of NCBI NO: 31746522 NR Description: Hypothetical protein K09H9.2 [Caenorhabditis
  misc_feature (1)..(283): Homolog of NCBI NO: 39595511 NR Description: Hypothetical protein CBG04176 [Caenorhabditis
MFLIPPSIFPGDAQVSDTNNNVSVLKIAPGNMELVEASPRLDKLKQILLANPFGAGEVEAMMDVDNDDLDHSGKKDLALYTWSDLVNTVQASDEELRNGLQSLSAIEIDGFWRVIDENYLDVILRMLLHNCVLKDWSFDDLDEDEVVNALVADEFPSQLASHCLRVFGSKVNETDKWKLEPRLVCLHFARQILREEKMRLESFMEEWKKKIPDGMEERFEMLEGEVLTEKIGIETRVYTFSVRSLPSTPEERFSVLFKHRSKWEWKDLEPYLRDLHVPRLSMEGLLLKYTRRAQPKADAPPVFSAR

SEQ ID NO: 70885 - protein, 275 aa, Arabidopsis thaliana
  peptide (1)..(275): Ceres Seq. ID no. 3022724
  misc_feature (1)..(242): Homolog of NCBI NO: 15224911 NR Description: putative RING zinc finger protein; protein id: [Arabidopsis thaliana] >gi|7485548|pir||T01585 probable RING zinc
  misc_feature (1)..(260): Homolog of NCBI NO: 13129096 NR Description: hypothetical protein MGC5528 [Homo sapiens]
  misc_feature (1)..(260): Homolog of NCBI NO: 34866494 NR Description: similar to hypothetical protein MGC5528 [Rattus
  misc_feature (1)..(259): Homolog of NCBI NO: 16306709 NR Description: hypothetical protein MGC5528 [Homo sapiens]
  misc_feature (1)..(260): Homolog of NCBI NO: 31204943 NR Description: ENSANGP00000000566 [Anopheles gambiae]
  misc_feature (113)..(242): Homolog of NCBI NO: 8099129 NR Description: similar to a putative RING zinc finger protein of
  misc_feature (69)..(260): Homolog of NCBI NO: 34147053 NR Description: RIKEN cDNA 2600005O03 [Mus musculus]
  misc_feature (1)..(241): Homolog of NCBI NO: 24656130 NR Description: CG11788-PA [Drosophila melanogaster]
  misc_feature (1)..(252): Homolog of NCBI NO: 31746522 NR Description: Hypothetical protein K09H9.2 [Caenorhabditis
  misc_feature (1)..(252): Homolog of NCBI NO: 39595511 NR Description: Hypothetical protein CBG04176 [Caenorhabditis
MELVEASPRLDKLKQILLANPFGAGEVEAMMDVDNDDLDHSGKKDLALYTWSDLVNTVQASDEELRNGLQSLSAIEIDGFWRVIDENYLDVILRMLLHNCVLKDWSFDDLDEDEVVNALVADEFPSQLASHCLRVFGSKVNETDKWKLEPRLVCLHFARQILREEKMRLESFMEEWKKKIPDGMEERFEMLEGEVLTEKIGIETRVYTFSVRSLPSTPEERFSVLFKHRSKWEWKDLEPYLRDLHVPRLSMEGLLLKYTRRAQPKADAPPVFSAR

SEQ ID NO: 70886 - DNA, 759 bp, Arabidopsis thaliana
  misc_feature (1)..(759): Ceres Seq. ID no. 3023316
  misc_feature: MA Experiment ID: 20000315 Result: Down-regulated in Transcription
  misc_feature: MA Experiment 20000315 PARAMETER Experiment Name: At_14day_Shoots-Roots_Sub_P Parameter: Age (day) Value: 14
  misc_feature: MA Experiment 20000315 PARAMETER Experiment Name: At_14day_Shoots-Roots_Sub_P Parameter: Organism Value: A. thaliana
  misc_feature: MA Experiment 20000315 PARAMETER Experiment Name: At_14day_Shoots-Roots_Sub_P Parameter: Plant Line Value: WS
  misc_feature: MA Experiment 20000315 PARAMETER Experiment Name: At_14day_Shoots-Roots_Sub_P Parameter: Tissue Value: Shoots vs. Whole Plant
  misc_feature: MA Experiment ID: 20000347 Result: Up-regulated in Transcription
  misc_feature: MA Experiment 20000347 PARAMETER Experiment Name: At_2mM_SA_Sub_P Parameter: Age (day) Value: 14
  misc_feature: MA Experiment 20000347 PARAMETER Experiment Name: At_2mM_SA_Sub_P Parameter: Organism Value: A. thaliana
  misc_feature: MA Experiment 20000347 PARAMETER Experiment Name: At_2mM_SA_Sub_P Parameter: Plant Line Value: WS
  misc_feature: MA Experiment 20000347 PARAMETER Experiment Name: At_2mM_SA_Sub_P Parameter: Timepoint (hr) Value: 6
  misc_feature: MA Experiment 20000347 PARAMETER Experiment Name: At_2mM_SA_Sub_P Parameter: Tissue Value: Aerial
  misc_feature: MA Experiment 20000347 PARAMETER Experiment Name: At_2mM_SA_Sub_P Parameter: Treatment Value: 2mM SA vs. No Treatment
  misc_feature: MA Experiment ID: 20000348 Result: Up-regulated in Transcription
  misc_feature: MA Experiment 20000348 PARAMETER Experiment Name: At_100uM_ABA_Sub_P Parameter: Age (day) Value: 14
  misc_feature: MA Experiment 20000348 PARAMETER Experiment Name: At_100uM_ABA_Sub_P Parameter: Organism Value: A. thaliana
  misc_feature: MA Experiment 20000348 PARAMETER Experiment Name: At_100uM_ABA_Sub_P Parameter: Plant Line Value: WS
  misc_feature: MA Experiment 20000348 PARAMETER Experiment Name: At_100uM_ABA_Sub_P Parameter: Timepoint (hr) Value: 1
  misc_feature: MA Experiment 20000348 PARAMETER Experiment Name: At_100uM_ABA_Sub_P Parameter: Tissue Value: Aerial
  misc_feature: MA Experiment 20000348 PARAMETER Experiment Name: At_100uM_ABA_Sub_P Parameter: Treatment Value: 100uM ABA vs. No Treatment
  misc_feature: MA Experiment ID: 20000355 Result: Down-regulated in Transcription
  misc_feature: MA Experiment 20000355 PARAMETER Experiment Name: At_Siliques_Sub_P Parameter: Age (day) Value: 21
  misc_feature: MA Experiment 20000355 PARAMETER Experiment Name: At_Siliques_Sub_P Parameter: Organism Value: A. thaliana
  misc_feature: MA Experiment 20000355 PARAMETER Experiment Name: At_Siliques_Sub_P Parameter: Plant Line Value: WS
  misc_feature: MA Experiment 20000355 PARAMETER Experiment Name: At_Siliques_Sub_P Parameter: Tissue Value: Less Than 5mm Siliques vs. Whole Plant
  misc_feature: MA Experiment ID: 20000440 Result: Down-regulated in Transcription
  misc_feature: MA Experiment 20000440 PARAMETER Experiment Name: At_Closed-Flower__Sub_P Parameter: Tissue Value: Closed Flower vs. Whole Plant
atggggtctgaagagagaatgatgataagttcttcttcagttctagacgaagagtatgaatatacagatgatgggtttcattacgagacaaggcaaaacagtttgtctagattatctatctgcacaaactccttccacgaagacgacgaagatcatccttcagaattgggtaatttcttctctacgttgtcgttagagagcttcaacgacgacgtcggagccgaagctgacgtagaaatctccgatgacggtggcgaatcggattccgacaaagactcttccggattttactctctaccgacgatcacatctcgccggagaagaaaactcacagtttccggcggtttagaaacgagcaaagagagtgagacgaaagtcgatgggagtaagtgtaatatagttagtcaacggagggtattaagggaaaagagtaaaagagggaatcagtacggtcactggtttaacggcgtggagagagacagtgacggcggaggagagttgacggtgttaacgaaggtgaggggagggaagaagaagtcaatgaagatggggtttgaagaagtcaaagcttgtagagatctcggcttcgaactggatgttccgggtcgggtttcagggtcaaaccgtgaaactagtagtggcggcaactctcccattgccaactggcgtatctcaagtcctggggatgatccgaaagaggttaaggcgagattaaagatgtgggcacaagcagtagctttagcttctgcgtcacgttaa

SEQ ID NO: 70887 - protein, 252 aa, Arabidopsis thaliana
  peptide (1)..(252): Ceres Seq. ID no. 3023317
  misc_feature (29)..(251): Homolog of NCBI NO: 30678941 NR Description: expressed protein [Arabidopsis thaliana]
  misc_feature (29)..(228): Homolog of NCBI NO: 25334719 NR Description: hypothetical protein AT4g01670 [imported] - thaliana >gi|7268210|emb|CAB77737.1| hypothetical protein
  misc_feature (163)..(252): Homolog of NCBI NO: 34902536 NR Description: P0581F09.27 [Oryza sativa (japonica >gi|13486734|dbj|BAB39969.1| hypothetical protein [Oryza sativa
  misc_feature (217)..(246): Homolog of NCBI NO: 26451183 NR Description: unknown protein [Arabidopsis thaliana]
  misc_feature (217)..(247): Homolog of NCBI NO: 15221309 NR Description: unknown protein; protein id: At1g05870.1
  misc_feature (1)..(229): Homolog of NCBI NO: 15226471 NR Description: unknown protein; protein id: At2g46940.1
  misc_feature (33)..(252): Homolog of NCBI NO: 15228678 NR Description: putative protein; protein id: At3g62070.1
MGSEERMMISSSSVLDEEYEYTDDGFHYETRQNSLSRLSICTNSFHEDDEDHPSELGNFFSTLSLESFNDDVGAEADVEISDDGGESDSDKDSSGFYSLPTITSRRRRKLTVSGGLETSKESETKVDGSKCNIVSQRRVLREKSKRGNQYGHWFNGVERDSDGGGELTVLTKVRGGKKKSMKMGFEEVKACRDLGFELDVPGRVSGSNRETSSGGNSPIANWRISSPGDDPKEVKARLKMWAQAVALASASR

SEQ ID NO: 70888 - protein, 246 aa, Arabidopsis thaliana
  peptide (1)..(246): Ceres Seq. ID no. 3023318
  misc_feature (1)..(223): Homolog of NCBI NO: 15226471 NR Description: unknown protein; protein id: At2g46940.1
  misc_feature (27)..(246): Homolog of NCBI NO: 15228678 NR Description: putative protein; protein id: At3g62070.1
  misc_feature (23)..(245): Homolog of NCBI NO: 30678941 NR Description: expressed protein [Arabidopsis thaliana]
  misc_feature (23)..(222): Homolog of NCBI NO: 25334719 NR Description: hypothetical protein AT4g01670 [imported] - thaliana >gi|7268210|emb|CAB77737.1| hypothetical protein
  misc_feature (157)..(246): Homolog of NCBI NO: 34902536 NR Description: P0581F09.27 [Oryza sativa (japonica >gi|13486734|dbj|BAB39969.1| hypothetical protein [Oryza sativa
  misc_feature (211)..(240): Homolog of NCBI NO: 26451183 NR Description: unknown protein [Arabidopsis thaliana]
  misc_feature (211)..(241): Homolog of NCBI NO: 15221309 NR Description: unknown protein; protein id: At1g05870.1
MMISSSSVLDEEYEYTDDGFHYETRQNSLSRLSICTNSFHEDDEDHPSELGNFFSTLSLESFNDDVGAEADVEISDDGGESDSDKDSSGFYSLPTITSRRRRKLTVSGGLETSKESETKVDGSKCNIVSQRRVLREKSKRGNQYGHWFNGVERDSDGGGELTVLTKVRGGKKKSMKMGFEEVKACRDLGFELDVPGRVSGSNRETSSGGNSPIANWRISSPGDDPKEVKARLKMWAQAVALASASR

SEQ ID NO: 70889 - protein, 245 aa, Arabidopsis thaliana
  peptide (1)..(245): Ceres Seq. ID no. 3023319
  misc_feature (1)..(222): Homolog of NCBI NO: 15226471 NR Description: unknown protein; protein id: At2g46940.1
  misc_feature (26)..(245): Homolog of NCBI NO: 15228678 NR Description: putative protein; protein id: At3g62070.1
  misc_feature (22)..(244): Homolog of NCBI NO: 30678941 NR Description: expressed protein [Arabidopsis thaliana]
  misc_feature (22)..(221): Homolog of NCBI NO: 25334719 NR Description: hypothetical protein AT4g01670 [imported] - thaliana >gi|7268210|emb|CAB77737.1| hypothetical protein
  misc_feature (156)..(245): Homolog of NCBI NO: 34902536 NR Description: P0581F09.27 [Oryza sativa (japonica >gi|13486734|dbj|BAB39969.1| hypothetical protein [Oryza sativa
  misc_feature (210)..(239): Homolog of NCBI NO: 26451183 NR Description: unknown protein [Arabidopsis thaliana]
  misc_feature (210)..(240): Homolog of NCBI NO: 15221309 NR Description: unknown protein; protein id: At1g05870.1
MISSSSVLDEEYEYTDDGFHYETRQNSLSRLSICTNSFHEDDEDHPSELGNFFSTLSLESFNDDVGAEADVEISDDGGESDSDKDSSGFYSLPTITSRRRRKLTVSGGLETSKESETKVDGSKCNIVSQRRVLREKSKRGNQYGHWFNGVERDSDGGGELTVLTKVRGGKKKSMKMGFEEVKACRDLGFELDVPGRVSGSNRETSSGGNSPIANWRISSPGDDPKEVKARLKMWAQAVALASASR

SEQ ID NO: 70890 - DNA, 1230 bp, Arabidopsis thaliana
  misc_feature (1)..(1230): Ceres Seq. ID no. 3023647
atgatgcttaatcagacagtgatcttcttccttctttgggtgatcatagcacttgtagtcgaaattactttggccggaaagatcacagtttctgatatccatgagcagaaaatcgaacaacggttgaaccaactcaacaaacccgccgttaaatctatccatagtccagatggagatataatcgattgtgtatggatctatcaccaaccagcttttgatcatcctttactcaaaaaccacaccattcagatgaggccgaaaagtgactcgacaagggacaaaactggaggtaacaagacagacattatccatcaattgtggcgcacgaaaggtgaatgtcctaagaacactattcccatcagaagaagaacaagagatgatcttctaagatcagattccatcaaaactcatggaagaaagaacccaccaaccatttctccaactacttatcacctccccgatgatcagacagaagttcatgagcatgcgagtgtgtacctggactatggtgaataccatggcagcaagagccgtataagtatatggagaccagacgttaatatgaccgagtttagtttggctcaaacatgggtcgtcggtggagattgggacactgttttgaacactgtggagtctggttggcagatcctacattctatgtacggtgacaataatacaagacttttcgccttttggacgagcgattcatatggagacaacagctgctacaatcttgactgtccaggctttgttcaagtgaataaagatattgcccttggtgcagccctcaacactatctcgacctacaatggtaaccaatatgatttccttctaactattgagaaggaacaagataccggactttggtggcttaagtttgatactcatctagtcggatactggccaagctttctagtcccgaagctagcagactcagcacggatgatcgcttggggaggtgaaattgtgtatgatgctagtggccaaaatgaacatacgcttacgcaaatggggagtggccatttcgcggaagaagggtttaagaaggcggcttatatcaataacatagagtacatcgataaatctaatcatccgatcaaaccctttcctcaaaatcttgaagcttctgttactcggcctgaatgctataacctcaaggttggctctagccgaagatggggaacttacattttctatggtggacctggacgtaaccctcaatgcctatga

SEQ ID NO: 70891 - protein, 409 aa, Arabidopsis thaliana
  peptide (1)..(409): Ceres Seq. ID no. 3023648
  misc_feature (172)..(367): Pfam Name: Arabidopsis proteins of unknown function Pfam Description: Arabidopsis proteins of unknown function
  misc_feature (49)..(409): Homolog of NCBI NO: 15224848 NR Description: unknown protein; protein id: At2g44250.1
  misc_feature (1)..(54): Homolog of NCBI NO: 15224848 NR Description: unknown protein; protein id: At2g44250.1
  misc_feature (7)..(408): Homolog of NCBI NO: 18406483 NR Description: expressed protein; protein id: At2g44210.1, by cDNA: 39057., supported by cDNA: gi_15081718 [Arabidopsis
  misc_feature (13)..(408): Homolog of NCBI NO: 30103019 NR Description: unknown protein [Oryza sativa (japonica
  misc_feature (10)..(408): Homolog of NCBI NO: 15241244 NR Description: putative protein; protein id: At5g56530.1, by cDNA: gi_17381169 [Arabidopsis thaliana]
  misc_feature (13)..(408): Homolog of NCBI NO: 34393299 NR Description: putative DD1A protein [Oryza sativa (japonica
  misc_feature (35)..(408): Homolog of NCBI NO: 34393554 NR Description: putative carboxyl-terminal proteinase [Oryza
  misc_feature (9)..(408): Homolog of NCBI NO: 18400044 NR Description: expressed protein; protein id: At3g13510.1, by cDNA: 37810., supported by cDNA: gi_18700164 [Arabidopsis >gi|9280303|dbj|BAB01758.1| gb|AAC16072.1~gene_id:MRP15.17~strong
  misc_feature (9)..(408): Homolog of NCBI NO: 21593294 NR Description: putative carboxyl-terminal peptidase [Arabidopsis
  misc_feature (31)..(408): Homolog of NCBI NO: 27311623 NR Description: unknown protein [Arabidopsis thaliana]
MMLNQTVIFFLLWVIIALVVEITLAGKITVSDIHEQKIEQRLNQLNKPAVKSIHSPDGDIIDCVWIYHQPAFDHPLLKNHTIQMRPKSDSTRDKTGGNKTDIIHQLWRTKGECPKNTIPIRRRTRDDLLRSDSIKTHGRKNPPTISPTTYHLPDDQTEVHEHASVYLDYGEYHGSKSRISIWRPDVNMTEFSLAQTWVVGGDWDTVLNTVESGWQILHSMYGDNNTRLFAFWTSDSYGDNSCYNLDCPGFVQVNKDIALGAALNTISTYNGNQYDFLLTIEKEQDTGLWWLKFDTHLVGYWPSFLVPKLADSARMIAWGGEIVYDASGQNEHTLTQMGSGHFAEEGFKKAAYINNIEYIDKSNHPIKPFPQNLEASVTRPECYNLKVGSSRRWGTYIFYGGPGRNPQCL

SEQ ID NO: 70892 - protein, 408 aa, Arabidopsis thaliana
  peptide (1)..(408): Ceres Seq. ID no. 3023649
  misc_feature (171)..(366): Pfam Name: Arabidopsis proteins of unknown function Pfam Description: Arabidopsis proteins of unknown function
  misc_feature (48)..(408): Homolog of NCBI NO: 15224848 NR Description: unknown protein; protein id: At2g44250.1
  misc_feature (1)..(53): Homolog of NCBI NO: 15224848 NR Description: unknown protein; protein id: At2g44250.1
  misc_feature (6)..(407): Homolog of NCBI NO: 18406483 NR Description: expressed protein; protein id: At2g44210.1, by cDNA: 39057., supported by cDNA: gi_15081718 [Arabidopsis
  misc_feature (12)..(407): Homolog of NCBI NO: 30103019 NR Description: unknown protein [Oryza sativa (japonica
  misc_feature (9)..(407): Homolog of NCBI NO: 15241244 NR Description: putative protein; protein id: At5g56530.1, by cDNA: gi_17381169 [Arabidopsis thaliana]
  misc_feature (12)..(407): Homolog of NCBI NO: 34393299 NR Description: putative DD1A protein [Oryza sativa (japonica
  misc_feature (34)..(407): Homolog of NCBI NO: 34393554 NR Description: putative carboxyl-terminal proteinase [Oryza
  misc_feature (8)..(407): Homolog of NCBI NO: 18400044 NR Description: expressed protein; protein id: At3g13510.1, by cDNA: 37810., supported by cDNA: gi_18700164 [Arabidopsis >gi|9280303|dbj|BAB01758.1| gb|AAC16072.1~gene_id:MRP15.17~strong
  misc_feature (8)..(407): Homolog of NCBI NO: 21593294 NR Description: putative carboxyl-terminal peptidase [Arabidopsis
  misc_feature (30)..(407): Homolog of NCBI NO: 27311623 NR Description: unknown protein [Arabidopsis thaliana]
MLNQTVIFFLLWVIIALVVEITLAGKITVSDIHEQKIEQRLNQLNKPAVKSIHSPDGDIIDCVWIYHQPAFDHPLLKNHTIQMRPKSDSTRDKTGGNKTDIIHQLWRTKGECPKNTIPIRRRTRDDLLRSDSIKTHGRKNPPTISPTTYHLPDDQTEVHEHASVYLDYGEYHGSKSRISIWRPDVNMTEFSLAQTWVVGGDWDTVLNTVESGWQILHSMYGDNNTRLFAFWTSDSYGDNSCYNLDCPGFVQVNKDIALGAALNTISTYNGNQYDFLLTIEKEQDTGLWWLKFDTHLVGYWPSFLVPKLADSARMIAWGGEIVYDASGQNEHTLTQMGSGHFAEEGFKKAAYINNIEYIDKSNHPIKPFPQNLEASVTRPECYNLKVGSSRRWGTYIFYGGPGRNPQCL

SEQ ID NO: 70893 - protein, 326 aa, Arabidopsis thaliana; identical to SEQ ID NO: 70449
  peptide (1)..(326): Ceres Seq. ID no. 3023650
  misc_feature (89)..(284): Pfam Name: Arabidopsis proteins of unknown function Pfam Description: Arabidopsis proteins of unknown function
  misc_feature (1)..(326): Homolog of NCBI NO: 15224848 NR Description: unknown protein; protein id: At2g44250.1
  misc_feature (1)..(325): Homolog of NCBI NO: 18406483 NR Description: expressed protein; protein id: At2g44210.1, by cDNA: 39057., supported by cDNA: gi_15081718 [Arabidopsis
  misc_feature (1)..(325): Homolog of NCBI NO: 30103019 NR Description: unknown protein [Oryza sativa (japonica
  misc_feature (1)..(325): Homolog of NCBI NO: 15241244 NR Description: putative protein; protein id: At5g56530.1, by cDNA: gi_17381169 [Arabidopsis thaliana]
  misc_feature (1)..(325): Homolog of NCBI NO: 34393299 NR Description: putative DD1A protein [Oryza sativa (japonica
  misc_feature (1)..(325): Homolog of NCBI NO: 34393554 NR Description: putative carboxyl-terminal proteinase [Oryza
  misc_feature (1)..(325): Homolog of NCBI NO: 18400044 NR Description: expressed protein; protein id: At3g13510.1, by cDNA: 37810., supported by cDNA: gi_18700164 [Arabidopsis >gi|9280303|dbj|BAB01758.1| gb|AAC16072.1~gene_id:MRP15.17~strong
  misc_feature (1)..(325): Homolog of NCBI NO: 21593294 NR Description: putative carboxyl-terminal peptidase [Arabidopsis
  misc_feature (1)..(325): Homolog of NCBI NO: 27311623 NR Description: unknown protein [Arabidopsis thaliana]
  misc_feature (1)..(325): Homolog of NCBI NO: 15222707 NR Description: unknown protein; protein id: At1g55360.1

SEQ ID NO: 70894 - DNA, 2274 bp, Arabidopsis thaliana
  misc_feature (1)..(2274): Ceres Seq. ID no. 3024092
  misc_feature: MA Experiment ID: 20000314 Result: Up-regulated in Transcription
  misc_feature: MA Experiment 20000314 PARAMETER Experiment Name: At_14day_Shoots-Roots_Sub_P Parameter: Age (day) Value: 14
  misc_feature: MA Experiment 20000314 PARAMETER Experiment Name: At_14day_Shoots-Roots_Sub_P Parameter: Organism Value: A. thaliana
  misc_feature: MA Experiment 20000314 PARAMETER Experiment Name: At_14day_Shoots-Roots_Sub_P Parameter: Plant Line Value: WS
  misc_feature: MA Experiment 20000314 PARAMETER Experiment Name: At_14day_Shoots-Roots_Sub_P Parameter: Tissue Value: Roots vs. Whole Plant
atggcggattcaagcttttctcttcctcctctttgtgaaaggatctcatacacgaactattttctaagagctgtatatctcacggttctaggccttttcttttctcttctcttgcaccgaatccgacatacgagcgaatacgacaacgtttggctcgtggctttcttttgtgaatcttgtttcttcttggtatgtctgcttattacttgcctaaaatggagtcctgctgatactaaaccctttcctgatagacttgatgaaagggttcatgaccttccttcggtggatatgttcgtgcccacagcagatccggttcgagagccaccgattatggttgtggacaccgtgctttcgctgttagctgtaaattatccggcaaataaactagcttgttatgtgtcggacgatggatgctcacctctcacttatttctctctcaaggaagcttctaagttcgccaagatttgggtaccgttctgcaaaaagtacaacactagagttagagctccttctagatattttctgaaacctataagcgtcgcaacagaggattatgaattcaatagagactgggaaaagacgaagagggagtacgagaagttgaggcggaaagtggaagatgccaccggagattctcatatgttggatgtagaagatgattttgaagcattctcaaacacaaaaccaaatgatcattcaactctagttaaggtggtatgggagaacaagggaggtgtaggagacgagaaagagatccctcatatcatatacatatcaagagagaaaagaccaaattatgttcataatcaaaaatgtggagccatgaactttctggcaagagtgtcagggttgatgacaaacgcaccatacatcttgaacgtggattgcgacatgtatgccaatgatgcagatgtagtccgacaagcaatgtgtatacttctgcaagaatcattaaatatgaaacattgtgcttttgttcaattccgtcaagaattctatgattcaagcaccgagctaatagtcgtcctacaatcacatttgggacgaggaatcgcgggaatccaaggaccgatatatataggatcaggatgcgtccacacgagaagagttatgtatggtttatctccagacgatttcgaagttgatggaagtctttcttcagttgctacaagggagtttttggttaaggatagtttagcgagaagatttggtaattctaaagagatgatgaaatcagtggttgatgcaatacaaagaaatccaaatccacaaaatatacttacaaactccatagaagcggctcgagaagtgggacattgtcagtacgagtaccaaaccagctggggaaacaccatcggctggttatatgattcagtggcggaagatttaaacacgagtatcggaatacattcgagaggttggactagctcatacatttctccggatacacctgcatttcttggatctatgccggcaggagtacccgaggcgttactccagcagcgtcgatgggcgacaggatggatcgaaatccttttcaacaagcaaagtccgttgcgaggattgtttagcaagaaaataagattccgacaacgattagcttatctttgcattatcacctgtctaaggtcaatccctgagcttatttattgtctccttcctgcttattgcctactccacaactctaccttattccccaagggactttatttaggcataactgtcacacttgttgggatacattgtctctatactctatgggaatttatgagccttggttattccgtacaatcgtggctagtctcccaatcagtttggagaatagtagccactagtagttggttatttagcatctttgatatcacactcaagcttcttggcatctcggaaacggtgttcataatcactaaaaagactgtggctgggaccaagtcagcattagggtctggaccctctcaaggagaagacgttggtccaaactcagacttgtttaaatttgaatttgatggctcactttgtttcttgcctggcacatttattgtgttggtgaatatagccgctctagctgttttttctgtgggtctacaacggtcgagttacagccatgaaggaggtggttcgggtctggcagaggcttgcggatgtgttttggtaatgatgttgttccttccatttctaatgggtttgtttaagaaaggaaaatatggaaccccattgtctactctctctatagctggctttttagcagttttatttgttgttttctctgtttga

SEQ ID NO: 70895 - protein, 757 aa, Arabidopsis thaliana
  peptide (1)..(757): Ceres Seq. ID no. 3024093
  misc_feature (1)..(757): Homolog of NCBI NO: 30685335 NR Description: cellulose synthase - related [Arabidopsis >gi|19699079|gb|AAL90907.1| At2g32530/T26B15.9 [Arabidopsis >gi|25090435|gb|AAN72301.1| At2g32530/T26B15.9 [Arabidopsis
  misc_feature (1)..(757): Homolog of NCBI NO: 15225704 NR Description: putative cellulose synthase; protein id: [Arabidopsis thaliana] >gi|7484862|pir||T02553 cellulose synthase
  misc_feature (45)..(757): Homolog of NCBI NO: 7484865 NR Description: cellulose synthase homolog T26B15.9 - Arabidopsis >gi|3298541|gb|AAC25935.1| putative cellulose synthase
  misc_feature (246)..(757): Homolog of NCBI NO: 30683201 NR Description: cellulose synthase - related [Arabidopsis
  misc_feature (1)..(239): Homolog of NCBI NO: 30683201 NR Description: cellulose synthase - related [Arabidopsis
  misc_feature (266)..(666): Homolog of NCBI NO: 15233771 NR Description: cellulose synthase like protein; protein id:
  misc_feature (1)..(239): Homolog of NCBI NO: 15233771 NR Description: cellulose synthase like protein; protein id:
  misc_feature (235)..(278): Homolog of NCBI NO: 15233771 NR Description: cellulose synthase like protein; protein id:
  misc_feature (246)..(757): Homolog of NCBI NO: 7485046 NR Description: hypothetical protein - Arabidopsis thaliana cellulose synthase like protein [Arabidopsis thaliana]
  misc_feature (97)..(239): Homolog of NCBI NO: 7485046 NR Description: hypothetical protein - Arabidopsis thaliana cellulose synthase like protein [Arabidopsis thaliana]
MADSSFSLPPLCERISYTNYFLRAVYLTVLGLFFSLLLHRIRHTSEYDNVWLVAFFCESCFFLVCLLITCLKWSPADTKPFPDRLDERVHDLPSVDMFVPTADPVREPPIMVVDTVLSLLAVNYPANKLACYVSDDGCSPLTYFSLKEASKFAKIWVPFCKKYNTRVRAPSRYFLKPISVATEDYEFNRDWEKTKREYEKLRRKVEDATGDSHMLDVEDDFEAFSNTKPNDHSTLVKVVWENKGGVGDEKEIPHIIYISREKRPNYVHNQKCGAMNFLARVSGLMTNAPYILNVDCDMYANDADVVRQAMCILLQESLNMKHCAFVQFRQEFYDSSTELIVVLQSHLGRGIAGIQGPIYIGSGCVHTRRVMYGLSPDDFEVDGSLSSVATREFLVKDSLARRFGNSKEMMKSVVDAIQRNPNPQNILTNSIEAAREVGHCQYEYQTSWGNTIGWLYDSVAEDLNTSIGIHSRGWTSSYISPDTPAFLGSMPAGVPEALLQQRRWATGWIEILFNKQSPLRGLFSKKIRFRQRLAYLCIITCLRSIPELIYCLLPAYCLLHNSTLFPKGLYLGITVTLVGIHCLYTLWEFMSLGYSVQSWLVSQSVWRIVATSSWLFSIFDITLKLLGISETVFIITKKTVAGTKSALGSGPSQGEDVGPNSDLFKFEFDGSLCFLPGTFIVLVNIAALAVFSVGLQRSSYSHEGGGSGLAEACGCVLVMMLFLPFLMGLFKKGKYGTPLSTLSIAGFLAVLFVVFSV

SEQ ID NO: 70896 - protein, 661 aa, Arabidopsis thaliana
  peptide (1)..(661): Ceres Seq. ID no. 3024094
  misc_feature (1)..(661): Homolog of NCBI NO: 30685335 NR Description: cellulose synthase - related [Arabidopsis >gi|19699079|gb|AAL90907.1| At2g32530/T26B15.9 [Arabidopsis >gi|25090435|gb|AAN72301.1| At2g32530/T26B15.9 [Arabidopsis
  misc_feature (1)..(661): Homolog of NCBI NO: 15225704 NR Description: putative cellulose synthase; protein id: [Arabidopsis thaliana] >gi|7484862|pir||T02553 cellulose synthase
  misc_feature (1)..(661): Homolog of NCBI NO: 7484865 NR Description: cellulose synthase homolog T26B15.9 - Arabidopsis >gi|3298541|gb|AAC25935.1| putative cellulose synthase
  misc_feature (150)..(661): Homolog of NCBI NO: 30683201 NR Description: cellulose synthase - related [Arabidopsis
  misc_feature (1)..(143): Homolog of NCBI NO: 30683201 NR Description: cellulose synthase - related [Arabidopsis
  misc_feature (170)..(570): Homolog of NCBI NO: 15233771 NR Description: cellulose synthase like protein; protein id:
  misc_feature (1)..(143): Homolog of NCBI NO: 15233771 NR Description: cellulose synthase like protein; protein id:
  misc_feature (139)..(182): Homolog of NCBI NO: 15233771 NR Description: cellulose synthase like protein; protein id:
  misc_feature (150)..(661): Homolog of NCBI NO: 7485046 NR Description: hypothetical protein - Arabidopsis thaliana cellulose synthase like protein [Arabidopsis thaliana]
  misc_feature (1)..(143): Homolog of NCBI NO: 7485046 NR Description: hypothetical protein - Arabidopsis thaliana cellulose synthase like protein [Arabidopsis thaliana]
MFVPTADPVREPPIMVVDTVLSLLAVNYPANKLACYVSDDGCSPLTYFSLKEASKFAKIWVPFCKKYNTRVRAPSRYFLKPISVATEDYEFNRDWEKTKREYEKLRRKVEDATGDSHMLDVEDDFEAFSNTKPNDHSTLVKVVWENKGGVGDEKEIPHIIYISREKRPNYVHNQKCGAMNFLARVSGLMTNAPYILNVDCDMYANDADVVRQAMCILLQESLNMKHCAFVQFRQEFYDSSTELIVVLQSHLGRGIAGIQGPIYIGSGCVHTRRVMYGLSPDDFEVDGSLSSVATREFLVKDSLARRFGNSKEMMKSVVDAIQRNPNPQNILTNSIEAAREVGHCQYEYQTSWGNTIGWLYDSVAEDLNTSIGIHSRGWTSSYISPDTPAFLGSMPAGVPEALLQQRRWATGWIEILFNKQSPLRGLFSKKIRFRQRLAYLCIITCLRSIPELIYCLLPAYCLLHNSTLFPKGLYLGITVTLVGIHCLYTLWEFMSLGYSVQSWLVSQSVWRIVATSSWLFSIFDITLKLLGISETVFIITKKTVAGTKSALGSGPSQGEDVGPNSDLFKFEFDGSLCFLPGTFIVLVNIAALAVFSVGLQRSSYSHEGGGSGLAEACGCVLVMMLFLPFLMGLFKKGKYGTPLSTLSIAGFLAVLFVVFSV

SEQ ID NO: 70897 - protein, 647 aa, Arabidopsis thaliana
  peptide (1)..(647): Ceres Seq. ID no. 3024095
  misc_feature (1)..(647): Homolog of NCBI NO: 30685335 NR Description: cellulose synthase - related [Arabidopsis >gi|19699079|gb|AAL90907.1| At2g32530/T26B15.9 [Arabidopsis >gi|25090435|gb|AAN72301.1| At2g32530/T26B15.9 [Arabidopsis
  misc_feature (1)..(647): Homolog of NCBI NO: 15225704 NR Description: putative cellulose synthase; protein id: [Arabidopsis thaliana] >gi|7484862|pir||T02553 cellulose synthase
  misc_feature (1)..(647): Homolog of NCBI NO: 7484865 NR Description: cellulose synthase homolog T26B15.9 - Arabidopsis >gi|3298541|gb|AAC25935.1| putative cellulose synthase
  misc_feature (136)..(647): Homolog of NCBI NO: 30683201 NR Description: cellulose synthase - related [Arabidopsis
  misc_feature (1)..(129): Homolog of NCBI NO: 30683201 NR Description: cellulose synthase - related [Arabidopsis
  misc_feature (156)..(556): Homolog of NCBI NO: 15233771 NR Description: cellulose synthase like protein; protein id:
  misc_feature (1)..(129): Homolog of NCBI NO: 15233771 NR Description: cellulose synthase like protein; protein id:
  misc_feature (125)..(168): Homolog of NCBI NO: 15233771 NR Description: cellulose synthase like protein; protein id:
  misc_feature (136)..(647): Homolog of NCBI NO: 7485046 NR Description: hypothetical protein - Arabidopsis thaliana cellulose synthase like protein [Arabidopsis thaliana]
  misc_feature (1)..(129): Homolog of NCBI NO: 7485046 NR Description: hypothetical protein - Arabidopsis thaliana cellulose synthase like protein [Arabidopsis thaliana]
MVVDTVLSLLAVNYPANKLACYVSDDGCSPLTYFSLKEASKFAKIWVPFCKKYNTRVRAPSRYFLKPISVATEDYEFNRDWEKTKREYEKLRRKVEDATGDSHMLDVEDDFEAFSNTKPNDHSTLVKVVWENKGGVGDEKEIPHIIYISREKRPNYVHNQKCGAMNFLARVSGLMTNAPYILNVDCDMYANDADVVRQAMCILLQESLNMKHCAFVQFRQEFYDSSTELIVVLQSHLGRGIAGIQGPIYIGSGCVHTRRVMYGLSPDDFEVDGSLSSVATREFLVKDSLARRFGNSKEMMKSVVDAIQRNPNPQNILTNSIEAAREVGHCQYEYQTSWGNTIGWLYDSVAEDLNTSIGIHSRGWTSSYISPDTPAFLGSMPAGVPEALLQQRRWATGWIEILFNKQSPLRGLFSKKIRFRQRLAYLCIITCLRSIPELIYCLLPAYCLLHNSTLFPKGLYLGITVTLVGIHCLYTLWEFMSLGYSVQSWLVSQSVWRIVATSSWLFSIFDITLKLLGISETVFIITKKTVAGTKSALGSGPSQGEDVGPNSDLFKFEFDGSLCFLPGTFIVLVNIAALAVFSVGLQRSSYSHEGGGSGLAEACGCVLVMMLFLPFLMGLFKKGKYGTPLSTLSIAGFLAVLFVVFSV

SEQ ID NO: 70898 - DNA, 948 bp, Arabidopsis thaliana
  misc_feature (1)..(948): Ceres Seq. ID no. 3024189
  misc_feature: MA Experiment ID: 20000166 Result: Up-regulated in Transcription
  misc_feature: MA Experiment 20000166 PARAMETER Experiment Name: At_100uM_ABA_P Parameter: Age (day) Value: 14
  misc_feature: MA Experiment 20000166 PARAMETER Experiment Name: At_100uM_ABA_P Parameter: Organism Value: A. thaliana
  misc_feature: MA Experiment 20000166 PARAMETER Experiment Name: At_100uM_ABA_P Parameter: Plant Line Value: WS
  misc_feature: MA Experiment 20000166 PARAMETER Experiment Name: At_100uM_ABA_P Parameter: Timepoint (hr) Value: 1
  misc_feature: MA Experiment 20000166 PARAMETER Experiment Name: At_100uM_ABA_P Parameter: Tissue Value: Aerial
  misc_feature: MA Experiment 20000166 PARAMETER Experiment Name: At_100uM_ABA_P Parameter: Treatment Value: 100uM ABA vs. No Treatment
  misc_feature: MA Experiment ID: 20000169 Result: Up-regulated in Transcription
  misc_feature: MA Experiment 20000169 PARAMETER Experiment Name: At_100uM_ABA_P Parameter: Age (day) Value: 14
  misc_feature: MA Experiment 20000169 PARAMETER Experiment Name: At_100uM_ABA_P Parameter: Organism Value: A. thaliana
  misc_feature: MA Experiment 20000169 PARAMETER Experiment Name: At_100uM_ABA_P Parameter: Plant Line Value: WS
  misc_feature: MA Experiment 20000169 PARAMETER Experiment Name: At_100uM_ABA_P Parameter: Timepoint (hr) Value: 6
  misc_feature: MA Experiment 20000169 PARAMETER Experiment Name: At_100uM_ABA_P Parameter: Tissue Value: Aerial
  misc_feature: MA Experiment 20000169 PARAMETER Experiment Name: At_100uM_ABA_P Parameter: Treatment Value: 100uM ABA vs. No Treatment
  misc_feature: MA Experiment ID: 20000182 Result: Up-regulated in Transcription
  misc_feature: MA Experiment 20000182 PARAMETER Experiment Name: At_2mM_SA_P Parameter: Age (day) Value: 14
  misc_feature: MA Experiment 20000182 PARAMETER Experiment Name: At_2mM_SA_P Parameter: Organism Value: A. thaliana
  misc_feature: MA Experiment 20000182 PARAMETER Experiment Name: At_2mM_SA_P Parameter: Plant Line Value: WS
  misc_feature: MA Experiment 20000182 PARAMETER Experiment Name: At_2mM_SA_P Parameter: Timepoint (hr) Value: 6
  misc_feature: MA Experiment 20000182 PARAMETER Experiment Name: At_2mM_SA_P Parameter: Tissue Value: Aerial
  misc_feature: MA Experiment 20000182 PARAMETER Experiment Name: At_2mM_SA_P Parameter: Treatment Value: 2mM SA vs. No Treatment
  misc_feature: MA Experiment ID: 20000185 Result: Down-regulated in Transcription
  misc_feature: MA Experiment 20000185 PARAMETER Experiment Name: At_Roots__P Parameter: Age (day) Value: 7 vs. 21
  misc_feature: MA Experiment 20000185 PARAMETER Experiment Name: At_Roots__P Parameter: Organism Value: A. thaliana
  misc_feature: MA Experiment 20000185 PARAMETER Experiment Name: At_Roots__P Parameter: Tissue Value: Roots vs. Whole Plant
  misc_feature: MA Experiment ID: 20000264 Result: Up-regulated in Transcription
  misc_feature: MA Experiment 20000264 PARAMETER Experiment Name: At_Open_Flower_P Parameter: Age (day) Value: 21
  misc_feature: MA Experiment 20000264 PARAMETER Experiment Name: At_Open_Flower_P Parameter: Plant Line Value: WS
  misc_feature: MA Experiment 20000264 PARAMETER Experiment Name: At_Open_Flower_P Parameter: Tissue Value: Open Flower vs. Whole Plant
  misc_feature: MA Experiment ID: 20000265 Result: Up-regulated in Transcription
  misc_feature: MA Experiment 20000265 PARAMETER Experiment Name: At_Open_Flower_P Parameter: Age (day) Value: 21
  misc_feature: MA Experiment 20000265 PARAMETER Experiment Name: At_Open_Flower_P Parameter: Plant Line Value: WS
  misc_feature: MA Experiment 20000265 PARAMETER Experiment Name: At_Open_Flower_P Parameter: Tissue Value: Closed Flower vs. Whole Plant
  misc_feature: MA Experiment ID: 20000268 Result: Up-regulated in Transcription
  misc_feature: MA Experiment 20000268 PARAMETER Experiment Name: At_100mM_NaCl__P Parameter: Age (day) Value: 14
  misc_feature: MA Experiment 20000268 PARAMETER Experiment Name: At_100mM_NaCl__P Parameter: Organism Value: A. thaliana
  misc_feature: MA Experiment 20000268 PARAMETER Experiment Name: At_100mM_NaCl__P Parameter: Plant Line Value: WS
  misc_feature: MA Experiment 20000268 PARAMETER Experiment Name: At_100mM_NaCl__P Parameter: Timepoint (hr) Value: 6
  misc_feature: MA Experiment 20000268 PARAMETER Experiment Name: At_100mM_NaCl__P Parameter: Tissue Value: Whole Plant
  misc_feature: MA Experiment 20000268 PARAMETER Experiment Name: At_100mM_NaCl__P Parameter: Treatment Value: 100mM NaCl vs. No Treatment
  misc_feature: MA Experiment ID: 20000286 Result: Up-regulated in Transcription
  misc_feature: MA Experiment 20000286 PARAMETER Experiment Name: At_Open_Flower_P Parameter: Age (day) Value: 21
  misc_feature: MA Experiment 20000286 PARAMETER Experiment Name: At_Open_Flower_P Parameter: Plant Line Value: WS
  misc_feature: MA Experiment 20000286 PARAMETER Experiment Name: At_Open_Flower_P Parameter: Tissue Value: Half Open vs. Whole Plant
  misc_feature: MA Experiment ID: 20000436 Result: Up-regulated in Transcription
  misc_feature: MA Experiment 20000436 PARAMETER Experiment Name: At_Drought_P Parameter: Age (day) Value: 7
  misc_feature: MA Experiment 20000436 PARAMETER Experiment Name: At_Drought_P Parameter: Organism Value: A. thaliana
  misc_feature: MA Experiment 20000436 PARAMETER Experiment Name: At_Drought_P Parameter: Plant Line Value: WS
  misc_feature: MA Experiment 20000436 PARAMETER Experiment Name: At_Drought_P Parameter: Timepoint (hr) Value: 12
  misc_feature: MA Experiment 20000436 PARAMETER Experiment Name: At_Drought_P Parameter: Tissue Value: Whole Plant
  misc_feature: MA Experiment 20000436 PARAMETER Experiment Name: At_Drought_P Parameter: Treatment Value: Drought vs. No Drought
  misc_feature: MA Experiment ID: 20000437 Result: Up-regulated in Transcription
  misc_feature: MA Experiment 20000437 PARAMETER Experiment Name: At_Drought_P Parameter: Age (day) Value: 8
  misc_feature: MA Experiment 20000437 PARAMETER Experiment Name: At_Drought_P Parameter: Organism Value: A. thaliana
  misc_feature: MA Experiment 20000437 PARAMETER Experiment Name: At_Drought_P Parameter: Plant Line Value: WS
  misc_feature: MA Experiment 20000437 PARAMETER Experiment Name: At_Drought_P Parameter: Timepoint (hr) Value: 24
  misc_feature: MA Experiment 20000437 PARAMETER Experiment Name: At_Drought_P Parameter: Tissue Value: Whole Plant
  misc_feature: MA Experiment 20000437 PARAMETER Experiment Name: At_Drought_P Parameter: Treatment Value: Drought vs. No Drought
  misc_feature: MA Experiment ID: 20000439 Result: Down-regulated in Transcription
  misc_feature: MA Experiment 20000439 PARAMETER Experiment Name: At_Roots__P Parameter: Age (day) Value: 14 vs. 21
  misc_feature: MA Experiment 20000439 PARAMETER Experiment Name: At_Roots__P Parameter: Organism Value: A. thaliana
  misc_feature: MA Experiment 20000439 PARAMETER Experiment Name: At_Roots__P Parameter: Tissue Value: Roots vs. Whole Plant
  misc_feature: MA Experiment ID: 20000445 Result: Up-regulated in Transcription
  misc_feature: MA Experiment 20000445 PARAMETER Experiment Name: At_100uM_NAA__P Parameter: Age (day) Value: 14
  misc_feature: MA Experiment 20000445 PARAMETER Experiment Name: At_100uM_NAA__P Parameter: Organism Value: A. thaliana
  misc_feature: MA Experiment 20000445 PARAMETER Experiment Name: At_100uM_NAA__P Parameter: Plant Line Value: WS
  misc_feature: MA Experiment 20000445 PARAMETER Experiment Name: At_100uM_NAA__P Parameter: Timepoint (hr) Value: 6
  misc_feature: MA Experiment 20000445 PARAMETER Experiment Name: At_100uM_NAA__P Parameter: Tissue Value: Aerial
  misc_feature: MA Experiment 20000445 PARAMETER Experiment Name: At_100uM_NAA__P Parameter: Treatment Value: 100uM NAA vs. No Treatment
  misc_feature: MA Experiment ID: 20000453 Result: Up-regulated in Transcription
  misc_feature: MA Experiment 20000453 PARAMETER Experiment Name: At_100uM_ABA_P Parameter: Age (day) Value: 15
  misc_feature: MA Experiment 20000453 PARAMETER Experiment Name: At_100uM_ABA_P Parameter: Organism Value: A. thaliana
  misc_feature: MA Experiment 20000453 PARAMETER Experiment Name: At_100uM_ABA_P Parameter: Plant Line Value: WS
  misc_feature: MA Experiment 20000453 PARAMETER Experiment Name: At_100uM_ABA_P Parameter: Timepoint (hr) Value: 24
  misc_feature: MA Experiment 20000453 PARAMETER Experiment Name: At_100uM_ABA_P Parameter: Tissue Value: Aerial
  misc_feature: MA Experiment 20000453 PARAMETER Experiment Name: At_100uM_ABA_P Parameter: Treatment Value: 100uM ABA vs. No Treatment
  misc_feature: MA Experiment ID: 20000455 Result: Up-regulated in Transcription
  misc_feature: MA Experiment 20000455 PARAMETER Experiment Name: At_100uM_ABA_P Parameter: Age (day) Value: 16
  misc_feature: MA Experiment 20000455 PARAMETER Experiment Name: At_100uM_ABA_P Parameter: Organism Value: A. thaliana
  misc_feature: MA Experiment 20000455 PARAMETER Experiment Name: At_100uM_ABA_P Parameter: Plant Line Value: WS
  misc_feature: MA Experiment 20000455 PARAMETER Experiment Name: At_100uM_ABA_P Parameter: Timepoint (hr) Value: 48
  misc_feature: MA Experiment 20000455 PARAMETER Experiment Name: At_100uM_ABA_P Parameter: Tissue Value: Aerial
  misc_feature: MA Experiment 20000455 PARAMETER Experiment Name: At_100uM_ABA_P Parameter: Treatment Value: 100uM ABA vs. No Treatment
  misc_feature: MA Experiment ID: 20000495 Result: Down-regulated in Transcription
  misc_feature: MA Experiment 20000495 PARAMETER Experiment Name: At_Guard_Cells_P Parameter: Harvest Date Value: 8/2/2002
  misc_feature: MA Experiment 20000495 PARAMETER Experiment Name: At_Guard_Cells_P Parameter: Organism Value: A. thaliana
  misc_feature: MA Experiment 20000495 PARAMETER Experiment Name: At_Guard_Cells_P Parameter: Tissue Value: Guard Cells vs. Leaves
  misc_feature: MA Experiment ID: 20000506 Result: Up-regulated in Transcription
  misc_feature: MA Experiment 20000506 PARAMETER Experiment Name: At_Wounding_P Parameter: Organism Value: A. thaliana
  misc_feature: MA Experiment 20000506 PARAMETER Experiment Name: At_Wounding_P Parameter: Plant Line Value: WS
  misc_feature: MA Experiment 20000506 PARAMETER Experiment Name: At_Wounding_P Parameter: Timepoint (hr) Value: 6
  misc_feature: MA Experiment 20000506 PARAMETER Experiment Name: At_Wounding_P Parameter: Tissue Value: Aerial
  misc_feature: MA Experiment 20000506 PARAMETER Experiment Name: At_Wounding_P Parameter: Treatment Value: Wounding vs. No Wounding
  misc_feature: MA Experiment ID: 20000527 Result: Down-regulated in Transcription
  misc_feature: MA Experiment 20000527 PARAMETER Experiment Name: At_10percent_PEG_P Parameter: Age (day) Value: 20
  misc_feature: MA Experiment 20000527 PARAMETER Experiment Name: At_10percent_PEG_P Parameter: Organism Value: A. thaliana
  misc_feature: MA Experiment 20000527 PARAMETER Experiment Name: At_10percent_PEG_P Parameter: Plant Line Value: WS
  misc_feature: MA Experiment 20000527 PARAMETER Experiment Name: At_10percent_PEG_P Parameter: Timepoint (day) Value: 20
  misc_feature: MA Experiment 20000527 PARAMETER Experiment Name: At_10percent_PEG_P Parameter: Tissue Value: Whole Plant
  misc_feature: MA Experiment 20000527 PARAMETER Experiment Name: At_10percent_PEG_P Parameter: Treatment Value: 10percent PEG vs. No Treatment
  misc_feature: MA Experiment ID: 20000575 Result: Up-regulated in Transcription
  misc_feature: MA Experiment 20000575 PARAMETER Experiment Name: At_100uM_ABA_Mutants__P Parameter: Organism Value: A. thaliana
  misc_feature: MA Experiment 20000575 PARAMETER Experiment Name: At_100uM_ABA_Mutants__P Parameter: Plant Line Value: CS22
  misc_feature: MA Experiment 20000575 PARAMETER Experiment Name: At_100uM_ABA_Mutants__P Parameter: Timepoint (hr) Value: 6
  misc_feature: MA Experiment 20000575 PARAMETER Experiment Name: At_100uM_ABA_Mutants__P Parameter: Tissue Value: Whole Plant
  misc_feature: MA Experiment 20000575 PARAMETER Experiment Name: At_100uM_ABA_Mutants__P Parameter: Treatment Value: 1uM ABA vs. No Treatment
  misc_feature: MA Experiment ID: 20001247 Result: Down-regulated in Transcription
  misc_feature: MA Experiment 20001247 PARAMETER Experiment Name: At_Far-red-induction_P Parameter: Age (day) Value: 7
  misc_feature: MA Experiment 20001247 PARAMETER Experiment Name: At_Far-red-induction_P Parameter: Light Value: Far-red vs. White
  misc_feature: MA Experiment 20001247 PARAMETER Experiment Name: At_Far-red-induction_P Parameter: Organism Value: A. thaliana
  misc_feature: MA Experiment 20001247 PARAMETER Experiment Name: At_Far-red-induction_P Parameter: Plant Line Value: Columbia
  misc_feature: MA Experiment 20001247 PARAMETER Experiment Name: At_Far-red-induction_P Parameter: Timepoint (hr) Value: 1
  misc_feature: MA Experiment 20001247 PARAMETER Experiment Name: At_Far-red-induction_P Parameter: Tissue Value: Whole Plant
  misc_feature: MA Experiment ID: 20001248 Result: Down-regulated in Transcription
  misc_feature: MA Experiment 20001248 PARAMETER Experiment Name: At_Far-red-induction_P Parameter: Age (day) Value: 7
  misc_feature: MA Experiment 20001248 PARAMETER Experiment Name: At_Far-red-induction_P Parameter: Light Value: Far-red vs. White
  misc_feature: MA Experiment 20001248 PARAMETER Experiment Name: At_Far-red-induction_P Parameter: Organism Value: A. thaliana
  misc_feature: MA Experiment 20001248 PARAMETER Experiment Name: At_Far-red-induction_P Parameter: Plant Line Value: Columbia
  misc_feature: MA Experiment 20001248 PARAMETER Experiment Name: At_Far-red-induction_P Parameter: Timepoint (hr) Value: 4
  misc_feature: MA Experiment 20001248 PARAMETER Experiment Name: At_Far-red-induction_P Parameter: Tissue Value: Whole Plant
  misc_feature: MA Experiment ID: 20001450 Result: Down-regulated in Transcription
  misc_feature: MA Experiment 20001450 PARAMETER Experiment Name: At_Far-red-induction_P Parameter: Age (day) Value: 7
  misc_feature: MA Experiment 20001450 PARAMETER Experiment Name: At_Far-red-induction_P Parameter: Light Value: Far-red vs. White
  misc_feature: MA Experiment 20001450 PARAMETER Experiment Name: At_Far-red-induction_P Parameter: Organism Value: A. thaliana
  misc_feature: MA Experiment 20001450 PARAMETER Experiment Name: At_Far-red-induction_P Parameter: Plant Line Value: Columbia
  misc_feature: MA Experiment 20001450 PARAMETER Experiment Name: At_Far-red-induction_P Parameter: Timepoint (hr) Value: 8
  misc_feature: MA Experiment 20001450 PARAMETER Experiment Name: At_Far-red-induction_P Parameter: Tissue Value: Whole Plant
  misc_feature: MA Experiment ID: 20001451 Result: Down-regulated in Transcription
  misc_feature: MA Experiment 20001451 PARAMETER Experiment Name: At_Far-red-induction_P Parameter: Age (day) Value: 7
  misc_feature: MA Experiment 20001451 PARAMETER Experiment Name: At_Far-red-induction_P Parameter: Light Value: Far-red vs. White
  misc_feature: MA Experiment 20001451 PARAMETER Experiment Name: At_Far-red-induction_P Parameter: Organism Value: A. thaliana
  misc_feature: MA Experiment 20001451 PARAMETER Experiment Name: At_Far-red-induction_P Parameter: Plant Line Value: Columbia
  misc_feature: MA Experiment 20001451 PARAMETER Experiment Name: At_Far-red-induction_P Parameter: Timepoint (hr) Value: 24
  misc_feature: MA Experiment 20001451 PARAMETER Experiment Name: At_Far-red-induction_P Parameter: Tissue Value: Whole Plant
  misc_feature: MA Experiment ID: 20001555 Result: Up-regulated in Transcription
  misc_feature: MA Experiment 20001555 PARAMETER Experiment Name: At_Drought_Soil_Dry_P Parameter: Age (day) Value: 24
  misc_feature: MA Experiment 20001555 PARAMETER Experiment Name: At_Drought_Soil_Dry_P Parameter: Organism Value: A. thaliana
  misc_feature: MA Experiment 20001555 PARAMETER Experiment Name: At_Drought_Soil_Dry_P Parameter: Plant Line Value: WS
  misc_feature: MA Experiment 20001555 PARAMETER Experiment Name: At_Drought_Soil_Dry_P Parameter: Post Timepoint (hr) Value: None
  misc_feature: MA Experiment 20001555 PARAMETER Experiment Name: At_Drought_Soil_Dry_P Parameter: Post-Treatment Value: None
  misc_feature: MA Experiment 20001555 PARAMETER Experiment Name: At_Drought_Soil_Dry_P Parameter: Timepoint (day) Value: 10
  misc_feature: MA Experiment 20001555 PARAMETER Experiment Name: At_Drought_Soil_Dry_P Parameter: Treatment Value: Drought vs. No Drought
  misc_feature: MA Experiment ID: 20001556 Result: Up-regulated in Transcription
  misc_feature: MA Experiment 20001556 PARAMETER Experiment Name: At_Drought_Soil_Dry_P Parameter: Age (day) Value: 26
  misc_feature: MA Experiment 20001556 PARAMETER Experiment Name: At_Drought_Soil_Dry_P Parameter: Organism Value: A. thaliana
  misc_feature: MA Experiment 20001556 PARAMETER Experiment Name: At_Drought_Soil_Dry_P Parameter: Plant Line Value: WS
  misc_feature: MA Experiment 20001556 PARAMETER Experiment Name: At_Drought_Soil_Dry_P Parameter: Post Timepoint (hr) Value: None
  misc_feature: MA Experiment 20001556 PARAMETER Experiment Name: At_Drought_Soil_Dry_P Parameter: Post-Treatment Value: None
  misc_feature: MA Experiment 20001556 PARAMETER Experiment Name: At_Drought_Soil_Dry_P Parameter: Timepoint (day) Value: 12
  misc_feature: MA Experiment 20001556 PARAMETER Experiment Name: At_Drought_Soil_Dry_P Parameter: Treatment Value: Drought vs. No Drought
  misc_feature: MA Experiment ID: 20001557 Result: Up-regulated in Transcription
  misc_feature: MA Experiment 20001557 PARAMETER Experiment Name: At_Drought_Soil_Dry_P Parameter: Age (day) Value: 27
  misc_feature: MA Experiment 20001557 PARAMETER Experiment Name: At_Drought_Soil_Dry_P Parameter: Organism Value: A. thaliana
  misc_feature: MA Experiment 20001557 PARAMETER Experiment Name: At_Drought_Soil_Dry_P Parameter: Plant Line Value: WS
  misc_feature: MA Experiment 20001557 PARAMETER Experiment Name: At_Drought_Soil_Dry_P Parameter: Post Timepoint (hr) Value: 3
  misc_feature: MA Experiment 20001557 PARAMETER Experiment Name: At_Drought_Soil_Dry_P Parameter: Post-Treatment Value: Re-Water vs. No Drought
  misc_feature: MA Experiment 20001557 PARAMETER Experiment Name: At_Drought_Soil_Dry_P Parameter: Timepoint (day) Value: 13
  misc_feature: MA Experiment 20001557 PARAMETER Experiment Name: At_Drought_Soil_Dry_P Parameter: Treatment Value: Drought vs. No Drought
  misc_feature: MA Experiment ID: 20001558 Result: Up-regulated in Transcription
  misc_feature: MA Experiment 20001558 PARAMETER Experiment Name: At_Drought_Soil_Dry_P Parameter: Age (day) Value: 27
  misc_feature: MA Experiment 20001558 PARAMETER Experiment Name: At_Drought_Soil_Dry_P Parameter: Organism Value: A. thaliana
  misc_feature: MA Experiment 20001558 PARAMETER Experiment Name: At_Drought_Soil_Dry_P Parameter: Plant Line Value: WS
  misc_feature: MA Experiment 20001558 PARAMETER Experiment Name: At_Drought_Soil_Dry_P Parameter: Post Timepoint (hr) Value: 6
  misc_feature: MA Experiment 20001558 PARAMETER Experiment Name: At_Drought_Soil_Dry_P Parameter: Post-Treatment Value: Re-Water vs. No Drought
  misc_feature: MA Experiment 20001558 PARAMETER Experiment Name: At_Drought_Soil_Dry_P Parameter: Timepoint (day) Value: 13
  misc_feature: MA Experiment 20001558 PARAMETER Experiment Name: At_Drought_Soil_Dry_P Parameter: Treatment Value: Drought vs. No Drought
  misc_feature: MA Experiment ID: 20001560 Result: Up-regulated in Transcription
  misc_feature: MA Experiment 20001560 PARAMETER Experiment Name: At_Drought_Soil_Dry_P Parameter: Age (day) Value: 28
  misc_feature: MA Experiment 20001560 PARAMETER Experiment Name: At_Drought_Soil_Dry_P Parameter: Organism Value: A. thaliana
  misc_feature: MA Experiment 20001560 PARAMETER Experiment Name: At_Drought_Soil_Dry_P Parameter: Plant Line Value: WS
  misc_feature: MA Experiment 20001560 PARAMETER Experiment Name: At_Drought_Soil_Dry_P Parameter: Post Timepoint (hr) Value: None
  misc_feature: MA Experiment 20001560 PARAMETER Experiment Name: At_Drought_Soil_Dry_P Parameter: Post-Treatment Value: None
  misc_feature: MA Experiment 20001560 PARAMETER Experiment Name: At_Drought_Soil_Dry_P Parameter: Timepoint (day) Value: 14
  misc_feature: MA Experiment 20001560 PARAMETER Experiment Name: At_Drought_Soil_Dry_P Parameter: Treatment Value: Drought vs. No Drought
  misc_feature: MA Experiment ID: 20001757 Result: Down-regulated in Transcription
  misc_feature: MA Experiment 20001757 PARAMETER Experiment Name: At_50mM_NH4NO3_L-to-H_P Parameter: Timepoint (hr) Value: 6
  misc_feature: MA Experiment 20001757 PARAMETER Experiment Name: At_50mM_NH4NO3_L-to-H_P Parameter: Tissue Value: Leaf
  misc_feature: MA Experiment 20001757 PARAMETER Experiment Name: At_50mM_NH4NO3_L-to-H_P Parameter: Treatment Value: 50mM NH4NO3 vs 100mM Mannitol
  misc_feature: MA Experiment ID: 20001904 Result: Up-regulated in Transcription
  misc_feature: MA Experiment 20001904 PARAMETER Experiment Name: At_Drought_Reproduction_P Parameter: Age (day) Value: 37
  misc_feature: MA Experiment 20001904 PARAMETER Experiment Name: At_Drought_Reproduction_P Parameter: Organism Value: A. thaliana
  misc_feature: MA Experiment 20001904 PARAMETER Experiment Name: At_Drought_Reproduction_P Parameter: Plant Line Value: WS
  misc_feature: MA Experiment 20001904 PARAMETER Experiment Name: At_Drought_Reproduction_P Parameter: Timepoint (day) Value: 7
  misc_feature: MA Experiment 20001904 PARAMETER Experiment Name: At_Drought_Reproduction_P Parameter: Tissue Value: Rosettes
  misc_feature: MA Experiment 20001904 PARAMETER Experiment Name: At_Drought_Reproduction_P Parameter: Treatment Value: Drought vs. No Drought
  misc_feature: MA Experiment ID: 20001905 Result: Up-regulated in Transcription
  misc_feature: MA Experiment 20001905 PARAMETER Experiment Name: At_Drought_Reproduction_P Parameter: Age (day) Value: 40
  misc_feature: MA Experiment 20001905 PARAMETER Experiment Name: At_Drought_Reproduction_P Parameter: Organism Value: A. thaliana
  misc_feature: MA Experiment 20001905 PARAMETER Experiment Name: At_Drought_Reproduction_P Parameter: Plant Line Value: WS
  misc_feature: MA Experiment 20001905 PARAMETER Experiment Name: At_Drought_Reproduction_P Parameter: Timepoint (day) Value: 10
  misc_feature: MA Experiment 20001905 PARAMETER Experiment Name: At_Drought_Reproduction_P Parameter: Tissue Value: Rosettes
  misc_feature: MA Experiment 20001905 PARAMETER Experiment Name: At_Drought_Reproduction_P Parameter: Treatment Value: Drought vs. No Drought
atggcaaatgcgatcacatttttcaagctcaacaccggcgctaagttcccttcggtgggtcttggaacatggcaagcttctcctggcctcgtcggtgatgcagtcgccgcggctgttaagattggctatcgtcacattgattgtgctcagatctatggcaacgaaaaagagattggggcagttctgaaaaaattgtttgaagacagagtagtgaaacgcgaggatttgttcatcacctccaaactctggtgtactgatcatgaccctcaagatgtcccggaggcattgaacagaactctcaaggatctgcagcttgaatacgtcgatctttatctgatacactggcctgcacggataaagaaaggttctgttggaataaagccagagaaccttttgcctgtagatattcctagtacatggaaagcgatggaagcactatacgattcgggcaaggcacgagccataggtgtaagcaatttctctaccaagaaactagctgatctcttggagttagctcgtgttcctcctgctgttaatcaggtcgaatgtcatccttcttggcgacaaactaagctacaagaattctgcaaatccaaaggggttcacctaagtgcatactcgccattaggttctccagggacaacatggctgaagagcgatgttttgaagaacccgatactgaatatggttgcggaaaaactcggaaagagtcctgcgcaagtcgcccttcgttggggactccaaatgggtcacagtgtgcttcccaagagtacaaatgaaggaaggatcaaagagaactttaatgttttcgactggtcaatacccgattacatgttcgctaagtttgctgagattgaacaggctaggttagtcactggttccttccttgttcatgagacactaagcccttacaagtctattgaagaattatgggatggcgagatatga

SEQ ID NO: 70899 - protein, 315 aa, Arabidopsis thaliana
  peptide (1)..(315): Ceres Seq. ID no. 3024190
  misc_feature (1)..(315): Homolog of NCBI NO: 30687247 NR Description: aldo/keto reductase family [Arabidopsis thaliana]
  misc_feature (12)..(315): Homolog of NCBI NO: 28393400 NR Description: putative aldo/keto reductase [Arabidopsis
  misc_feature (1)..(289): Homolog of NCBI NO: 7431114 NR Description: aldehyde dehydrogenase homolog At2g37770 - thaliana >gi|3236259|gb|AAC23647.1| putative alcohol
  misc_feature (1)..(315): Homolog of NCBI NO: 30687261 NR Description: aldo/keto reductase family [Arabidopsis thaliana]
  misc_feature (1)..(315): Homolog of NCBI NO: 15232354 NR Description: aldo/keto reductase family; protein id: supported by cDNA: 119862. [Arabidopsis thaliana]
  misc_feature (1)..(288): Homolog of NCBI NO: 25283479 NR Description: probable alcohol dehydrogenase [imported] -
  misc_feature (287)..(315): Homolog of NCBI NO: 25283479 NR Description: probable alcohol dehydrogenase [imported] -
  misc_feature (1)..(315): Homolog of NCBI NO: 13160397 NR Description: aldose reductase [Digitalis purpurea]
  misc_feature (1)..(315): Homolog of NCBI NO: 13160399 NR Description: aldose reductase [Digitalis purpurea]
  misc_feature (1)..(315): Homolog of NCBI NO: 7431112 NR Description: abscisic acid activated protein - alfalfa
MANAITFFKLNTGAKFPSVGLGTWQASPGLVGDAVAAAVKIGYRHIDCAQIYGNEKEIGAVLKKLFEDRVVKREDLFITSKLWCTDHDPQDVPEALNRTLKDLQLEYVDLYLIHWPARIKKGSVGIKPENLLPVDIPSTWKAMEALYDSGKARAIGVSNFSTKKLADLLELARVPPAVNQVECHPSWRQTKLQEFCKSKGVHLSAYSPLGSPGTTWLKSDVLKNPILNMVAEKLGKSPAQVALRWGLQMGHSVLPKSTNEGRIKENFNVFDWSIPDYMFAKFAEIEQARLVTGSFLVHETLSPYKSIEELWDGEI

SEQ ID NO: 70900 - protein, 173 aa, Arabidopsis thaliana
  peptide (1)..(173): Ceres Seq. ID no. 3024191
  misc_feature (1)..(173): Homolog of NCBI NO: 30687247 NR Description: aldo/keto reductase family [Arabidopsis thaliana]
  misc_feature (1)..(173): Homolog of NCBI NO: 28393400 NR Description: putative aldo/keto reductase [Arabidopsis
  misc_feature (1)..(147): Homolog of NCBI NO: 7431114 NR Description: aldehyde dehydrogenase homolog At2g37770 - thaliana >gi|3236259|gb|AAC23647.1| putative alcohol
  misc_feature (1)..(173): Homolog of NCBI NO: 30687261 NR Description: aldo/keto reductase family [Arabidopsis thaliana]
  misc_feature (1)..(173): Homolog of NCBI NO: 15232354 NR Description: aldo/keto reductase family; protein id: supported by cDNA: 119862. [Arabidopsis thaliana]
  misc_feature (1)..(146): Homolog of NCBI NO: 25283479 NR Description: probable alcohol dehydrogenase [imported] -
  misc_feature (145)..(173): Homolog of NCBI NO: 25283479 NR Description: probable alcohol dehydrogenase [imported] -
  misc_feature (1)..(173): Homolog of NCBI NO: 13160397 NR Description: aldose reductase [Digitalis purpurea]
  misc_feature (1)..(173): Homolog of NCBI NO: 13160399 NR Description: aldose reductase [Digitalis purpurea]
  misc_feature (1)..(173): Homolog of NCBI NO: 7431112 NR Description: abscisic acid activated protein - alfalfa
MEALYDSGKARAIGVSNFSTKKLADLLELARVPPAVNQVECHPSWRQTKLQEFCKSKGVHLSAYSPLGSPGTTWLKSDVLKNPILNMVAEKLGKSPAQVALRWGLQMGHSVLPKSTNEGRIKENFNVFDWSIPDYMFAKFAEIEQARLVTGSFLVHETLSPYKSIEELWDGEI

SEQ ID NO: 70901 - DNA, 1116 bp, Arabidopsis thaliana
  misc_feature (1)..(1116): Ceres Seq. ID no. 3024373
  misc_feature: MA Experiment ID: 20001451 Result: Down-regulated in Transcription
  misc_feature: MA Experiment 20001451 PARAMETER Experiment Name: At_Far-red-induction_P Parameter: Age (day) Value: 7
  misc_feature: MA Experiment 20001451 PARAMETER Experiment Name: At_Far-red-induction_P Parameter: Light Value: Far-red vs. White
  misc_feature: MA Experiment 20001451 PARAMETER Experiment Name: At_Far-red-induction_P Parameter: Organism Value: A. thaliana
  misc_feature: MA Experiment 20001451 PARAMETER Experiment Name: At_Far-red-induction_P Parameter: Plant Line Value: Columbia
  misc_feature: MA Experiment 20001451 PARAMETER Experiment Name: At_Far-red-induction_P Parameter: Timepoint (hr) Value: 24
  misc_feature: MA Experiment 20001451 PARAMETER Experiment Name: At_Far-red-induction_P Parameter: Tissue Value: Whole Plant
atgccactattctcccaccgcttcaccaccgcatcttcttcttccccggcgtctccttcttactacaataaaccctcttcgaaaacccataaaccaaactcttcttcttcttcttatacttcgtctcgtattcatgtagctatcatattcttctcccttgtctctgttttcatcggagtcgccggaactatcttcgcactctcctccaccggtcctgcttctgtttatcgatgcggcggatctaaagacacttctcgggttgtgtctgcttcaagaaagctcggaggagatggtggtaataatggtgttgttgttgaaagacgaaagcttttagggtttgttgggatccagactggttttgattccggtgatcgtagaactgctttgagaagtacttggttcccttctgatcctgattctcttctaaggttggaacaagcgactggattagcttttagattcgtcattggaaagtcaaaggatgccaaaaagatggctgagcttgagaaggagataaaagagtacagagattttgtgcttcttgataccgaggaagaatatatacgacttccatataaaacgttggctttcttcaaagcagcttttaaactctttgaagctgattattatgtcaaagccgacgatgacatttatttgagaccagatcgacttgcgacgcttcttgccaatgaaagacttcattcacagacatacattggctgcatgaagaaaggaccagttataactgaccctaaactaaaatggtacgagaaacaaggcaatttgattggaaatgaatactttttacatgcttatggaccgatatacgttctttcagccgagatagtagcttcacttgcagcagctaggaatggcagtctgagaatgtttaataatgaagatgtaactatcggatcttggatgcttgcaatggatgtacatcacgaagacaaccgcgctttatgcgatccgcattgttccccaaagtccatagcagtttgggacattcccaaatgctcagggctttgtgacccggagagtcggttaaaagagcttcataagacggatatgtgctccaagagtccgacattacctcccgatgacatcgatcagtag

SEQ ID NO: 70902 - protein, 371 aa, Arabidopsis thaliana
  peptide (1)..(371): Ceres Seq. ID no. 3024374
  misc_feature (76)..(254): Pfam Name: Galactosyltransferase Pfam Description: Galactosyltransferase
  misc_feature (106)..(354): Homolog of NCBI NO: 15220440 NR Description: putative AVR9 elicitor response protein; protein At1g05170.1, supported by cDNA: gi_14488077 [Arabidopsis
  misc_feature (105)..(354): Homolog of NCBI NO: 7485336 NR Description: hypothetical protein F10M23.280 - Arabidopsis >gi|4455217|emb|CAB36540.1| Avr9 elicitor response like protein thaliana] >gi|7269547|emb|CAB79549.1| Avr9 elicitor response like
  misc_feature (1)..(254): Homolog of NCBI NO: 7487205 NR Description: hypothetical protein At2g26100 [imported] - thaliana >gi|3413704|gb|AAC31227.1| unknown protein [Arabidopsis
  misc_feature (30)..(368): Homolog of NCBI NO: 30695469 NR Description: galactosyltransferase family [Arabidopsis >gi|22135994|gb|AAM91579.1| unknown protein [Arabidopsis
  misc_feature (30)..(368): Homolog of NCBI NO: 25405979 NR Description: protein F12M16.19 [imported] - Arabidopsis >gi|7769857|gb|AAF69535.1|AC008007_10 F12M16.19 [Arabidopsis
  misc_feature (165)..(371): Homolog of NCBI NO: 22553074 NR Description: beta 1,3-glycosyltransferase-like protein III
  misc_feature (38)..(368): Homolog of NCBI NO: 15232447 NR Description: galactosyltransferase, putative; protein id: supported by cDNA: gi_17979336 [Arabidopsis thaliana] contains similarity to Avr9 elicitor response
  misc_feature (294)..(371): Homolog of NCBI NO: 7487205 NR Description: hypothetical protein At2g26100 [imported] - thaliana >gi|3413704|gb|AAC31227.1| unknown protein [Arabidopsis
  misc_feature (1)..(371): Homolog of NCBI NO: 30683005 NR Description: galactosyltransferase family [Arabidopsis
  misc_feature (105)..(354): Homolog of NCBI NO: 18416895 NR Description: Avr9 elicitor response like protein; protein id:
MPLFSHRFTTASSSSPASPSYYNKPSSKTHKPNSSSSSYTSSRIHVAIIFFSLVSVFIGVAGTIFALSSTGPASVYRCGGSKDTSRVVSASRKLGGDGGNNGVVVERRKLLGFVGIQTGFDSGDRRTALRSTWFPSDPDSLLRLEQATGLAFRFVIGKSKDAKKMAELEKEIKEYRDFVLLDTEEEYIRLPYKTLAFFKAAFKLFEADYYVKADDDIYLRPDRLATLLANERLHSQTYIGCMKKGPVITDPKLKWYEKQGNLIGNEYFLHAYGPIYVLSAEIVASLAAARNGSLRMFNNEDVTIGSWMLAMDVHHEDNRALCDPHCSPKSIAVWDIPKCSGLCDPESRLKELHKTDMCSKSPTLPPDDIDQ

SEQ ID NO: 70903 - protein, 207 aa, Arabidopsis thaliana
  peptide (1)..(207): Ceres Seq. ID no. 3024375
  misc_feature (1)..(90): Pfam Name: Galactosyltransferase Pfam Description: Galactosyltransferase
  misc_feature (1)..(207): Homolog of NCBI NO: 30683005 NR Description: galactosyltransferase family [Arabidopsis
  misc_feature (1)..(90): Homolog of NCBI NO: 7487205 NR Description: hypothetical protein At2g26100 [imported] - thaliana >gi|3413704|gb|AAC31227.1| unknown protein [Arabidopsis
  misc_feature (130)..(207): Homolog of NCBI NO: 7487205 NR Description: hypothetical protein At2g26100 [imported] - thaliana >gi|3413704|gb|AAC31227.1| unknown protein [Arabidopsis
  misc_feature (1)..(204): Homolog of NCBI NO: 30695469 NR Description: galactosyltransferase family [Arabidopsis >gi|22135994|gb|AAM91579.1| unknown protein [Arabidopsis
  misc_feature (1)..(204): Homolog of NCBI NO: 15232447 NR Description: galactosyltransferase, putative; protein id: supported by cDNA: gi_17979336 [Arabidopsis thaliana] contains similarity to Avr9 elicitor response
  misc_feature (1)..(204): Homolog of NCBI NO: 25405979 NR Description: protein F12M16.19 [imported] - Arabidopsis >gi|7769857|gb|AAF69535.1|AC008007_10 F12M16.19 [Arabidopsis
  misc_feature (1)..(207): Homolog of NCBI NO: 22553074 NR Description: beta 1,3-glycosyltransferase-like protein III
  misc_feature (1)..(190): Homolog of NCBI NO: 15220440 NR Description: putative AVR9 elicitor response protein; protein At1g05170.1, supported by cDNA: gi_14488077 [Arabidopsis
  misc_feature (1)..(190): Homolog of NCBI NO: 7485336 NR Description: hypothetical protein F10M23.280 - Arabidopsis >gi|4455217|emb|CAB36540.1| Avr9 elicitor response like protein thaliana] >gi|7269547|emb|CAB79549.1| Avr9 elicitor response like
  misc_feature (1)..(190): Homolog of NCBI NO: 18416895 NR Description: Avr9 elicitor response like protein; protein id:
MAELEKEIKEYRDFVLLDTEEEYIRLPYKTLAFFKAAFKLFEADYYVKADDDIYLRPDRLATLLANERLHSQTYIGCMKKGPVITDPKLKWYEKQGNLIGNEYFLHAYGPIYVLSAEIVASLAAARNGSLRMFNNEDVTIGSWMLAMDVHHEDNRALCDPHCSPKSIAVWDIPKCSGLCDPESRLKELHKTDMCSKSPTLPPDDIDQ

SEQ ID NO: 70904 - DNA, 1116 bp, Arabidopsis thaliana
  misc_feature (1)..(1116): Ceres Seq. ID no. 3024541
  misc_feature: MA Experiment ID: 20000315 Result: Down-regulated in Transcription
  misc_feature: MA Experiment 20000315 PARAMETER Experiment Name: At_14day_Shoots-Roots_Sub_P Parameter: Age (day) Value: 14
  misc_feature: MA Experiment 20000315 PARAMETER Experiment Name: At_14day_Shoots-Roots_Sub_P Parameter: Organism Value: A. thaliana
  misc_feature: MA Experiment 20000315 PARAMETER Experiment Name: At_14day_Shoots-Roots_Sub_P Parameter: Plant Line Value: WS
  misc_feature: MA Experiment 20000315 PARAMETER Experiment Name: At_14day_Shoots-Roots_Sub_P Parameter: Tissue Value: Shoots vs. Whole Plant
  misc_feature: MA Experiment ID: 20000355 Result: Up-regulated in Transcription
  misc_feature: MA Experiment 20000355 PARAMETER Experiment Name: At_Siliques_Sub_P Parameter: Age (day) Value: 21
  misc_feature: MA Experiment 20000355 PARAMETER Experiment Name: At_Siliques_Sub_P Parameter: Organism Value: A. thaliana
  misc_feature: MA Experiment 20000355 PARAMETER Experiment Name: At_Siliques_Sub_P Parameter: Plant Line Value: WS
  misc_feature: MA Experiment 20000355 PARAMETER Experiment Name: At_Siliques_Sub_P Parameter: Tissue Value: Less Than 5mm Siliques vs. Whole Plant
  misc_feature: MA Experiment ID: 20000440 Result: Up-regulated in Transcription
  misc_feature: MA Experiment 20000440 PARAMETER Experiment Name: At_Closed-Flower__Sub_P Parameter: Tissue Value: Closed Flower vs. Whole Plant
atgcttctatacttgctcatcacttgtctctctttcttcttcttttccaaatctttatcctttcctcaatgggcatctaaaaccaaaaatttgctctccttctacttctccaagtatttgtttacaaacagtctacaccagatcacacccgatctagcctctccggtgctcggaaaaatgtcaattcttgacctccctgaccttccactcgactgcattcttgaacttcttccaccctctgaactatgtaccatggctagggtctgtagctcgttaagagagagatgtgtaagtgatcatttatgggagaaacacttgaagactaaatggggaaaaatccttggaccttctgctcacaaagaatggcaatgctatctatcttctccatatcatctcgattctcctcatcacaaaactagtcatcttggtttggccaaaatcatatctcttatgcgatcgctttcatccatttttcgagatgatgatcataggaggagatatccatcttcaatccctcttgactctaccatgaacttctacctatccctcgaaacaggtcgcttttggtttccagctcaagtttacaaccgtgagaatggacatgtagggttcatgttgtcatgctatgatgctgagctcagctatgacactgacactaatacttttcaagctaggtatccaccacatggtaaaagagcaattgcggttgaaaaagacgtgacatgggagaggataagagcagctcccgttgatgcatcaccccataatctctatgtgtcagattctctaaatgagttaaaacccggagaccacatagagatccagtggagaaggaacaaagagtttccttatggatggtggtatagtgttgttggacacatggaatcttgtgatggcaatctaaaccattgtcaatgccataatagcgagatgatggtgttggaatttaaccagtacacagtcggatcaaggtggagaaaaacgatgattaacaggagagatcatagagagaaaggtaacgaggaagacgggttctatggaggaattcgaaaaataaattgtaaagaagatattgaaatgtggaagcgtctttggccatcctccatcttggagtag

SEQ ID NO: 70905 - protein, 371 aa, Arabidopsis thaliana
  peptide (1)..(371): Ceres Seq. ID no. 3024542
  misc_feature (1)..(284): Homolog of NCBI NO: 15225802 NR Description: unknown protein; protein id: At2g26850.1
  misc_feature (310)..(371): Homolog of NCBI NO: 15225802 NR Description: unknown protein; protein id: At2g26850.1
  misc_feature (1)..(371): Homolog of NCBI NO: 30685347 NR Description: F-box protein family [Arabidopsis thaliana] unknown protein [Arabidopsis thaliana] unknown protein [Arabidopsis thaliana]
  misc_feature (60)..(285): Homolog of NCBI NO: 7487431 NR Description: hypothetical protein At2g32560 [imported] - thaliana >gi|3298544|gb|AAC25938.1| unknown protein [Arabidopsis
  misc_feature (58)..(371): Homolog of NCBI NO: 34903372 NR Description: unnamed protein product [Oryza sativa (japonica group)] >gi|6498442|dbj|BAA87845.1| unnamed protein product
  misc_feature (59)..(371): Homolog of NCBI NO: 30688559 NR Description: F-box protein family [Arabidopsis thaliana]
  misc_feature (172)..(323): Homolog of NCBI NO: 7459607 NR Description: hypothetical protein At2g41170 [imported] - thaliana >gi|3402701|gb|AAD11995.1| unknown protein [Arabidopsis
  misc_feature (309)..(352): Homolog of NCBI NO: 7459607 NR Description: hypothetical protein At2g41170 [imported] - thaliana >gi|3402701|gb|AAD11995.1| unknown protein [Arabidopsis
  misc_feature (60)..(101): Homolog of NCBI NO: 7459607 NR Description: hypothetical protein At2g41170 [imported] - thaliana >gi|3402701|gb|AAD11995.1| unknown protein [Arabidopsis
  misc_feature (60)..(284): Homolog of NCBI NO: 34909060 NR Description: P0702B09.33 [Oryza sativa (japonica
MLLYLLITCLSFFFFSKSLSFPQWASKTKNLLSFYFSKYLFTNSLHQITPDLASPVLGKMSILDLPDLPLDCILELLPPSELCTMARVCSSLRERCVSDHLWEKHLKTKWGKILGPSAHKEWQCYLSSPYHLDSPHHKTSHLGLAKIISLMRSLSSIFRDDDHRRRYPSSIPLDSTMNFYLSLETGRFWFPAQVYNRENGHVGFMLSCYDAELSYDTDTNTFQARYPPHGKRAIAVEKDVTWERIRAAPVDASPHNLYVSDSLNELKPGDHIEIQWRRNKEFPYGWWYSVVGHMESCDGNLNHCQCHNSEMMVLEFNQYTVGSRWRKTMINRRDHREKGNEEDGFYGGIRKINCKEDIEMWKRLWPSSILE

SEQ ID NO: 70906 - protein, 312 aa, Arabidopsis thaliana
  peptide (1)..(312): Ceres Seq. ID no. 3024543
  misc_feature (1)..(225): Homolog of NCBI NO: 15225802 NR Description: unknown protein; protein id: At2g26850.1
  misc_feature (251)..(312): Homolog of NCBI NO: 15225802 NR Description: unknown protein; protein id: At2g26850.1
  misc_feature (1)..(312): Homolog of NCBI NO: 30685347 NR Description: F-box protein family [Arabidopsis thaliana] unknown protein [Arabidopsis thaliana] unknown protein [Arabidopsis thaliana]
  misc_feature (1)..(226): Homolog of NCBI NO: 7487431 NR Description: hypothetical protein At2g32560 [imported] - thaliana >gi|3298544|gb|AAC25938.1| unknown protein [Arabidopsis
  misc_feature (1)..(312): Homolog of NCBI NO: 34903372 NR Description: unnamed protein product [Oryza sativa (japonica group)] >gi|6498442|dbj|BAA87845.1| unnamed protein product
  misc_feature (1)..(312): Homolog of NCBI NO: 30688559 NR Description: F-box protein family [Arabidopsis thaliana]
  misc_feature (113)..(264): Homolog of NCBI NO: 7459607 NR Description: hypothetical protein At2g41170 [imported] - thaliana >gi|3402701|gb|AAD11995.1| unknown protein [Arabidopsis
  misc_feature (250)..(293): Homolog of NCBI NO: 7459607 NR Description: hypothetical protein At2g41170 [imported] - thaliana >gi|3402701|gb|AAD11995.1| unknown protein [Arabidopsis
  misc_feature (1)..(42): Homolog of NCBI NO: 7459607 NR Description: hypothetical protein At2g41170 [imported] - thaliana >gi|3402701|gb|AAD11995.1| unknown protein [Arabidopsis
  misc_feature (1)..(225): Homolog of NCBI NO: 34909060 NR Description: P0702B09.33 [Oryza sativa (japonica
MSILDLPDLPLDCILELLPPSELCTMARVCSSLRERCVSDHLWEKHLKTKWGKILGPSAHKEWQCYLSSPYHLDSPHHKTSHLGLAKIISLMRSLSSIFRDDDHRRRYPSSIPLDSTMNFYLSLETGRFWFPAQVYNRENGHVGFMLSCYDAELSYDTDTNTFQARYPPHGKRAIAVEKDVTWERIRAAPVDASPHNLYVSDSLNELKPGDHIEIQWRRNKEFPYGWWYSVVGHMESCDGNLNHCQCHNSEMMVLEFNQYTVGSRWRKTMINRRDHREKGNEEDGFYGGIRKINCKEDIEMWKRLWPSSILE

SEQ ID NO: 70907 - protein, 287 aa, Arabidopsis thaliana
  peptide (1)..(287): Ceres Seq. ID no. 3024544
  misc_feature (1)..(200): Homolog of NCBI NO: 15225802 NR Description: unknown protein; protein id: At2g26850.1
  misc_feature (226)..(287): Homolog of NCBI NO: 15225802 NR Description: unknown protein; protein id: At2g26850.1
  misc_feature (1)..(287): Homolog of NCBI NO: 30685347 NR Description: F-box protein family [Arabidopsis thaliana] unknown protein [Arabidopsis thaliana] unknown protein [Arabidopsis thaliana]
  misc_feature (1)..(201): Homolog of NCBI NO: 7487431 NR Description: hypothetical protein At2g32560 [imported] - thaliana >gi|3298544|gb|AAC25938.1| unknown protein [Arabidopsis
  misc_feature (1)..(287): Homolog of NCBI NO: 34903372 NR Description: unnamed protein product [Oryza sativa (japonica group)] >gi|6498442|dbj|BAA87845.1| unnamed protein product
  misc_feature (1)..(287): Homolog of NCBI NO: 30688559 NR Description: F-box protein family [Arabidopsis thaliana]
  misc_feature (88)..(239): Homolog of NCBI NO: 7459607 NR Description: hypothetical protein At2g41170 [imported] - thaliana >gi|3402701|gb|AAD11995.1| unknown protein [Arabidopsis
  misc_feature (225)..(268): Homolog of NCBI NO: 7459607 NR Description: hypothetical protein At2g41170 [imported] - thaliana >gi|3402701|gb|AAD11995.1| unknown protein [Arabidopsis
  misc_feature (1)..(17): Homolog of NCBI NO: 7459607 NR Description: hypothetical protein At2g41170 [imported] - thaliana >gi|3402701|gb|AAD11995.1| unknown protein [Arabidopsis
  misc_feature (1)..(200): Homolog of NCBI NO: 34909060 NR Description: P0702B09.33 [Oryza sativa (japonica
MARVCSSLRERCVSDHLWEKHLKTKWGKILGPSAHKEWQCYLSSPYHLDSPHHKTSHLGLAKIISLMRSLSSIFRDDDHRRRYPSSIPLDSTMNFYLSLETGRFWFPAQVYNRENGHVGFMLSCYDAELSYDTDTNTFQARYPPHGKRAIAVEKDVTWERIRAAPVDASPHNLYVSDSLNELKPGDHIEIQWRRNKEFPYGWWYSVVGHMESCDGNLNHCQCHNSEMMVLEFNQYTVGSRWRKTMINRRDHREKGNEEDGFYGGIRKINCKEDIEMWKRLWPSSILE

SEQ ID NO: 70908 - DNA, 711 bp, Arabidopsis thaliana
  misc_feature (1)..(711): Ceres Seq. ID no. 3024551
  misc_feature: MA Experiment ID: 20000173 Result: Down-regulated in Transcription
  misc_feature: MA Experiment 20000173 PARAMETER Experiment Name: At_42deg_Heat_P Parameter: Age (day) Value: 14
  misc_feature: MA Experiment 20000173 PARAMETER Experiment Name: At_42deg_Heat_P Parameter: Organism Value: A. thaliana
  misc_feature: MA Experiment 20000173 PARAMETER Experiment Name: At_42deg_Heat_P Parameter: Plant Line Value: WS
  misc_feature: MA Experiment 20000173 PARAMETER Experiment Name: At_42deg_Heat_P Parameter: Temperature (deg C) Value: 42 vs. 22
  misc_feature: MA Experiment 20000173 PARAMETER Experiment Name: At_42deg_Heat_P Parameter: Timepoint (hr) Value: 6
  misc_feature: MA Experiment 20000173 PARAMETER Experiment Name: At_42deg_Heat_P Parameter: Tissue Value: Aerial
  misc_feature: MA Experiment ID: 20000184 Result: Down-regulated in Transcription
  misc_feature: MA Experiment 20000184 PARAMETER Experiment Name: At_Shoots__P Parameter: Age (day) Value: 7
  misc_feature: MA Experiment 20000184 PARAMETER Experiment Name: At_Shoots__P Parameter: Tissue Value: Shoots vs. Whole Plant
  misc_feature: MA Experiment ID: 20000443 Result: Down-regulated in Transcription
  misc_feature: MA Experiment 20000443 PARAMETER Experiment Name: At_1uM_BR-BRZ__P Parameter: Tissue Value: Shoot Apices
  misc_feature: MA Experiment 20000443 PARAMETER Experiment Name: At_1uM_BR-BRZ__P Parameter: Treatment Value: 1uM BRZ vs. No Treatment
  misc_feature: MA Experiment ID: 20000495 Result: Up-regulated in Transcription
  misc_feature: MA Experiment 20000495 PARAMETER Experiment Name: At_Guard_Cells_P Parameter: Harvest Date Value: 8/2/2002
  misc_feature: MA Experiment 20000495 PARAMETER Experiment Name: At_Guard_Cells_P Parameter: Organism Value: A. thaliana
  misc_feature: MA Experiment 20000495 PARAMETER Experiment Name: At_Guard_Cells_P Parameter: Tissue Value: Guard Cells vs. Leaves
atgggtttggtctgctctaaaaatctaattacttttcacagttccgacggaaccgccgcagctgtagtcatcaacaagcgcaattctctaacaaattatcagttgacgaagtttacgtttggttctcatgttcttgagctctactgtctccaatcagcttcaactgattttgatttaacagggcagctggtttggcctggtgcgatgcttatgaatggttatctctcagaaaatgctgacattctccagggatgttcagttttggagttgggatctggcgttggtataactggagtcctatgtagcaaattttgccgtaaaatactgaagaaaaacattgaccttcatggacattcaagtggtcccaaaccctcagctgaattagaggctgcaaagcttgaatggggaaatagtgatcagcttggtcaaattttaaagaaacacaatgatggctttgatcttattcttggagctgagatctatatccttattgttgagcagcttctgcggatcaggggacaaggaaactgcaaattcatactagcatacgtatcacgggctagacagatggattctgcaatcttgagagaaggcgctcagcacgggatgctgatgaatgaagtttctgggactcggtgtaccgtaggaaacttggaaggggtcatatatgaaatcacacttcaaaagaagagaggaattgtgttcgagtaa

SEQ ID NO: 70909 - protein, 236 aa, Arabidopsis thaliana
  peptide (1)..(236): Ceres Seq. ID no. 3024552
  misc_feature (32)..(160): Homolog of NCBI NO: 26449997 NR Description: unknown protein [Arabidopsis thaliana]
  misc_feature (107)..(236): Homolog of NCBI NO: 26449997 NR Description: unknown protein [Arabidopsis thaliana]
  misc_feature (109)..(236): Homolog of NCBI NO: 30683273 NR Description: expressed protein [Arabidopsis thaliana]
  misc_feature (32)..(160): Homolog of NCBI NO: 33146643 NR Description: unknown protein [Oryza sativa (japonica
  misc_feature (109)..(189): Homolog of NCBI NO: 7460191 NR Description: hypothetical protein At2g26810 [imported] - thaliana >gi|3426045|gb|AAC32244.1| hypothetical protein
  misc_feature (107)..(228): Homolog of NCBI NO: 33146643 NR Description: unknown protein [Oryza sativa (japonica
  misc_feature (32)..(114): Homolog of NCBI NO: 7460191 NR Description: hypothetical protein At2g26810 [imported] - thaliana >gi|3426045|gb|AAC32244.1| hypothetical protein
  misc_feature (32)..(114): Homolog of NCBI NO: 30683273 NR Description: expressed protein [Arabidopsis thaliana]
MGLVCSKNLITFHSSDGTAAAVVINKRNSLTNYQLTKFTFGSHVLELYCLQSASTDFDLTGQLVWPGAMLMNGYLSENADILQGCSVLELGSGVGITGVLCSKFCRKILKKNIDLHGHSSGPKPSAELEAAKLEWGNSDQLGQILKKHNDGFDLILGAEIYILIVEQLLRIRGQGNCKFILAYVSRARQMDSAILREGAQHGMLMNEVSGTRCTVGNLEGVIYEITLQKKRGIVFE

SEQ ID NO: 70910 - protein, 168 aa, Arabidopsis thaliana
  peptide (1)..(168): Ceres Seq. ID no. 3024553
  misc_feature (1)..(92): Homolog of NCBI NO: 26449997 NR Description: unknown protein [Arabidopsis thaliana]
  misc_feature (39)..(168): Homolog of NCBI NO: 26449997 NR Description: unknown protein [Arabidopsis thaliana]
  misc_feature (41)..(168): Homolog of NCBI NO: 30683273 NR Description: expressed protein [Arabidopsis thaliana]
  misc_feature (1)..(92): Homolog of NCBI NO: 33146643 NR Description: unknown protein [Oryza sativa (japonica
  misc_feature (41)..(121): Homolog of NCBI NO: 7460191 NR Description: hypothetical protein At2g26810 [imported] - thaliana >gi|3426045|gb|AAC32244.1| hypothetical protein
  misc_feature (39)..(160): Homolog of NCBI NO: 33146643 NR Description: unknown protein [Oryza sativa (japonica
  misc_feature (1)..(46): Homolog of NCBI NO: 7460191 NR Description: hypothetical protein At2g26810 [imported] - thaliana >gi|3426045|gb|AAC32244.1| hypothetical protein
  misc_feature (1)..(46): Homolog of NCBI NO: 30683273 NR Description: expressed protein [Arabidopsis thaliana]
MLMNGYLSENADILQGCSVLELGSGVGITGVLCSKFCRKILKKNIDLHGHSSGPKPSAELEAAKLEWGNSDQLGQILKKHNDGFDLILGAEIYILIVEQLLRIRGQGNCKFILAYVSRARQMDSAILREGAQHGMLMNEVSGTRCTVGNLEGVIYEITLQKKRGIVFE

SEQ ID NO: 70911 - protein, 166 aa, Arabidopsis thaliana
  peptide (1)..(166): Ceres Seq. ID no. 3024554
  misc_feature (1)..(90): Homolog of NCBI NO: 26449997 NR Description: unknown protein [Arabidopsis thaliana]
  misc_feature (37)..(166): Homolog of NCBI NO: 26449997 NR Description: unknown protein [Arabidopsis thaliana]
  misc_feature (39)..(166): Homolog of NCBI NO: 30683273 NR Description: expressed protein [Arabidopsis thaliana]
  misc_feature (1)..(90): Homolog of NCBI NO: 33146643 NR Description: unknown protein [Oryza sativa (japonica
  misc_feature (39)..(119): Homolog of NCBI NO: 7460191 NR Description: hypothetical protein At2g26810 [imported] - thaliana >gi|3426045|gb|AAC32244.1| hypothetical protein
  misc_feature (37)..(158): Homolog of NCBI NO: 33146643 NR Description: unknown protein [Oryza sativa (japonica
  misc_feature (1)..(44): Homolog of NCBI NO: 7460191 NR Description: hypothetical protein At2g26810 [imported] - thaliana >gi|3426045|gb|AAC32244.1| hypothetical protein
  misc_feature (1)..(44): Homolog of NCBI NO: 30683273 NR Description: expressed protein [Arabidopsis thaliana]
MNGYLSENADILQGCSVLELGSGVGITGVLCSKFCRKILKKNIDLHGHSSGPKPSAELEAAKLEWGNSDQLGQILKKHNDGFDLILGAEIYILIVEQLLRIRGQGNCKFILAYVSRARQMDSAILREGAQHGMLMNEVSGTRCTVGNLEGVIYEITLQKKRGIVFE

SEQ ID NO: 70912 - DNA, 756 bp, Arabidopsis thaliana
  misc_feature (1)..(756): Ceres Seq. ID no. 3024708
  misc_feature: MA Experiment ID: 20000307 Result: Up-regulated in Transcription
  misc_feature: MA Experiment 20000307 PARAMETER Experiment Name: At_Germinating_Seeds_Sub_P Parameter: Age (hr) Value: 24 vs. 0
  misc_feature: MA Experiment 20000307 PARAMETER Experiment Name: At_Germinating_Seeds_Sub_P Parameter: Organism Value: A. thaliana
  misc_feature: MA Experiment 20000307 PARAMETER Experiment Name: At_Germinating_Seeds_Sub_P Parameter: Plant Line Value: WS
  misc_feature: MA Experiment 20000307 PARAMETER Experiment Name: At_Germinating_Seeds_Sub_P Parameter: Tissue Value: Germinating Seeds
  misc_feature: MA Experiment ID: 20000314 Result: Up-regulated in Transcription
  misc_feature: MA Experiment 20000314 PARAMETER Experiment Name: At_14day_Shoots-Roots_Sub_P Parameter: Age (day) Value: 14
  misc_feature: MA Experiment 20000314 PARAMETER Experiment Name: At_14day_Shoots-Roots_Sub_P Parameter: Organism Value: A. thaliana
  misc_feature: MA Experiment 20000314 PARAMETER Experiment Name: At_14day_Shoots-Roots_Sub_P Parameter: Plant Line Value: WS
  misc_feature: MA Experiment 20000314 PARAMETER Experiment Name: At_14day_Shoots-Roots_Sub_P Parameter: Tissue Value: Roots vs. Whole Plant
atggctgaacaaaagaagtacctattgtttctagcgacaccggactcggagtttgcgaagaagacatatggaggataccataatgtgtttgtttcactgcttggcgatgaaggagagcaatgggactcttttagagtcgtggacggcgagtttccagaagagaaggatcttgagaaatacgaaggatttgtaatcagtggtagctctcatgatgcctttcaagacactgattggatcttaaagctctgtgatatcatcaagaaactcgatgacatgaacaagaaagtcctcggtatttgctttggccaccagctaatagctagagcgaagggaggcaaagtagcgagagcaaggaaaggaccagagctttgccttggaaacataaccatcgtgaaagaggcagtgatgccggaaaattacttcggcgaagaagttccagcgaatctgaggatcataaaatgtcatcaggatgaagttttggagcttccggaaaatgcaaaactgttagcatattcaagcatgtacgaggtagagatgtattcaatcaaagataacttcctttgcattcagggacatcctgagtataaccgtgacatcttgttcgatatcattgatcgtgttcttgccggaggccacattaagcaaaactttgccgaaacgtcaaaggcaacaatggaaaagaatgaagcagacaggaagttttggcagaaaatttgcaaaaacttcctcaaacgtcaaccctccttattagtttga

SEQ ID NO: 70913 - protein, 251 aa, Arabidopsis thaliana
  peptide (1)..(251): Ceres Seq. ID no. 3024709
  misc_feature (1)..(217): Homolog of NCBI NO: 15224078 NR Description: unknown protein; protein id: At2g23960.1
  misc_feature (1)..(248): Homolog of NCBI NO: 15234763 NR Description: putative protein; protein id: At4g30530.1, by cDNA: 37987., supported by cDNA: gi_15294151, supported by gi_20147268 [Arabidopsis thaliana] >gi|25407655|pir||B85357
  misc_feature (1)..(248): Homolog of NCBI NO: 21593315 NR Description: defense-related protein [Arabidopsis thaliana]
  misc_feature (1)..(248): Homolog of NCBI NO: 14009290 NR Description: defense-related protein [Brassica carinata]
  misc_feature (3)..(244): Homolog of NCBI NO: 15234767 NR Description: putative protein; protein id: At4g30550.1, by cDNA: 29388., supported by cDNA: gi_17381293 [Arabidopsis >gi|25407659|pir||D85357 hypothetical protein AT4g30550
  misc_feature (3)..(244): Homolog of NCBI NO: 17381294 NR Description: AT4g30550/F17I23_110 [Arabidopsis thaliana]
  misc_feature (3)..(244): Homolog of NCBI NO: 15224079 NR Description: unknown protein; protein id: At2g23970.1
  misc_feature (3)..(244): Homolog of NCBI NO: 21555885 NR Description: unknown [Arabidopsis thaliana]
  misc_feature (1)..(244): Homolog of NCBI NO: 15234765 NR Description: putative protein; protein id: At4g30540.1
  misc_feature (7)..(244): Homolog of NCBI NO: 13174241 NR Description: putative glutamine synthetase [Oryza sativa]
MAEQKKYLLFLATPDSEFAKKTYGGYHNVFVSLLGDEGEQWDSFRVVDGEFPEEKDLEKYEGFVISGSSHDAFQDTDWILKLCDIIKKLDDMNKKVLGICFGHQLIARAKGGKVARARKGPELCLGNITIVKEAVMPENYFGEEVPANLRIIKCHQDEVLELPENAKLLAYSSMYEVEMYSIKDNFLCIQGHPEYNRDILFDIIDRVLAGGHIKQNFAETSKATMEKNEADRKFWQKICKNFLKRQPSLLV

SEQ ID NO: 70914 - protein, 160 aa, Arabidopsis thaliana
  peptide (1)..(160): Ceres Seq. ID no. 3024710
  misc_feature (1)..(126): Homolog of NCBI NO: 15224078 NR Description: unknown protein; protein id: At2g23960.1
  misc_feature (1)..(157): Homolog of NCBI NO: 15234763 NR Description: putative protein; protein id: At4g30530.1, by cDNA: 37987., supported by cDNA: gi_15294151, supported by gi_20147268 [Arabidopsis thaliana] >gi|25407655|pir||B85357
  misc_feature (1)..(157): Homolog of NCBI NO: 21593315 NR Description: defense-related protein [Arabidopsis thaliana]
  misc_feature (1)..(157): Homolog of NCBI NO: 14009290 NR Description: defense-related protein [Brassica carinata]
  misc_feature (1)..(153): Homolog of NCBI NO: 15234767 NR Description: putative protein; protein id: At4g30550.1, by cDNA: 29388., supported by cDNA: gi_17381293 [Arabidopsis >gi|25407659|pir||D85357 hypothetical protein AT4g30550
  misc_feature (1)..(153): Homolog of NCBI NO: 17381294 NR Description: AT4g30550/F17I23_110 [Arabidopsis thaliana]
  misc_feature (1)..(153): Homolog of NCBI NO: 15224079 NR Description: unknown protein; protein id: At2g23970.1
  misc_feature (1)..(153): Homolog of NCBI NO: 21555885 NR Description: unknown [Arabidopsis thaliana]
  misc_feature (1)..(153): Homolog of NCBI NO: 15234765 NR Description: putative protein; protein id: At4g30540.1
  misc_feature (1)..(153): Homolog of NCBI NO: 13174241 NR Description: putative glutamine synthetase [Oryza sativa]
MNKKVLGICFGHQLIARAKGGKVARARKGPELCLGNITIVKEAVMPENYFGEEVPANLRIIKCHQDEVLELPENAKLLAYSSMYEVEMYSIKDNFLCIQGHPEYNRDILFDIIDRVLAGGHIKQNFAETSKATMEKNEADRKFWQKICKNFLKRQPSLLV

SEQ ID NO: 70915 - DNA, 648 bp, Arabidopsis thaliana
  misc_feature (1)..(648): Ceres Seq. ID no. 3025082
  misc_feature: MA Experiment ID: 20000314 Result: Up-regulated in Transcription
  misc_feature: MA Experiment 20000314 PARAMETER Experiment Name: At_14day_Shoots-Roots_Sub_P Parameter: Age (day) Value: 14
  misc_feature: MA Experiment 20000314 PARAMETER Experiment Name: At_14day_Shoots-Roots_Sub_P Parameter: Organism Value: A. thaliana
  misc_feature: MA Experiment 20000314 PARAMETER Experiment Name: At_14day_Shoots-Roots_Sub_P Parameter: Plant Line Value: WS
  misc_feature: MA Experiment 20000314 PARAMETER Experiment Name: At_14day_Shoots-Roots_Sub_P Parameter: Tissue Value: Roots vs. Whole Plant
  misc_feature: MA Experiment ID: 20000315 Result: Down-regulated in Transcription
  misc_feature: MA Experiment 20000315 PARAMETER Experiment Name: At_14day_Shoots-Roots_Sub_P Parameter: Age (day) Value: 14
  misc_feature: MA Experiment 20000315 PARAMETER Experiment Name: At_14day_Shoots-Roots_Sub_P Parameter: Organism Value: A. thaliana
  misc_feature: MA Experiment 20000315 PARAMETER Experiment Name: At_14day_Shoots-Roots_Sub_P Parameter: Plant Line Value: WS
  misc_feature: MA Experiment 20000315 PARAMETER Experiment Name: At_14day_Shoots-Roots_Sub_P Parameter: Tissue Value: Shoots vs. Whole Plant
  misc_feature: MA Experiment ID: 20000440 Result: Down-regulated in Transcription
  misc_feature: MA Experiment 20000440 PARAMETER Experiment Name: At_Closed-Flower__Sub_P Parameter: Tissue Value: Closed Flower vs. Whole Plant
atggcgaagttgaagctctactcttactggagaagctcatgtgctcatcgcgtccgtatcgccctcactttaaaagggcttgattatgaatatataccggttaatttgctcaaaggggatcaatccgattcagatttcaagaagatcaatccaatgggcactgtaccagcgcttgttgatggtgatgttgtgattaatgactctttcgcaataataatgtacctggatgataagtatccggagccaccgctgttaccaagtgactaccataaacgggcggtaaattaccaggcgacgagtattgtcatgtctggtatacagcctcatcaaaatatggctctttttaggtatctcgaggacaagataaatgctgaggagaaaactgcttggattactaatgctatcacaaaaggattcacagctctcgagaaactgttggtgagttgcgctggaaaatacgcgactggtgatgaagtttacttggctgatcttttcctagcaccacagatccacgcagcattcaacagattccatattaacatggaaccattcccgactcttgcaaggttttacgagtcatacaacgaactgcctgcatttcaaaatgcagtcccggagaagcaaccagatactccttccaccatctga

SEQ ID NO: 70916 - protein, 215 aa, Arabidopsis thaliana
  peptide (1)..(215): Ceres Seq. ID no. 3025083
  misc_feature (2)..(215): Homolog of NCBI NO: 15226949 NR Description: glutathione transferase, putative; protein id:
  misc_feature (3)..(214): Homolog of NCBI NO: 15226952 NR Description: glutathione transferase, putative; protein id: supported by cDNA: gi_11095997, supported by cDNA: gi_15450462, by cDNA: gi_16974448 [Arabidopsis thaliana]
  misc_feature (3)..(214): Homolog of NCBI NO: 30677995 NR Description: glutathione transferase, putative [Arabidopsis
  misc_feature (3)..(214): Homolog of NCBI NO: 28932694 NR Description: glutathione S-transferase zeta [Brassica napus]
  misc_feature (3)..(214): Homolog of NCBI NO: 28932698 NR Description: glutathione S-transferase zeta [Brassica napus]
  misc_feature (3)..(213): Homolog of NCBI NO: 11132235 NR Description: Glutathione S-transferase zeta class
  misc_feature (3)..(214): Homolog of NCBI NO: 29420155 NR Description: glutathione S-transferase Z1 [Malva pusilla]
  misc_feature (3)..(213): Homolog of NCBI NO: 24061762 NR Description: glutathione S-transferase [Capsicum annuum]
MAKLKLYSYWRSSCAHRVRIALTLKGLDYEYIPVNLLKGDQSDSDFKKINPMGTVPALVDGDVVINDSFAIIMYLDDKYPEPPLLPSDYHKRAVNYQATSIVMSGIQPHQNMALFRYLEDKINAEEKTAWITNAITKGFTALEKLLVSCAGKYATGDEVYLADLFLAPQIHAAFNRFHINMEPFPTLARFYESYNELPAFQNAVPEKQPDTPSTI

SEQ ID NO: 70917 - protein, 164 aa, Arabidopsis thaliana; identical to SEQ ID NO: 70468
  peptide (1)..(164): Ceres Seq. ID no. 3025084
  misc_feature (1)..(164): Homolog of NCBI NO: 15226949 NR Description: glutathione transferase, putative; protein id:
  misc_feature (1)..(163): Homolog of NCBI NO: 15226952 NR Description: glutathione transferase, putative; protein id: supported by cDNA: gi_11095997, supported by cDNA: gi_15450462, by cDNA: gi_16974448 [Arabidopsis thaliana]
  misc_feature (1)..(163): Homolog of NCBI NO: 30677995 NR Description: glutathione transferase, putative [Arabidopsis
  misc_feature (1)..(163): Homolog of NCBI NO: 28932694 NR Description: glutathione S-transferase zeta [Brassica napus]
  misc_feature (1)..(163): Homolog of NCBI NO: 28932698 NR Description: glutathione S-transferase zeta [Brassica napus]
  misc_feature (1)..(162): Homolog of NCBI NO: 11132235 NR Description: Glutathione S-transferase zeta class
  misc_feature (1)..(163): Homolog of NCBI NO: 29420155 NR Description: glutathione S-transferase Z1 [Malva pusilla]
  misc_feature (1)..(162): Homolog of NCBI NO: 24061762 NR Description: glutathione S-transferase [Capsicum annuum]

SEQ ID NO: 70918 - protein, 143 aa, Arabidopsis thaliana; identical to SEQ ID NO: 70469
  peptide (1)..(143): Ceres Seq. ID no. 3025085
  misc_feature (1)..(143): Homolog of NCBI NO: 15226949 NR Description: glutathione transferase, putative; protein id:
  misc_feature (1)..(142): Homolog of NCBI NO: 15226952 NR Description: glutathione transferase, putative; protein id: supported by cDNA: gi_11095997, supported by cDNA: gi_15450462, by cDNA: gi_16974448 [Arabidopsis thaliana]
  misc_feature (1)..(142): Homolog of NCBI NO: 30677995 NR Description: glutathione transferase, putative [Arabidopsis
  misc_feature (1)..(142): Homolog of NCBI NO: 28932694 NR Description: glutathione S-transferase zeta [Brassica napus]
  misc_feature (1)..(142): Homolog of NCBI NO: 28932698 NR Description: glutathione S-transferase zeta [Brassica napus]
  misc_feature (1)..(141): Homolog of NCBI NO: 11132235 NR Description: Glutathione S-transferase zeta class
  misc_feature (1)..(142): Homolog of NCBI NO: 29420155 NR Description: glutathione S-transferase Z1 [Malva pusilla]
  misc_feature (1)..(141): Homolog of NCBI NO: 24061762 NR Description: glutathione S-transferase [Capsicum annuum]

SEQ ID NO: 70919 - DNA, 924 bp, Arabidopsis thaliana
  misc_feature (1)..(924): Ceres Seq. ID no. 3025181
  misc_feature: MA Experiment ID: 20000328 Result: Up-regulated in Transcription
  misc_feature: MA Experiment 20000328 PARAMETER Experiment Name: At_42deg_Heat_Sub_P Parameter: Age (day) Value: 14
  misc_feature: MA Experiment 20000328 PARAMETER Experiment Name: At_42deg_Heat_Sub_P Parameter: Organism Value: A. thaliana
  misc_feature: MA Experiment 20000328 PARAMETER Experiment Name: At_42deg_Heat_Sub_P Parameter: Plant Line Value: WS
  misc_feature: MA Experiment 20000328 PARAMETER Experiment Name: At_42deg_Heat_Sub_P Parameter: Temperature (deg C) Value: 42 vs. 22
  misc_feature: MA Experiment 20000328 PARAMETER Experiment Name: At_42deg_Heat_Sub_P Parameter: Timepoint (hr) Value: 6
  misc_feature: MA Experiment 20000328 PARAMETER Experiment Name: At_42deg_Heat_Sub_P Parameter: Tissue Value: Aerial
atggaccgagaagcagtaaaggatcaatacgacatccttatcgacctggaaggatcagtagggactcaaagcgacattgttctgaggtggactcagaccagattatctctttacttcaggcttcttcaacggatgagcttaacgctgtcttctccaggatcgtcaccaccatcctcgccgacagcaccccgagctgatgaagtgaataaagaggtgaattcatgggttgaagagcagacaaatggactcatcactgatcttcttccaccaaactctgcttctcctttgactgatctcatatttgctaatgccttgtttttcaacggaagatgggatagtcaattcaatccatcgctaacaaaagaatccgactttcaccttcttgatggaaccaaagtacgtgtgcccttcatgaccggtgcccacgaagacagtcttgatgtttacgaagctttcaaagtcctcaatctaccgtatagagaaggacgcgaagacagtcgtggtttctctatgcaaatctatctccctgatgagaaagatgggttgccttcaatgctggagagcttagcttctactcgtggattcttgaaggacaacaaggttcttcctagccagaaggcgggtgtcaaggaactcaagattccaaggtttaaatttgcttttgatttcgaagcctcgaaagctctcaagggtttgggtttgaaggtgccattgtctacgatcatccacaagtcttgcatcgaggtcgatgaagtgggatcgaaagctgcagctgctgccgcattaagatcatgtggaggttgttattttccgccaaagaagtatgacttcgtggctgatcatccttttctcttcatcgtcaaagagtacataagcggactagttttgtttcttggtcatgtcatggatccttctaagcactaa

SEQ ID NO: 70920 - protein, 307 aa, Arabidopsis thaliana
  peptide (1)..(307): Ceres Seq. ID no. 3025182
  misc_feature (64)..(239): Homolog of NCBI NO: 15220298 NR Description: serpin, putative; protein id: At1g47710.1
  misc_feature (232)..(304): Homolog of NCBI NO: 15220298 NR Description: serpin, putative; protein id: At1g47710.1
  misc_feature (66)..(305): Homolog of NCBI NO: 6692102 NR Description: F22C12.21 [Arabidopsis thaliana]
  misc_feature (30)..(239): Homolog of NCBI NO: 26224736 NR Description: serpin-like protein [Citrus x paradisi]
  misc_feature (232)..(304): Homolog of NCBI NO: 26224736 NR Description: serpin-like protein [Citrus x paradisi]
  misc_feature (64)..(305): Homolog of NCBI NO: 15220721 NR Description: phloem serpin-1, putative; protein id:
  misc_feature (64)..(305): Homolog of NCBI NO: 25404364 NR Description: hypothetical protein F19K23.10 [imported] - thaliana >gi|2160141|gb|AAB60763.1| Strong similarity to Triticum
  misc_feature (68)..(307): Homolog of NCBI NO: 15227450 NR Description: putative serpin; protein id: At2g35590.1
  misc_feature (1)..(64): Homolog of NCBI NO: 15227450 NR Description: putative serpin; protein id: At2g35590.1
  misc_feature (64)..(307): Homolog of NCBI NO: 15227449 NR Description: putative serpin; protein id: At2g35580.1
MDREAVKDQYDILIDLEGSVGTQSDIVLRWTQTRLSLYFRLLQRMSLTLSSPGSSPPSSPTAPRADEVNKEVNSWVEEQTNGLITDLLPPNSASPLTDLIFANALFFNGRWDSQFNPSLTKESDFHLLDGTKVRVPFMTGAHEDSLDVYEAFKVLNLPYREGREDSRGFSMQIYLPDEKDGLPSMLESLASTRGFLKDNKVLPSQKAGVKELKIPRFKFAFDFEASKALKGLGLKVPLSTIIHKSCIEVDEVGSKAAAAAALRSCGGCYFPPKKYDFVADHPFLFIVKEYISGLVLFLGHVMDPSKH

SEQ ID NO: 70921 - protein, 263 aa, Arabidopsis thaliana
  peptide (1)..(263): Ceres Seq. ID no. 3025183
  misc_feature (24)..(263): Homolog of NCBI NO: 15227450 NR Description: putative serpin; protein id: At2g35590.1
  misc_feature (1)..(20): Homolog of NCBI NO: 15227450 NR Description: putative serpin; protein id: At2g35590.1
  misc_feature (20)..(263): Homolog of NCBI NO: 15227449 NR Description: putative serpin; protein id: At2g35580.1
  misc_feature (20)..(195): Homolog of NCBI NO: 15220298 NR Description: serpin, putative; protein id: At1g47710.1
  misc_feature (188)..(260): Homolog of NCBI NO: 15220298 NR Description: serpin, putative; protein id: At1g47710.1
  misc_feature (22)..(261): Homolog of NCBI NO: 6692102 NR Description: F22C12.21 [Arabidopsis thaliana]
  misc_feature (1)..(195): Homolog of NCBI NO: 26224736 NR Description: serpin-like protein [Citrus x paradisi]
  misc_feature (188)..(260): Homolog of NCBI NO: 26224736 NR Description: serpin-like protein [Citrus x paradisi]
  misc_feature (20)..(261): Homolog of NCBI NO: 15220721 NR Description: phloem serpin-1, putative; protein id:
  misc_feature (20)..(261): Homolog of NCBI NO: 25404364 NR Description: hypothetical protein F19K23.10 [imported] - thaliana >gi|2160141|gb|AAB60763.1| Strong similarity to Triticum
MSLTLSSPGSSPPSSPTAPRADEVNKEVNSWVEEQTNGLITDLLPPNSASPLTDLIFANALFFNGRWDSQFNPSLTKESDFHLLDGTKVRVPFMTGAHEDSLDVYEAFKVLNLPYREGREDSRGFSMQIYLPDEKDGLPSMLESLASTRGFLKDNKVLPSQKAGVKELKIPRFKFAFDFEASKALKGLGLKVPLSTIIHKSCIEVDEVGSKAAAAAALRSCGGCYFPPKKYDFVADHPFLFIVKEYISGLVLFLGHVMDPSKH

SEQ ID NO: 70922 - protein, 170 aa, Arabidopsis thaliana
  peptide (1)..(170): Ceres Seq. ID no. 3025184
  misc_feature (1)..(170): Homolog of NCBI NO: 15227450 NR Description: putative serpin; protein id: At2g35590.1
  misc_feature (1)..(170): Homolog of NCBI NO: 15227449 NR Description: putative serpin; protein id: At2g35580.1
  misc_feature (1)..(102): Homolog of NCBI NO: 15220298 NR Description: serpin, putative; protein id: At1g47710.1
  misc_feature (95)..(167): Homolog of NCBI NO: 15220298 NR Description: serpin, putative; protein id: At1g47710.1
  misc_feature (1)..(168): Homolog of NCBI NO: 6692102 NR Description: F22C12.21 [Arabidopsis thaliana]
  misc_feature (1)..(102): Homolog of NCBI NO: 26224736 NR Description: serpin-like protein [Citrus x paradisi]
  misc_feature (95)..(167): Homolog of NCBI NO: 26224736 NR Description: serpin-like protein [Citrus x paradisi]
  misc_feature (1)..(168): Homolog of NCBI NO: 15220721 NR Description: phloem serpin-1, putative; protein id:
  misc_feature (1)..(168): Homolog of NCBI NO: 25404364 NR Description: hypothetical protein F19K23.10 [imported] - thaliana >gi|2160141|gb|AAB60763.1| Strong similarity to Triticum
  misc_feature (1)..(168): Homolog of NCBI NO: 15222606 NR Description: hypothetical protein; protein id: At1g64030.1
MTGAHEDSLDVYEAFKVLNLPYREGREDSRGFSMQIYLPDEKDGLPSMLESLASTRGFLKDNKVLPSQKAGVKELKIPRFKFAFDFEASKALKGLGLKVPLSTIIHKSCIEVDEVGSKAAAAAALRSCGGCYFPPKKYDFVADHPFLFIVKEYISGLVLFLGHVMDPSKH

SEQ ID NO: 70923 - DNA, 2643 bp, Arabidopsis thaliana
  misc_feature (1)..(2643): Ceres Seq. ID no. 3025301
  misc_feature: MA Experiment ID: 20000439 Result: Up-regulated in Transcription
  misc_feature: MA Experiment 20000439 PARAMETER Experiment Name: At_Roots__P Parameter: Age (day) Value: 14 vs. 21
  misc_feature: MA Experiment 20000439 PARAMETER Experiment Name: At_Roots__P Parameter: Organism Value: A. thaliana
  misc_feature: MA Experiment 20000439 PARAMETER Experiment Name: At_Roots__P Parameter: Tissue Value: Roots vs. Whole Plant
  misc_feature: MA Experiment ID: 20000460 Result: Down-regulated in Transcription
  misc_feature: MA Experiment 20000460 PARAMETER Experiment Name: At_10percent_PEG_P Parameter: Age (day) Value: 12
  misc_feature: MA Experiment 20000460 PARAMETER Experiment Name: At_10percent_PEG_P Parameter: Organism Value: A. thaliana
  misc_feature: MA Experiment 20000460 PARAMETER Experiment Name: At_10percent_PEG_P Parameter: Plant Line Value: WS
  misc_feature: MA Experiment 20000460 PARAMETER Experiment Name: At_10percent_PEG_P Parameter: Timepoint (day) Value: 12
  misc_feature: MA Experiment 20000460 PARAMETER Experiment Name: At_10percent_PEG_P Parameter: Tissue Value: Whole Plant
  misc_feature: MA Experiment 20000460 PARAMETER Experiment Name: At_10percent_PEG_P Parameter: Treatment Value: 10percent PEG vs. No Treatment
atggaaggtcgtcgtcaacgtttactggtgttcatctttggggctttggccattacacatcttgttcaagctcagccgcctgatcaacgaggattcatcagtttggattgcggtttacccgttaatgagtctccttataccgacccacgaaccggattaacattctcatctgatgctgattttattttaagtggtttacgtggtgaagctggggatgataacacatatatctacaggcagtacaaggatttgagatattttcccgatggaatacgaaactgctataatctgaaagtagagcaaggcatcaactatttgataagagcagggttcggatatggaaattatgatggtcttaatgtatatcccaaatttgatttacatgttgggcctaacatgtggattgcggttgatttggaattcggaaaagatcgtgagatcatttacatgacaacgtcgaacttattgcagatttgtcttgtcaaaacaggatcaactataccaatgatatcaaccttggaactacggccactaagaaatgattcatatttgactcaattcggtcccttagacctcatctaccggcgggcctatagtagcaattctaccggttttatacggtatcctgatgatatttttgatcgcaaatgggaccgatataatgaatttgaaacggatgtgaacaccaccctcaacgtgagatcctcgagtccctttcaagtaccagaagctgtaagtaggatgggaatcacgcccgaaaatgccagcttgccattgagattttacgtgtctctagatgacgacagtgacaaggttaacgtgtactttcactttgccgaaatccaagctttgaggggcaatgagactagagaattcgacattgaattggaagaagatattattcagtcagcatatagtcctacgatgttacaatcagataccaaatataacctatcacctcacaaatgtagctccgggttgtgctacttgaaactcgttagaactccaaggtcaactcttccaccgctgattagtgctattgaggctttcaaggttgtggactttccatacgctgaaacaaatccaaatgacgtcgctgctatgaaggatatcgaagcattttatggattgaagatgattagttggcaaggagatccttgtgtccctgaactattaaagtgggaagatctaaaatgcagctacacaaataagtctactcctccaagaattatttctttagatttgtcatcacgagggttaaaaggggtcattgcgcctgccttccaaaatttgaccgagcttcgaaaactagacttgtcaaataatagttttactggaggagtgcccgagtttctagccagcatgaagtcattatcgatcataaatttaaattggaatgaccttacgggtcctcttcctaaattgcttcttgatagagaaaagaatgggcttaagctaacgatccaaggaaacccaaagttgtgtaacgatgcgtcatgcaaaaataataacaatcaaacgtacattgtaccagttgttgcgtcagtagcttctgtgctcatcattatagccgtactgattctcattcttgttttcaaaaagagaaggccaacgcaagttgattcattacctacagtgcaacatgggttaccaaatagaccgtctatatttactcaaacgaaaaggttcacttattcagaggtagaagcattaacagataattttgaaagagttcttggagaaggagggtttggggtagtgtatcatggtattttaaatggtacgcaaccaatagctgttaaactactctctcaatcatcagtacaaggctataaggaattcaaagctgaggttgaacttcttttgagagtgcaccacgtcaatttggttagtttggttggatattgtgatgaagaaagcaacttggccctgctttatgagtatgcaccgaacggagacttaaaacaacatctatcaggagaacggggtggctctccattgaagtggtcaagtagactaaaaattgtcgtcgaaactgcgcaaggattagaatacttgcatacgggttgcaaacctccaatggtacatcgtgatgtaaaaacaacaaatatacttttagacgaacacttccaagcaaaactcgccgattttggcctttcaagatcatttccagttggaggtgaaactcatgtttcaacagctgttgctggaactcctggatatttggatcccgaatattatcgaacaaataggttgaacgaaaagagtgatgtatatagctttgggattgtattattggagatcatcacaagtcgacctgtgattcagcaaacccgagagaagccgcacatagcagcatgggtgggatacatgcttactaagggagatattgagaacgttgtggatccaagactcaatagagattatgagcctacttctgtttggaaggctcttgagatagcaatgtcttgcgtgaatccttcttcggagaaaagaccaaccatgtctcaagttactaatgaactaaagcaatgtctaacattagaaaactcaaagcgaggagtgagagaagacatgggatcaagaagttctgttgaaatgagcacaagctttacaaccgaaattaacccaaaagcacgataa

SEQ ID NO: 70924 - protein, 880 aa, Arabidopsis thaliana
  peptide (1)..(880): Ceres Seq. ID no. 3025302
  misc_feature (8)..(880): Homolog of NCBI NO: 15227017 NR Description: putative receptor-like protein kinase; protein id:
  misc_feature (7)..(880): Homolog of NCBI NO: 15232537 NR Description: serine/threonine-specific protein kinase,
  misc_feature (6)..(880): Homolog of NCBI NO: 25387123 NR Description: probable protein kinase [imported] - Arabidopsis >gi|9802784|gb|AAF99853.1|AC015448_3 Putative protein kinase
  misc_feature (14)..(880): Homolog of NCBI NO: 9758831 NR Description: receptor-like protein kinase [Arabidopsis
  misc_feature (6)..(880): Homolog of NCBI NO: 25387148 NR Description: probable protein kinase [imported] - Arabidopsis >gi|9802795|gb|AAF99864.1|AC015448_14 Putative protein kinase
  misc_feature (1)..(880): Homolog of NCBI NO: 9758834 NR Description: receptor-like protein kinase [Arabidopsis
  misc_feature (8)..(880): Homolog of NCBI NO: 15222042 NR Description: light repressible receptor protein kinase,
  misc_feature (10)..(880): Homolog of NCBI NO: 22330177 NR Description: receptor protein kinase, putative; protein id:
  misc_feature (31)..(880): Homolog of NCBI NO: 25387154 NR Description: protein F22G5.6 [imported] - Arabidopsis thaliana
  misc_feature (206)..(879): Homolog of NCBI NO: 15220696 NR Description: hypothetical protein; protein id: At1g62090.1
MEGRRQRLLVFIFGALAITHLVQAQPPDQRGFISLDCGLPVNESPYTDPRTGLTFSSDADFILSGLRGEAGDDNTYIYRQYKDLRYFPDGIRNCYNLKVEQGINYLIRAGFGYGNYDGLNVYPKFDLHVGPNMWIAVDLEFGKDREIIYMTTSNLLQICLVKTGSTIPMISTLELRPLRNDSYLTQFGPLDLIYRRAYSSNSTGFIRYPDDIFDRKWDRYNEFETDVNTTLNVRSSSPFQVPEAVSRMGITPENASLPLRFYVSLDDDSDKVNVYFHFAEIQALRGNETREFDIELEEDIIQSAYSPTMLQSDTKYNLSPHKCSSGLCYLKLVRTPRSTLPPLISAIEAFKVVDFPYAETNPNDVAAMKDIEAFYGLKMISWQGDPCVPELLKWEDLKCSYTNKSTPPRIISLDLSSRGLKGVIAPAFQNLTELRKLDLSNNSFTGGVPEFLASMKSLSIINLNWNDLTGPLPKLLLDREKNGLKLTIQGNPKLCNDASCKNNNNQTYIVPVVASVASVLIIIAVLILILVFKKRRPTQVDSLPTVQHGLPNRPSIFTQTKRFTYSEVEALTDNFERVLGEGGFGVVYHGILNGTQPIAVKLLSQSSVQGYKEFKAEVELLLRVHHVNLVSLVGYCDEESNLALLYEYAPNGDLKQHLSGERGGSPLKWSSRLKIVVETAQGLEYLHTGCKPPMVHRDVKTTNILLDEHFQAKLADFGLSRSFPVGGETHVSTAVAGTPGYLDPEYYRTNRLNEKSDVYSFGIVLLEIITSRPVIQQTREKPHIAAWVGYMLTKGDIENVVDPRLNRDYEPTSVWKALEIAMSCVNPSSEKRPTMSQVTNELKQCLTLENSKRGVREDMGSRSSVEMSTSFTTEINPKAR

SEQ ID NO: 70925 - protein, 748 aa, Arabidopsis thaliana
  peptide (1)..(748): Ceres Seq. ID no. 3025303
  misc_feature (1)..(748): Homolog of NCBI NO: 15227017 NR Description: putative receptor-like protein kinase; protein id:
  misc_feature (1)..(748): Homolog of NCBI NO: 15232537 NR Description: serine/threonine-specific protein kinase,
  misc_feature (1)..(748): Homolog of NCBI NO: 25387123 NR Description: probable protein kinase [imported] - Arabidopsis >gi|9802784|gb|AAF99853.1|AC015448_3 Putative protein kinase
  misc_feature (1)..(748): Homolog of NCBI NO: 9758831 NR Description: receptor-like protein kinase [Arabidopsis
  misc_feature (1)..(748): Homolog of NCBI NO: 25387148 NR Description: probable protein kinase [imported] - Arabidopsis >gi|9802795|gb|AAF99864.1|AC015448_14 Putative protein kinase
  misc_feature (1)..(748): Homolog of NCBI NO: 9758834 NR Description: receptor-like protein kinase [Arabidopsis
  misc_feature (1)..(748): Homolog of NCBI NO: 15222042 NR Description: light repressible receptor protein kinase,
  misc_feature (1)..(748): Homolog of NCBI NO: 22330177 NR Description: receptor protein kinase, putative; protein id:
  misc_feature (1)..(748): Homolog of NCBI NO: 25387154 NR Description: protein F22G5.6 [imported] - Arabidopsis thaliana
  misc_feature (74)..(747): Homolog of NCBI NO: 15220696 NR Description: hypothetical protein; protein id: At1g62090.1
MWIAVDLEFGKDREIIYMTTSNLLQICLVKTGSTIPMISTLELRPLRNDSYLTQFGPLDLIYRRAYSSNSTGFIRYPDDIFDRKWDRYNEFETDVNTTLNVRSSSPFQVPEAVSRMGITPENASLPLRFYVSLDDDSDKVNVYFHFAEIQALRGNETREFDIELEEDIIQSAYSPTMLQSDTKYNLSPHKCSSGLCYLKLVRTPRSTLPPLISAIEAFKVVDFPYAETNPNDVAAMKDIEAFYGLKMISWQGDPCVPELLKWEDLKCSYTNKSTPPRIISLDLSSRGLKGVIAPAFQNLTELRKLDLSNNSFTGGVPEFLASMKSLSIINLNWNDLTGPLPKLLLDREKNGLKLTIQGNPKLCNDASCKNNNNQTYIVPVVASVASVLIIIAVLILILVFKKRRPTQVDSLPTVQHGLPNRPSIFTQTKRFTYSEVEALTDNFERVLGEGGFGVVYHGILNGTQPIAVKLLSQSSVQGYKEFKAEVELLLRVHHVNLVSLVGYCDEESNLALLYEYAPNGDLKQHLSGERGGSPLKWSSRLKIVVETAQGLEYLHTGCKPPMVHRDVKTTNILLDEHFQAKLADFGLSRSFPVGGETHVSTAVAGTPGYLDPEYYRTNRLNEKSDVYSFGIVLLEIITSRPVIQQTREKPHIAAWVGYMLTKGDIENVVDPRLNRDYEPTSVWKALEIAMSCVNPSSEKRPTMSQVTNELKQCLTLENSKRGVREDMGSRSSVEMSTSFTTEINPKAR

SEQ ID NO: 70926 - protein, 731 aa, Arabidopsis thaliana
  peptide (1)..(731): Ceres Seq. ID no. 3025304
  misc_feature (1)..(731): Homolog of NCBI NO: 15227017 NR Description: putative receptor-like protein kinase; protein id:
  misc_feature (1)..(731): Homolog of NCBI NO: 15232537 NR Description: serine/threonine-specific protein kinase,
  misc_feature (1)..(731): Homolog of NCBI NO: 25387123 NR Description: probable protein kinase [imported] - Arabidopsis >gi|9802784|gb|AAF99853.1|AC015448_3 Putative protein kinase
  misc_feature (1)..(731): Homolog of NCBI NO: 9758831 NR Description: receptor-like protein kinase [Arabidopsis
  misc_feature (1)..(731): Homolog of NCBI NO: 25387148 NR Description: probable protein kinase [imported] - Arabidopsis >gi|9802795|gb|AAF99864.1|AC015448_14 Putative protein kinase
  misc_feature (1)..(731): Homolog of NCBI NO: 9758834 NR Description: receptor-like protein kinase [Arabidopsis
  misc_feature (1)..(731): Homolog of NCBI NO: 15222042 NR Description: light repressible receptor protein kinase,
  misc_feature (1)..(731): Homolog of NCBI NO: 22330177 NR Description: receptor protein kinase, putative; protein id:
  misc_feature (1)..(731): Homolog of NCBI NO: 25387154 NR Description: protein F22G5.6 [imported] - Arabidopsis thaliana
  misc_feature (57)..(730): Homolog of NCBI NO: 15220696 NR Description: hypothetical protein; protein id: At1g62090.1
MTTSNLLQICLVKTGSTIPMISTLELRPLRNDSYLTQFGPLDLIYRRAYSSNSTGFIRYPDDIFDRKWDRYNEFETDVNTTLNVRSSSPFQVPEAVSRMGITPENASLPLRFYVSLDDDSDKVNVYFHFAEIQALRGNETREFDIELEEDIIQSAYSPTMLQSDTKYNLSPHKCSSGLCYLKLVRTPRSTLPPLISAIEAFKVVDFPYAETNPNDVAAMKDIEAFYGLKMISWQGDPCVPELLKWEDLKCSYTNKSTPPRIISLDLSSRGLKGVIAPAFQNLTELRKLDLSNNSFTGGVPEFLASMKSLSIINLNWNDLTGPLPKLLLDREKNGLKLTIQGNPKLCNDASCKNNNNQTYIVPVVASVASVLIIIAVLILILVFKKRRPTQVDSLPTVQHGLPNRPSIFTQTKRFTYSEVEALTDNFERVLGEGGFGVVYHGILNGTQPIAVKLLSQSSVQGYKEFKAEVELLLRVHHVNLVSLVGYCDEESNLALLYEYAPNGDLKQHLSGERGGSPLKWSSRLKIVVETAQGLEYLHTGCKPPMVHRDVKTTNILLDEHFQAKLADFGLSRSFPVGGETHVSTAVAGTPGYLDPEYYRTNRLNEKSDVYSFGIVLLEIITSRPVIQQTREKPHIAAWVGYMLTKGDIENVVDPRLNRDYEPTSVWKALEIAMSCVNPSSEKRPTMSQVTNELKQCLTLENSKRGVREDMGSRSSVEMSTSFTTEINPKAR

SEQ ID NO: 70927 - DNA, 867 bp, Arabidopsis thaliana
  misc_feature (1)..(867): Ceres Seq. ID no. 3025327
  misc_feature: MA Experiment ID: 20000306 Result: Up-regulated in Transcription
  misc_feature: MA Experiment 20000306 PARAMETER Experiment Name: At_Germinating_Seeds_Sub_P Parameter: Age (hr) Value: 6 vs. 0
  misc_feature: MA Experiment 20000306 PARAMETER Experiment Name: At_Germinating_Seeds_Sub_P Parameter: Organism Value: A. thaliana
  misc_feature: MA Experiment 20000306 PARAMETER Experiment Name: At_Germinating_Seeds_Sub_P Parameter: Plant Line Value: WS
  misc_feature: MA Experiment 20000306 PARAMETER Experiment Name: At_Germinating_Seeds_Sub_P Parameter: Tissue Value: Germinating Seeds
  misc_feature: MA Experiment ID: 20000307 Result: Up-regulated in Transcription
  misc_feature: MA Experiment 20000307 PARAMETER Experiment Name: At_Germinating_Seeds_Sub_P Parameter: Age (hr) Value: 24 vs. 0
  misc_feature: MA Experiment 20000307 PARAMETER Experiment Name: At_Germinating_Seeds_Sub_P Parameter: Organism Value: A. thaliana
  misc_feature: MA Experiment 20000307 PARAMETER Experiment Name: At_Germinating_Seeds_Sub_P Parameter: Plant Line Value: WS
  misc_feature: MA Experiment 20000307 PARAMETER Experiment Name: At_Germinating_Seeds_Sub_P Parameter: Tissue Value: Germinating Seeds
  misc_feature: MA Experiment ID: 20000314 Result: Up-regulated in Transcription
  misc_feature: MA Experiment 20000314 PARAMETER Experiment Name: At_14day_Shoots-Roots_Sub_P Parameter: Age (day) Value: 14
  misc_feature: MA Experiment 20000314 PARAMETER Experiment Name: At_14day_Shoots-Roots_Sub_P Parameter: Organism Value: A. thaliana
  misc_feature: MA Experiment 20000314 PARAMETER Experiment Name: At_14day_Shoots-Roots_Sub_P Parameter: Plant Line Value: WS
  misc_feature: MA Experiment 20000314 PARAMETER Experiment Name: At_14day_Shoots-Roots_Sub_P Parameter: Tissue Value: Roots vs. Whole Plant
  misc_feature: MA Experiment ID: 20000355 Result: Up-regulated in Transcription
  misc_feature: MA Experiment 20000355 PARAMETER Experiment Name: At_Siliques_Sub_P Parameter: Age (day) Value: 21
  misc_feature: MA Experiment 20000355 PARAMETER Experiment Name: At_Siliques_Sub_P Parameter: Organism Value: A. thaliana
  misc_feature: MA Experiment 20000355 PARAMETER Experiment Name: At_Siliques_Sub_P Parameter: Plant Line Value: WS
  misc_feature: MA Experiment 20000355 PARAMETER Experiment Name: At_Siliques_Sub_P Parameter: Tissue Value: Less Than 5mm Siliques vs. Whole Plant
  misc_feature: MA Experiment ID: 20000440 Result: Up-regulated in Transcription
  misc_feature: MA Experiment 20000440 PARAMETER Experiment Name: At_Closed-Flower__Sub_P Parameter: Tissue Value: Closed Flower vs. Whole Plant
atggggatttctacagagacgcagcaaattgcggcttcagaggctgcacaaaagagatggactacaagcgatttcgatatcggaaagccacttggtagaggaaagtttggccatgtttatctagcaagagagaaacggagcgatcacattgtggctttaaaggttctttttaaggctcagcttcaacaatctcaagttgaacaccagttacgaagggaagtagagattcaatctcatcttcggcatcccaatattctgcggctctacggttacttctatgatcagaaaagagtttatttgattttggagtatgctgtaaggggtgagctttataaagagcttcagaagtgcaagtacttcagcgaacgtcgagcagcaacttatgttgcgtcattggctagagccctcatctattgccatggaaagcatgtaattcacagagatataaaacctgaaaatctgttgattggtgctcagggtgagctcaagattgcagattttggatggtcagtacacacattcaaccgtagaaggactatgtgtggcactttggattaccttccacctgagatggtggaaagcgttgaacatgatgcgagtgtcgatatatggagtctaggaattctctgctacgaatttctttatggtgttcctccttttgaggccagggagcattcagagacatacaaaaggattgttcaagtggatctcaagttccctcccaaacccattgtgtcatcatctgcaaaggacctgattagccagatgttggttaaggagtctacgcaacgtttggccttgcacaagcttcttgaacacccgtggattgtgcaaaacgcagacccatcaggcctttacagaggatga

SEQ ID NO: 70928 - protein, 288 aa, Arabidopsis thaliana
  peptide (1)..(288): Ceres Seq. ID no. 3025328
  misc_feature (25)..(276): Pfam Name: Protein kinase domain Pfam Description: Protein kinase domain
  misc_feature (11)..(288): Homolog of NCBI NO: 15225210 NR Description: putative protein kinase; protein id: At2g25880.1
  misc_feature (1)..(287): Homolog of NCBI NO: 15233958 NR Description: putative serine/threonine protein kinase; protein
  misc_feature (1)..(287): Homolog of NCBI NO: 21592557 NR Description: putative serine/threonine protein kinase
  misc_feature (18)..(288): Homolog of NCBI NO: 34906424 NR Description: putative protein kinase [Oryza sativa (japonica group)] >gi|9049474|dbj|BAA99439.1| putative protein kinase
  misc_feature (2)..(284): Homolog of NCBI NO: 20862949 NR Description: serine/threonine kinase 6 [Mus musculus]
  misc_feature (2)..(284): Homolog of NCBI NO: 27923856 NR Description: Serine/threonine kinase 6 (Aurora-family kinase 1)
  misc_feature (2)..(284): Homolog of NCBI NO: 33355454 NR Description: serine/threonine protein kinase 6 [Mus musculus]
  misc_feature (2)..(284): Homolog of NCBI NO: 23463275 NR Description: serine/threonine kinase 6; aurora-A [Rattus
  misc_feature (2)..(283): Homolog of NCBI NO: 26351841 NR Description: unnamed protein product [Mus musculus]
  misc_feature (6)..(280): Homolog of NCBI NO: 1079309 NR Description: protein kinase (EC 2.7.1.-) p46XlEg22 - African
MGISTETQQIAASEAAQKRWTTSDFDIGKPLGRGKFGHVYLAREKRSDHIVALKVLFKAQLQQSQVEHQLRREVEIQSHLRHPNILRLYGYFYDQKRVYLILEYAVRGELYKELQKCKYFSERRAATYVASLARALIYCHGKHVIHRDIKPENLLIGAQGELKIADFGWSVHTFNRRRTMCGTLDYLPPEMVESVEHDASVDIWSLGILCYEFLYGVPPFEAREHSETYKRIVQVDLKFPPKPIVSSSAKDLISQMLVKESTQRLALHKLLEHPWIVQNADPSGLYRG

SEQ ID NO: 70929 - DNA, 1386 bp, Arabidopsis thaliana
  misc_feature (1)..(1386): Ceres Seq. ID no. 3025677
  misc_feature: MA Experiment ID: 20000234 Result: Up-regulated in Transcription
  misc_feature: MA Experiment 20000234 PARAMETER Experiment Name: At_Siliques_P Parameter: Age (day) Value: 21
  misc_feature: MA Experiment 20000234 PARAMETER Experiment Name: At_Siliques_P Parameter: Organism Value: A. thaliana
  misc_feature: MA Experiment 20000234 PARAMETER Experiment Name: At_Siliques_P Parameter: Plant Line Value: WS
  misc_feature: MA Experiment 20000234 PARAMETER Experiment Name: At_Siliques_P Parameter: Tissue Value: Less Than 5mm Siliques vs. Whole Plant
  misc_feature: MA Experiment ID: 20000265 Result: Up-regulated in Transcription
  misc_feature: MA Experiment 20000265 PARAMETER Experiment Name: At_Open_Flower_P Parameter: Age (day) Value: 21
  misc_feature: MA Experiment 20000265 PARAMETER Experiment Name: At_Open_Flower_P Parameter: Plant Line Value: WS
  misc_feature: MA Experiment 20000265 PARAMETER Experiment Name: At_Open_Flower_P Parameter: Tissue Value: Closed Flower vs. Whole Plant
  misc_feature: MA Experiment ID: 20000286 Result: Up-regulated in Transcription
  misc_feature: MA Experiment 20000286 PARAMETER Experiment Name: At_Open_Flower_P Parameter: Age (day) Value: 21
  misc_feature: MA Experiment 20000286 PARAMETER Experiment Name: At_Open_Flower_P Parameter: Plant Line Value: WS
  misc_feature: MA Experiment 20000286 PARAMETER Experiment Name: At_Open_Flower_P Parameter: Tissue Value: Half Open vs. Whole Plant
  misc_feature: MA Experiment ID: 20000439 Result: Up-regulated in Transcription
  misc_feature: MA Experiment 20000439 PARAMETER Experiment Name: At_Roots__P Parameter: Age (day) Value: 14 vs. 21
  misc_feature: MA Experiment 20000439 PARAMETER Experiment Name: At_Roots__P Parameter: Organism Value: A. thaliana
  misc_feature: MA Experiment 20000439 PARAMETER Experiment Name: At_Roots__P Parameter: Tissue Value: Roots vs. Whole Plant
  misc_feature: MA Experiment ID: 20001451 Result: Down-regulated in Transcription
  misc_feature: MA Experiment 20001451 PARAMETER Experiment Name: At_Far-red-induction_P Parameter: Age (day) Value: 7
  misc_feature: MA Experiment 20001451 PARAMETER Experiment Name: At_Far-red-induction_P Parameter: Light Value: Far-red vs. White
  misc_feature: MA Experiment 20001451 PARAMETER Experiment Name: At_Far-red-induction_P Parameter: Organism Value: A. thaliana
  misc_feature: MA Experiment 20001451 PARAMETER Experiment Name: At_Far-red-induction_P Parameter: Plant Line Value: Columbia
  misc_feature: MA Experiment 20001451 PARAMETER Experiment Name: At_Far-red-induction_P Parameter: Timepoint (hr) Value: 24
  misc_feature: MA Experiment 20001451 PARAMETER Experiment Name: At_Far-red-induction_P Parameter: Tissue Value: Whole Plant
atggaagacgacaagaagaagaagagaaacaagaaaaagaagaataagcagaataataaacgtgttgacgacgctttagcttctggtgcaacgacctccgtcgatgaaaatcatatcggagatggtgacgttcctcaaattagcggaggtccagatgccgatgagtcgcaatcatctcatcagatcgatgtcgtcgcaactgaagatgattctggtgttgagaacaagtctcagggaagtgaggtgctgttggaagaaacaattaaacagttacgtgaggaaaatggttcctaccttcagaaagaggcattgttagaagaaaggcttgtacatttgaaaacagagaatgaagctcacgtacataatgaggcactgttagaaggaaagctcttgcatttgagaacagagaatgaagatcacatacagaatgaggcactgttagaagaaaagctcttgcatttgagaacagagaatgaagctcacatacaaaatgaggcactgttggaagaaaggctcttacattttagaactgaaaatgaagctcacaaacaaaacgaagaaaagttggaggaaagacttgtgcagtataaaaacaagaacgacatgcttcttcgtgaaatgtctagcacagaagcccagatgagacaattgctagatgaaagatctaccttcactcagaaagaggcgagtctagaaaagaaagttcaacaacttcaacacgatgaagaatccttggtggctgaggagaagtcatccagagaaatgatatctagccttaacaatgaaattgcaaggctgcgagcacaggttacggagttggaaaaatctaagagtaatcttctagagcagaatcagagtcttaaggaaactatatccaatcttcaagtccagcatgaaaaccatgatagtaacgcaaagggtgcttctgaggaagaattaaactcacagattgaagcagcttgtactctagttgaaaagcttatcactgaaaatgctgatctagttgaaaaggtgaacgaattgtgtattaagctaaaccaatcacagcatgcttcccctgagagcctagcaattgaagtagagaaatctgaatccttagaagaaatacccatacacgacgagttgattagaattgataactctagggacatggatactgcatcaataaagagaaacttttcagaaggtgaaatagaagaaacggtgccgctctctctgaacgcgaatggggaagtagacgtggaatcacaggttgcagtagctggagaagacgaaataaatgctggtgtgcctctggcggacgctccacttatcggtgctccattcaggctcgtctcgtttgtagcaagatacgtgagtggtgcagatttggcggcaaagaaatag

SEQ ID NO: 70930 - protein, 461 aa, Arabidopsis thaliana
  peptide (1)..(461): Ceres Seq. ID no. 3025678
  misc_feature (29)..(390): Pfam Name: Plant protein of unknown function (DUF869) Pfam Description: Plant protein of unknown function (DUF869)
  misc_feature (156)..(461): Homolog of NCBI NO: 15224904 NR Description: hypothetical protein; protein id: At2g38580.1
  misc_feature (1)..(289): Homolog of NCBI NO: 15224904 NR Description: hypothetical protein; protein id: At2g38580.1
  misc_feature (2)..(436): Homolog of NCBI NO: 13936996 NR Description: ORF73 [Human herpesvirus 8]
  misc_feature (2)..(436): Homolog of NCBI NO: 11037008 NR Description: latent nuclear antigen [Human herpesvirus 8]
  misc_feature (136)..(436): Homolog of NCBI NO: 2246532 NR Description: ORF 73, contains large complex repeat CR 73
  misc_feature (2)..(436): Homolog of NCBI NO: 9886896 NR Description: Orf73 [Human herpesvirus 8]
  misc_feature (66)..(417): Homolog of NCBI NO: 28436851 NR Description: Similar to TGF-beta1-induced anti-apoptotic
  misc_feature (66)..(415): Homolog of NCBI NO: 34872793 NR Description: similar to myosin containing PDZ domain [Rattus
  misc_feature (66)..(417): Homolog of NCBI NO: 22094119 NR Description: TGF-beta1-induced anti-apoptotic factor 1; myosin PDZ domain [Mus musculus] >gi|7416032|dbj|BAA93660.1| myosin
  misc_feature (85)..(377): Homolog of NCBI NO: 23509559 NR Description: hypothetical protein [Plasmodium falciparum 3D7]
MEDDKKKKRNKKKKNKQNNKRVDDALASGATTSVDENHIGDGDVPQISGGPDADESQSSHQIDVVATEDDSGVENKSQGSEVLLEETIKQLREENGSYLQKEALLEERLVHLKTENEAHVHNEALLEGKLLHLRTENEDHIQNEALLEEKLLHLRTENEAHIQNEALLEERLLHFRTENEAHKQNEEKLEERLVQYKNKNDMLLREMSSTEAQMRQLLDERSTFTQKEASLEKKVQQLQHDEESLVAEEKSSREMISSLNNEIARLRAQVTELEKSKSNLLEQNQSLKETISNLQVQHENHDSNAKGASEEELNSQIEAACTLVEKLITENADLVEKVNELCIKLNQSQHASPESLAIEVEKSESLEEIPIHDELIRIDNSRDMDTASIKRNFSEGEIEETVPLSLNANGEVDVESQVAVAGEDEINAGVPLADAPLIGAPFRLVSFVARYVSGADLAAKK

SEQ ID NO: 70931 - protein, 260 aa, Arabidopsis thaliana; identical to SEQ ID NO: 70476
  peptide (1)..(260): Ceres Seq. ID no. 3025679
  misc_feature (1)..(189): Pfam Name: Plant protein of unknown function (DUF869) Pfam Description: Plant protein of unknown function (DUF869)
  misc_feature (1)..(260): Homolog of NCBI NO: 15224904 NR Description: hypothetical protein; protein id: At2g38580.1
  misc_feature (1)..(88): Homolog of NCBI NO: 15224904 NR Description: hypothetical protein; protein id: At2g38580.1
  misc_feature (1)..(235): Homolog of NCBI NO: 13936996 NR Description: ORF73 [Human herpesvirus 8]
  misc_feature (1)..(235): Homolog of NCBI NO: 11037008 NR Description: latent nuclear antigen [Human herpesvirus 8]
  misc_feature (1)..(235): Homolog of NCBI NO: 2246532 NR Description: ORF 73, contains large complex repeat CR 73
  misc_feature (1)..(235): Homolog of NCBI NO: 9886896 NR Description: Orf73 [Human herpesvirus 8]
  misc_feature (1)..(216): Homolog of NCBI NO: 28436851 NR Description: Similar to TGF-beta1-induced anti-apoptotic
  misc_feature (1)..(214): Homolog of NCBI NO: 34872793 NR Description: similar to myosin containing PDZ domain [Rattus
  misc_feature (1)..(216): Homolog of NCBI NO: 22094119 NR Description: TGF-beta1-induced anti-apoptotic factor 1; myosin PDZ domain [Mus musculus] >gi|7416032|dbj|BAA93660.1| myosin
  misc_feature (1)..(176): Homolog of NCBI NO: 23509559 NR Description: hypothetical protein [Plasmodium falciparum 3D7]

SEQ ID NO: 70932 - protein, 255 aa, Arabidopsis thaliana; identical to SEQ ID NO: 70477
  peptide (1)..(255): Ceres Seq. ID no. 3025680
  misc_feature (1)..(184): Pfam Name: Plant protein of unknown function (DUF869) Pfam Description: Plant protein of unknown function (DUF869)
  misc_feature (1)..(255): Homolog of NCBI NO: 15224904 NR Description: hypothetical protein; protein id: At2g38580.1
  misc_feature (1)..(83): Homolog of NCBI NO: 15224904 NR Description: hypothetical protein; protein id: At2g38580.1
  misc_feature (1)..(230): Homolog of NCBI NO: 13936996 NR Description: ORF73 [Human herpesvirus 8]
  misc_feature (1)..(230): Homolog of NCBI NO: 11037008 NR Description: latent nuclear antigen [Human herpesvirus 8]
  misc_feature (1)..(230): Homolog of NCBI NO: 2246532 NR Description: ORF 73, contains large complex repeat CR 73
  misc_feature (1)..(230): Homolog of NCBI NO: 9886896 NR Description: Orf73 [Human herpesvirus 8]
  misc_feature (1)..(211): Homolog of NCBI NO: 28436851 NR Description: Similar to TGF-beta1-induced anti-apoptotic
  misc_feature (1)..(209): Homolog of NCBI NO: 34872793 NR Description: similar to myosin containing PDZ domain [Rattus
  misc_feature (1)..(211): Homolog of NCBI NO: 22094119 NR Description: TGF-beta1-induced anti-apoptotic factor 1; myosin PDZ domain [Mus musculus] >gi|7416032|dbj|BAA93660.1| myosin
  misc_feature (1)..(171): Homolog of NCBI NO: 23509559 NR Description: hypothetical protein [Plasmodium falciparum 3D7]

SEQ ID NO: 70933 - DNA, 987 bp, Arabidopsis thaliana
  misc_feature (1)..(987): Ceres Seq. ID no. 3025681
  misc_feature: MA Experiment ID: 20000451 Result: Up-regulated in Transcription
  misc_feature: MA Experiment 20000451 PARAMETER Experiment Name: At_CS6879_Shoots-Roots_P Parameter: Age (day) Value: 14
  misc_feature: MA Experiment 20000451 PARAMETER Experiment Name: At_CS6879_Shoots-Roots_P Parameter: Organism Value: A. thaliana
  misc_feature: MA Experiment 20000451 PARAMETER Experiment Name: At_CS6879_Shoots-Roots_P Parameter: Plant Line Value: CS6879 vs. WS
  misc_feature: MA Experiment 20000451 PARAMETER Experiment Name: At_CS6879_Shoots-Roots_P Parameter: Tissue Value: Roots
atgtgcaattgctcatcttccttcttctgttctcttccagttctcaatgctcgattggtgaaacccaattcagaaacttgtcgatggaggctcaaacggattcagcattcaatcctcaattgcttttggattgattcgaaaaactctccctttctcgggcaattcagttttatagagaaaccgagagacaatttcatctgttgcttgagttcttcactatctaatgaagaagatgtagtgcatcaaactgtggggagtgatagtgtagaattacctggagaaagtgatttggttcgactagtaggtgataatgatctgagcattacgggttcgcgaggattcaagcagtcgacgacaagatcgaatcttgttgctaagcaagttgttagtatacaatcagctttgagtttaggatttatctctcagctttgggttgacactacttcttggttggttttggtggttgatgttaaaccaagcttgctatctggagaatctgagagatttctgctcacagacattgtccgggtgggtgatgttgtccttgttgataatgagactgtcttggatactgaattcaagatggttggacttgaaacactggtaggttacagagtagttacaccaggagggagaaacattggaaaggttcgaggttactcattcaacattaactcgggaatagttgaatcgcttgagctcgattccttcggggtaactattataccatcaagcctggtgagtacatacagattagatgtcgaggatataatcgaggtcttacaagatatagttgtggttcaagaagatgcagcttctagaaaacagaggttgactaagggactctgggatgctcagtttgatagtgaataccctgatgttgaagatcttgaaagttcatctgatagaagacggcgaaggagaaacaatcgatccaaccgaaaaaagagagatttggatgatgaagaatgggacatattccgctag

SEQ ID NO: 70934 - protein, 328 aa, Arabidopsis thaliana
  peptide (1)..(328): Ceres Seq. ID no. 3025682
  misc_feature (200)..(274): Pfam Name: PRC-barrel domain Pfam Description: PRC-barrel domain
  misc_feature (1)..(233): Homolog of NCBI NO: 15224902 NR Description: hypothetical protein; protein id: At2g38570.1
  misc_feature (247)..(328): Homolog of NCBI NO: 15224902 NR Description: hypothetical protein; protein id: At2g38570.1
  misc_feature (116)..(282): Homolog of NCBI NO: 22298396 NR Description: ORF_ID:tll0853~hypothetical protein
  misc_feature (115)..(298): Homolog of NCBI NO: 23127762 NR Description: hypothetical protein [Nostoc punctiforme]
  misc_feature (115)..(298): Homolog of NCBI NO: 17228624 NR Description: hypothetical protein [Nostoc sp. PCC 7120]
  misc_feature (115)..(292): Homolog of NCBI NO: 23041561 NR Description: hypothetical protein [Trichodesmium erythraeum
  misc_feature (120)..(282): Homolog of NCBI NO: 16330095 NR Description: unknown protein [Synechocystis sp. PCC 6803]
  misc_feature (120)..(282): Homolog of NCBI NO: 33239524 NR Description: Protein implicated in RNA metabolism (PRC-barrel
  misc_feature (120)..(282): Homolog of NCBI NO: 33864876 NR Description: conserved hypothetical protein [Synechococcus sp.
  misc_feature (120)..(282): Homolog of NCBI NO: 33860618 NR Description: conserved hypothetical protein [Prochlorococcus subsp. pastoris str. CCMP1378] >gi|33633560|emb|CAE18517.1| hypothetical protein [Prochlorococcus marinus subsp. pastoris
MCNCSSSFFCSLPVLNARLVKPNSETCRWRLKRIQHSILNCFWIDSKNSPFLGQFSFIEKPRDNFICCLSSSLSNEEDVVHQTVGSDSVELPGESDLVRLVGDNDLSITGSRGFKQSTTRSNLVAKQVVSIQSALSLGFISQLWVDTTSWLVLVVDVKPSLLSGESERFLLTDIVRVGDVVLVDNETVLDTEFKMVGLETLVGYRVVTPGGRNIGKVRGYSFNINSGIVESLELDSFGVTIIPSSLVSTYRLDVEDIIEVLQDIVVVQEDAASRKQRLTKGLWDAQFDSEYPDVEDLESSSDRRRRRRNNRSNRKKRDLDDEEWDIFR

SEQ ID NO: 70935 - DNA, 870 bp, Arabidopsis thaliana
  misc_feature (1)..(870): Ceres Seq. ID no. 3026462
  misc_feature: MA Experiment ID: 20000315 Result: Down-regulated in Transcription
  misc_feature: MA Experiment 20000315 PARAMETER Experiment Name: At_14day_Shoots-Roots_Sub_P Parameter: Age (day) Value: 14
  misc_feature: MA Experiment 20000315 PARAMETER Experiment Name: At_14day_Shoots-Roots_Sub_P Parameter: Organism Value: A. thaliana
  misc_feature: MA Experiment 20000315 PARAMETER Experiment Name: At_14day_Shoots-Roots_Sub_P Parameter: Plant Line Value: WS
  misc_feature: MA Experiment 20000315 PARAMETER Experiment Name: At_14day_Shoots-Roots_Sub_P Parameter: Tissue Value: Shoots vs. Whole Plant
  misc_feature: MA Experiment ID: 20000328 Result: Down-regulated in Transcription
  misc_feature: MA Experiment 20000328 PARAMETER Experiment Name: At_42deg_Heat_Sub_P Parameter: Age (day) Value: 14
  misc_feature: MA Experiment 20000328 PARAMETER Experiment Name: At_42deg_Heat_Sub_P Parameter: Organism Value: A. thaliana
  misc_feature: MA Experiment 20000328 PARAMETER Experiment Name: At_42deg_Heat_Sub_P Parameter: Plant Line Value: WS
  misc_feature: MA Experiment 20000328 PARAMETER Experiment Name: At_42deg_Heat_Sub_P Parameter: Temperature (deg C) Value: 42 vs. 22
  misc_feature: MA Experiment 20000328 PARAMETER Experiment Name: At_42deg_Heat_Sub_P Parameter: Timepoint (hr) Value: 6
  misc_feature: MA Experiment 20000328 PARAMETER Experiment Name: At_42deg_Heat_Sub_P Parameter: Tissue Value: Aerial
  misc_feature: MA Experiment ID: 20000347 Result: Up-regulated in Transcription
  misc_feature: MA Experiment 20000347 PARAMETER Experiment Name: At_2mM_SA_Sub_P Parameter: Age (day) Value: 14
  misc_feature: MA Experiment 20000347 PARAMETER Experiment Name: At_2mM_SA_Sub_P Parameter: Organism Value: A. thaliana
  misc_feature: MA Experiment 20000347 PARAMETER Experiment Name: At_2mM_SA_Sub_P Parameter: Plant Line Value: WS
  misc_feature: MA Experiment 20000347 PARAMETER Experiment Name: At_2mM_SA_Sub_P Parameter: Timepoint (hr) Value: 6
  misc_feature: MA Experiment 20000347 PARAMETER Experiment Name: At_2mM_SA_Sub_P Parameter: Tissue Value: Aerial
  misc_feature: MA Experiment 20000347 PARAMETER Experiment Name: At_2mM_SA_Sub_P Parameter: Treatment Value: 2mM SA vs. No Treatment
  misc_feature: MA Experiment ID: 20000355 Result: Down-regulated in Transcription
  misc_feature: MA Experiment 20000355 PARAMETER Experiment Name: At_Siliques_Sub_P Parameter: Age (day) Value: 21
  misc_feature: MA Experiment 20000355 PARAMETER Experiment Name: At_Siliques_Sub_P Parameter: Organism Value: A. thaliana
  misc_feature: MA Experiment 20000355 PARAMETER Experiment Name: At_Siliques_Sub_P Parameter: Plant Line Value: WS
  misc_feature: MA Experiment 20000355 PARAMETER Experiment Name: At_Siliques_Sub_P Parameter: Tissue Value: Less Than 5mm Siliques vs. Whole Plant
atgaagatcagtccatggatactcatagccatcatcatgatgatcttagcatcatttccttctccgatcaaagtcgttggtgcaaaaaaagagctaccattttgcaatctggatcttctagcttgcgtccaaccttttctagttaacggtcacggaggcaaactgcctaaaggctgttttgctttgtgccaatcggattcggaagattctggcttcgaagtttctgatgttggtgaagaagagagtgatgcagaggaagtttttggtttggaacttacctcagctcctggaattgaaaccctttgcgttttccccaagaacagtgcaaaaataataaaagctggagttgagactgagctgcttgttggaatgaaaaatgatggtcaatccaatgtagatattgttgctgttaaaggcagtttacatcttccttttgatcaaaatgctgttcagaatctcactgctctgagtttcagcaacgcgtctgtgccaacttccgctcaagctaccttgccatatgcttttgctgtcagcaagttcctgcaggcgggtgcttttgattttgttggcaccatcatctatgagatagatggtaagccataccaaagcatcttttataatggaactattgaagttgttgaagatggtcctctcttcagaatggagtcagtcttccttagtggtcttttaatctttgttatcgcttttctcgccatctatatccaaaatgttttgaagcatatgaccaagaaaacaaagagagcaccaaaagttgaagttggaaccgcaactaaagatgcttcgcatgatgaatggcttgagggtacttcgtacactcaatcttcgagtaagtcaaagaagaagaagtag

SEQ ID NO: 70936 - protein, 289 aa, Arabidopsis thaliana
  peptide (1)..(289): Ceres Seq. ID no. 3026463
  misc_feature (157)..(289): Homolog of NCBI NO: 15227250 NR Description: putative TRAP protein; protein id: At2g16595.1 thaliana] >gi|20197462|gb|AAM15085.1| putative TRAP protein thaliana] >gi|20198182|gb|AAM15448.1| putative TRAP protein
  misc_feature (61)..(289): Homolog of NCBI NO: 21555380 NR Description: putative signal sequence receptor, alpha subunit
  misc_feature (61)..(289): Homolog of NCBI NO: 547391 NR Description: alpha-subunit; putative
  misc_feature (61)..(289): Homolog of NCBI NO: 18399609 NR Description: putative signal sequence receptor, alpha subunit alpha); protein id: At2g21160.1, supported by cDNA: 27787.,
  misc_feature (61)..(289): Homolog of NCBI NO: 25335776 NR Description: hypothetical protein At2g21160 [imported] -
MKISPWILIAIIMMILASFPSPIKVVGAKKELPFCNLDLLACVQPFLVNGHGGKLPKGCFALCQSDSEDSGFEVSDVGEEESDAEEVFGLELTSAPGIETLCVFPKNSAKIIKAGVETELLVGMKNDGQSNVDIVAVKGSLHLPFDQNAVQNLTALSFSNASVPTSAQATLPYAFAVSKFLQAGAFDFVGTIIYEIDGKPYQSIFYNGTIEVVEDGPLFRMESVFLSGLLIFVIAFLAIYIQNVLKHMTKKTKRAPKVEVGTATKDASHDEWLEGTSYTQSSSKSKKKK

SEQ ID NO: 70937 - protein, 277 aa, Arabidopsis thaliana
  peptide (1)..(277): Ceres Seq. ID no. 3026464
  misc_feature (145)..(277): Homolog of NCBI NO: 15227250 NR Description: putative TRAP protein; protein id: At2g16595.1 thaliana] >gi|20197462|gb|AAM15085.1| putative TRAP protein thaliana] >gi|20198182|gb|AAM15448.1| putative TRAP protein
  misc_feature (49)..(277): Homolog of NCBI NO: 21555380 NR Description: putative signal sequence receptor, alpha subunit
  misc_feature (49)..(277): Homolog of NCBI NO: 547391 NR Description: alpha-subunit; putative
  misc_feature (49)..(277): Homolog of NCBI NO: 25335776 NR Description: hypothetical protein At2g21160 [imported] -
  misc_feature (49)..(277): Homolog of NCBI NO: 18399609 NR Description: putative signal sequence receptor, alpha subunit alpha); protein id: At2g21160.1, supported by cDNA: 27787.,
MMILASFPSPIKVVGAKKELPFCNLDLLACVQPFLVNGHGGKLPKGCFALCQSDSEDSGFEVSDVGEEESDAEEVFGLELTSAPGIETLCVFPKNSAKIIKAGVETELLVGMKNDGQSNVDIVAVKGSLHLPFDQNAVQNLTALSFSNASVPTSAQATLPYAFAVSKFLQAGAFDFVGTIIYEIDGKPYQSIFYNGTIEVVEDGPLFRMESVFLSGLLIFVIAFLAIYIQNVLKHMTKKTKRAPKVEVGTATKDASHDEWLEGTSYTQSSSKSKKKK

SEQ ID NO: 70938 - protein, 276 aa, Arabidopsis thaliana
  peptide (1)..(276): Ceres Seq. ID no. 3026465
  misc_feature (48)..(276): Homolog of NCBI NO: 18399609 NR Description: putative signal sequence receptor, alpha subunit alpha); protein id: At2g21160.1, supported by cDNA: 27787.,
  misc_feature (48)..(276): Homolog of NCBI NO: 25335776 NR Description: hypothetical protein At2g21160 [imported] -
  misc_feature (144)..(276): Homolog of NCBI NO: 15227250 NR Description: putative TRAP protein; protein id: At2g16595.1 thaliana] >gi|20197462|gb|AAM15085.1| putative TRAP protein thaliana] >gi|20198182|gb|AAM15448.1| putative TRAP protein
  misc_feature (48)..(276): Homolog of NCBI NO: 21555380 NR Description: putative signal sequence receptor, alpha subunit
  misc_feature (48)..(276): Homolog of NCBI NO: 547391 NR Description: alpha-subunit; putative
MILASFPSPIKVVGAKKELPFCNLDLLACVQPFLVNGHGGKLPKGCFALCQSDSEDSGFEVSDVGEEESDAEEVFGLELTSAPGIETLCVFPKNSAKIIKAGVETELLVGMKNDGQSNVDIVAVKGSLHLPFDQNAVQNLTALSFSNASVPTSAQATLPYAFAVSKFLQAGAFDFVGTIIYEIDGKPYQSIFYNGTIEVVEDGPLFRMESVFLSGLLIFVIAFLAIYIQNVLKHMTKKTKRAPKVEVGTATKDASHDEWLEGTSYTQSSSKSKKKK

SEQ ID NO: 70939 - DNA, 2427 bp, Arabidopsis thaliana
  misc_feature (1)..(2427): Ceres Seq. ID no. 3026736
  misc_feature: MA Experiment ID: 20000227 Result: Up-regulated in Transcription
  misc_feature: MA Experiment 20000227 PARAMETER Experiment Name: At_Root-Tips-vs-Tops_P Parameter: Tissue Value: Root Tips vs. Root Tops
  misc_feature: MA Experiment ID: 20000437 Result: Down-regulated in Transcription
  misc_feature: MA Experiment 20000437 PARAMETER Experiment Name: At_Drought_P Parameter: Age (day) Value: 8
  misc_feature: MA Experiment 20000437 PARAMETER Experiment Name: At_Drought_P Parameter: Organism Value: A. thaliana
  misc_feature: MA Experiment 20000437 PARAMETER Experiment Name: At_Drought_P Parameter: Plant Line Value: WS
  misc_feature: MA Experiment 20000437 PARAMETER Experiment Name: At_Drought_P Parameter: Timepoint (hr) Value: 24
  misc_feature: MA Experiment 20000437 PARAMETER Experiment Name: At_Drought_P Parameter: Tissue Value: Whole Plant
  misc_feature: MA Experiment 20000437 PARAMETER Experiment Name: At_Drought_P Parameter: Treatment Value: Drought vs. No Drought
  misc_feature: MA Experiment ID: 20000439 Result: Up-regulated in Transcription
  misc_feature: MA Experiment 20000439 PARAMETER Experiment Name: At_Roots__P Parameter: Age (day) Value: 14 vs. 21
  misc_feature: MA Experiment 20000439 PARAMETER Experiment Name: At_Roots__P Parameter: Organism Value: A. thaliana
  misc_feature: MA Experiment 20000439 PARAMETER Experiment Name: At_Roots__P Parameter: Tissue Value: Roots vs. Whole Plant
atgagtggcggtggtggtccaaaggcggaagagggtcagctgtttgtggcggtggccgtgaagggtttgatcggagacaaattaggcggtgcaggaagtcgtcgtgccgtacggtgggctgtcgataatcttttaccgaaggctgataaatttgtgatgatccacgtcatccctaccattacttctattcctactccgaccggagatagattgccggtggaagaagtggaggagagtgtggtggaaatgtatgtaagagacgtgaaaaaagaatatgaaacagtctttgttccctttttgaaaatgtgcaagagtactaggagtaccaagtgtaaggtagagactctattgctagagtacgacgatcctgcaaaagcacttgtcagattgatatccaaatcaggagttaacagtttgcgatattttcggtctaggagaacaaaaggtacaggagtaccactgaccgttttaagatacgcaccagaaacatgtgaagtatacattgtgtgtaaagacagaatcactacaaaatctatggatccattaatcaaccgagagccgtgcacaagtccacacgcagccgcgactgcccatgacttcttgagagactgggcggctagtttccacactctacggtctccaacgttacccgatcctcgacagtcaactgaggcaggaacaaggaggtcagcatcggcaagagagctgagatttgaggcattaagccttacttgtaataaacccaaaacgcctcaaagtagtaaggcttctagtgcaacaactccagagatttttaggcgacggagaggatccgatattcctcagctgaattactcagattttgataaaacatgtaccaagccccaatcaaatgttgagaacatcgttagcgaacaccgagactctgatcgttcacccccggaaacatcaagaaaatccaagaaggttgagattgaagaagaggtcgaacgtttgaagaatgagctacaaagtacagtctttaaatataaacaagcttgtgaagagctcttctccacacaaaacaaggttaaaatgctttcgactgaatatttgaatgaatctaaaagagtgaacaatgctgtggagaaagaagagttgcagaggaacaccgcggcgctggagaaagagcggtacatgaaggcggtgaaagaggtcgaaaccgcgaaagcgttgctcgcaagagagttttgtcagcgacagatcgcggaggtgaatgctttaaggacttacttggagaagaagaaagtgatcgatcagcttttagggactgatcaccggtacagaaaatacacaattgaggaaattgtaacagccacagaaggattctcgccagagaaagtgattggagaaggaggatacgggaaagtttaccaatgtagccttgatagtactccggcggctgttaaagttgtccggctagatacaccggagaagaaacaagagttcttgaaagaggttgaggttctaagccaactccgacacccacacgtggttctcctcctcggagcttgtccggagaatggttgtttggtttacgagtacttggaaaatggaagcctcgaggaatatatatttcaccgaaaaaataaaccgcctttgccttggtttatccggtttagggtaattttcgaggtagcttgcggtttggccttcttacacagctctaaaccggaaccaattgttcaccgtgacttaaaaccgggaaatatcttgttaaaccggaactacgttagcaaaatcgctgacgttggcctagccaagctggttacggatgttgcacccgataatgtcacgatgtaccgaaactcggttcttgccggtacattgcattatattgatccagaataccacagaaccggaacaattagaccaaagtcggatctatatgcgttcggcataatcattcttcagttgttgacggctcgtaacccgagcgggattgtaccagcggtcgaaaacgcggtaaagaaagggacgttaaccgaaatgctagataaatcggttaccgattggcctttggcagaaaccgaggaattggctcggatcggtttaaaatgtgctgaatttcgatgccgagatagaccggatcttaaatcagaggttataccggttttgaaacggcttgtggagacggcgaattcgaaagtaaagaaagaaggaagcaatttacgtgcaccgagtcattacttctgtccaatcttacgggagataatggaggagccagagattgctgccgatggattcacgtacgagaggaaagcgatcttagcgtggcttgagaaacataacatttcaccggtgactcgacaaaagctagaccacttcaagctcacaccgaaccatacgctccggtctgcgattcgcgattggaaatcaagagtccggttttctaatgtcgttgtttaa

SEQ ID NO: 70940 - protein, 808 aa, Arabidopsis thaliana
  peptide (1)..(808): Ceres Seq. ID no. 3026737
  misc_feature (731)..(804): Pfam Name: U-box domain Pfam Description: U-box domain
  misc_feature (221)..(802): Homolog of NCBI NO: 22327904 NR Description: similar to putative protein kinase; protein id:
  misc_feature (29)..(800): Homolog of NCBI NO: 15241414 NR Description: putative protein; protein id: At5g51270.1
  misc_feature (11)..(801): Homolog of NCBI NO: 30697549 NR Description: protein kinase family [Arabidopsis thaliana]
  misc_feature (256)..(802): Homolog of NCBI NO: 15240280 NR Description: putative protein; protein id: At5g61550.1
  misc_feature (298)..(801): Homolog of NCBI NO: 9758471 NR Description: contains similarity to receptor-like protein
  misc_feature (308)..(799): Homolog of NCBI NO: 15234952 NR Description: putative Ser Thr protein kinase; protein id:
  misc_feature (91)..(715): Homolog of NCBI NO: 15239834 NR Description: putative receptor - like kinase; protein id:
  misc_feature (274)..(715): Homolog of NCBI NO: 15224129 NR Description: putative protein kinase; protein id: At2g24370.1
  misc_feature (214)..(715): Homolog of NCBI NO: 21902013 NR Description: putative serine threonine kinase [Oryza sativa
  misc_feature (111)..(720): Homolog of NCBI NO: 15239600 NR Description: putative protein; protein id: At5g26150.1
MSGGGGPKAEEGQLFVAVAVKGLIGDKLGGAGSRRAVRWAVDNLLPKADKFVMIHVIPTITSIPTPTGDRLPVEEVEESVVEMYVRDVKKEYETVFVPFLKMCKSTRSTKCKVETLLLEYDDPAKALVRLISKSGVNSLRYFRSRRTKGTGVPLTVLRYAPETCEVYIVCKDRITTKSMDPLINREPCTSPHAAATAHDFLRDWAASFHTLRSPTLPDPRQSTEAGTRRSASARELRFEALSLTCNKPKTPQSSKASSATTPEIFRRRRGSDIPQLNYSDFDKTCTKPQSNVENIVSEHRDSDRSPPETSRKSKKVEIEEEVERLKNELQSTVFKYKQACEELFSTQNKVKMLSTEYLNESKRVNNAVEKEELQRNTAALEKERYMKAVKEVETAKALLAREFCQRQIAEVNALRTYLEKKKVIDQLLGTDHRYRKYTIEEIVTATEGFSPEKVIGEGGYGKVYQCSLDSTPAAVKVVRLDTPEKKQEFLKEVEVLSQLRHPHVVLLLGACPENGCLVYEYLENGSLEEYIFHRKNKPPLPWFIRFRVIFEVACGLAFLHSSKPEPIVHRDLKPGNILLNRNYVSKIADVGLAKLVTDVAPDNVTMYRNSVLAGTLHYIDPEYHRTGTIRPKSDLYAFGIIILQLLTARNPSGIVPAVENAVKKGTLTEMLDKSVTDWPLAETEELARIGLKCAEFRCRDRPDLKSEVIPVLKRLVETANSKVKKEGSNLRAPSHYFCPILREIMEEPEIAADGFTYERKAILAWLEKHNISPVTRQKLDHFKLTPNHTLRSAIRDWKSRVRFSNVVV

SEQ ID NO: 70941 - protein, 756 aa, Arabidopsis thaliana
  peptide (1)..(756): Ceres Seq. ID no. 3026738
  misc_feature (679)..(752): Pfam Name: U-box domain Pfam Description: U-box domain
  misc_feature (169)..(750): Homolog of NCBI NO: 22327904 NR Description: similar to putative protein kinase; protein id:
  misc_feature (1)..(748): Homolog of NCBI NO: 15241414 NR Description: putative protein; protein id: At5g51270.1
  misc_feature (1)..(749): Homolog of NCBI NO: 30697549 NR Description: protein kinase family [Arabidopsis thaliana]
  misc_feature (204)..(750): Homolog of NCBI NO: 15240280 NR Description: putative protein; protein id: At5g61550.1
  misc_feature (246)..(749): Homolog of NCBI NO: 9758471 NR Description: contains similarity to receptor-like protein
  misc_feature (256)..(747): Homolog of NCBI NO: 15234952 NR Description: putative Ser Thr protein kinase; protein id:
  misc_feature (39)..(663): Homolog of NCBI NO: 15239834 NR Description: putative receptor - like kinase; protein id:
  misc_feature (222)..(663): Homolog of NCBI NO: 15224129 NR Description: putative protein kinase; protein id: At2g24370.1
  misc_feature (162)..(663): Homolog of NCBI NO: 21902013 NR Description: putative serine threonine kinase [Oryza sativa
  misc_feature (59)..(668): Homolog of NCBI NO: 15239600 NR Description: putative protein; protein id: At5g26150.1
MIHVIPTITSIPTPTGDRLPVEEVEESVVEMYVRDVKKEYETVFVPFLKMCKSTRSTKCKVETLLLEYDDPAKALVRLISKSGVNSLRYFRSRRTKGTGVPLTVLRYAPETCEVYIVCKDRITTKSMDPLINREPCTSPHAAATAHDFLRDWAASFHTLRSPTLPDPRQSTEAGTRRSASARELRFEALSLTCNKPKTPQSSKASSATTPEIFRRRRGSDIPQLNYSDFDKTCTKPQSNVENIVSEHRDSDRSPPETSRKSKKVEIEEEVERLKNELQSTVFKYKQACEELFSTQNKVKMLSTEYLNESKRVNNAVEKEELQRNTAALEKERYMKAVKEVETAKALLAREFCQRQIAEVNALRTYLEKKKVIDQLLGTDHRYRKYTIEEIVTATEGFSPEKVIGEGGYGKVYQCSLDSTPAAVKVVRLDTPEKKQEFLKEVEVLSQLRHPHVVLLLGACPENGCLVYEYLENGSLEEYIFHRKNKPPLPWFIRFRVIFEVACGLAFLHSSKPEPIVHRDLKPGNILLNRNYVSKIADVGLAKLVTDVAPDNVTMYRNSVLAGTLHYIDPEYHRTGTIRPKSDLYAFGIIILQLLTARNPSGIVPAVENAVKKGTLTEMLDKSVTDWPLAETEELARIGLKCAEFRCRDRPDLKSEVIPVLKRLVETANSKVKKEGSNLRAPSHYFCPILREIMEEPEIAADGFTYERKAILAWLEKHNISPVTRQKLDHFKLTPNHTLRSAIRDWKSRVRFSNVVV

SEQ ID NO: 70942 - protein, 726 aa, Arabidopsis thaliana
  peptide (1)..(726): Ceres Seq. ID no. 3026739
  misc_feature (649)..(722): Pfam Name: U-box domain Pfam Description: U-box domain
  misc_feature (139)..(720): Homolog of NCBI NO: 22327904 NR Description: similar to putative protein kinase; protein id:
  misc_feature (1)..(718): Homolog of NCBI NO: 15241414 NR Description: putative protein; protein id: At5g51270.1
  misc_feature (1)..(719): Homolog of NCBI NO: 30697549 NR Description: protein kinase family [Arabidopsis thaliana]
  misc_feature (174)..(720): Homolog of NCBI NO: 15240280 NR Description: putative protein; protein id: At5g61550.1
  misc_feature (216)..(719): Homolog of NCBI NO: 9758471 NR Description: contains similarity to receptor-like protein
  misc_feature (226)..(717): Homolog of NCBI NO: 15234952 NR Description: putative Ser Thr protein kinase; protein id:
  misc_feature (9)..(633): Homolog of NCBI NO: 15239834 NR Description: putative receptor - like kinase; protein id:
  misc_feature (192)..(633): Homolog of NCBI NO: 15224129 NR Description: putative protein kinase; protein id: At2g24370.1
  misc_feature (132)..(633): Homolog of NCBI NO: 21902013 NR Description: putative serine threonine kinase [Oryza sativa
  misc_feature (29)..(638): Homolog of NCBI NO: 15239600 NR Description: putative protein; protein id: At5g26150.1
MYVRDVKKEYETVFVPFLKMCKSTRSTKCKVETLLLEYDDPAKALVRLISKSGVNSLRYFRSRRTKGTGVPLTVLRYAPETCEVYIVCKDRITTKSMDPLINREPCTSPHAAATAHDFLRDWAASFHTLRSPTLPDPRQSTEAGTRRSASARELRFEALSLTCNKPKTPQSSKASSATTPEIFRRRRGSDIPQLNYSDFDKTCTKPQSNVENIVSEHRDSDRSPPETSRKSKKVEIEEEVERLKNELQSTVFKYKQACEELFSTQNKVKMLSTEYLNESKRVNNAVEKEELQRNTAALEKERYMKAVKEVETAKALLAREFCQRQIAEVNALRTYLEKKKVIDQLLGTDHRYRKYTIEEIVTATEGFSPEKVIGEGGYGKVYQCSLDSTPAAVKVVRLDTPEKKQEFLKEVEVLSQLRHPHVVLLLGACPENGCLVYEYLENGSLEEYIFHRKNKPPLPWFIRFRVIFEVACGLAFLHSSKPEPIVHRDLKPGNILLNRNYVSKIADVGLAKLVTDVAPDNVTMYRNSVLAGTLHYIDPEYHRTGTIRPKSDLYAFGIIILQLLTARNPSGIVPAVENAVKKGTLTEMLDKSVTDWPLAETEELARIGLKCAEFRCRDRPDLKSEVIPVLKRLVETANSKVKKEGSNLRAPSHYFCPILREIMEEPEIAADGFTYERKAILAWLEKHNISPVTRQKLDHFKLTPNHTLRSAIRDWKSRVRFSNVVV

SEQ ID NO: 70943 - DNA, 1446 bp, Arabidopsis thaliana
  misc_feature (1)..(1446): Ceres Seq. ID no. 3026804
  misc_feature: MA Experiment ID: 20000314 Result: Down-regulated in Transcription
  misc_feature: MA Experiment 20000314 PARAMETER Experiment Name: At_14day_Shoots-Roots_Sub_P Parameter: Age (day) Value: 14
  misc_feature: MA Experiment 20000314 PARAMETER Experiment Name: At_14day_Shoots-Roots_Sub_P Parameter: Organism Value: A. thaliana
  misc_feature: MA Experiment 20000314 PARAMETER Experiment Name: At_14day_Shoots-Roots_Sub_P Parameter: Plant Line Value: WS
  misc_feature: MA Experiment 20000314 PARAMETER Experiment Name: At_14day_Shoots-Roots_Sub_P Parameter: Tissue Value: Roots vs. Whole Plant
  misc_feature: MA Experiment ID: 20000355 Result: Down-regulated in Transcription
  misc_feature: MA Experiment 20000355 PARAMETER Experiment Name: At_Siliques_Sub_P Parameter: Age (day) Value: 21
  misc_feature: MA Experiment 20000355 PARAMETER Experiment Name: At_Siliques_Sub_P Parameter: Organism Value: A. thaliana
  misc_feature: MA Experiment 20000355 PARAMETER Experiment Name: At_Siliques_Sub_P Parameter: Plant Line Value: WS
  misc_feature: MA Experiment 20000355 PARAMETER Experiment Name: At_Siliques_Sub_P Parameter: Tissue Value: Less Than 5mm Siliques vs. Whole Plant
atgaagaacttaaagatggttttcttcaagatcctctttatctctttaatggcaggattagccatgaaaggatctaagatcaacgtagaagatctccaaaagttctccctccaccatacacagaacaacctccaaaccataagccttctattgtttcttgtcgtttttgtgtggatcctctacatgttaacccgacctaaacccgtttaccttgttgatttctcctgctaccttccaccgtcgcatctcaaggtcagtatccaaaccctaatgggacacgcaagacgtgcaagagaagcaggcatgtgttggaagaacaaagagagcgaccatttagttgacttccaggagaagattcttgaacgttccggtcttggtcaagaaacctacatccccgagggtcttcagtgcttcccacttcagcaaggcatgggtgcttcacgtaaagagacggaagaagtaatcttcggagctcttgacaatctttttcgcaacaccggtgtaaaacctgatgatatcggtatattggtggtgaattctagcacgtttaatccaactccatcactcgcctccatgattgtgaacaagtacaaactcagagacaacatcaagagtttgaatcttggagggatgggttgcagtgccggagttatagctgttgatgtcgctaagggattactacaagttcataggaacacttatgctattgtagtaagcacagagaacatcactcagaacttatacttggggaaaaacaaatcaatgctagtcacaaactgtttgttccgcgttggtggtgctgcggttctgctttcaaacagatctagagaccgtaaccgcgccaaatacgagcttgttcacaccgtacggatccataccggatcagatgataggtcgttcgaatgtgcgacacaagaagaggatgaagatggtataattggagttaccttgacaaagaatctacctatggtggctgcaaggactcttaagataaatatcgcaactttgggtcctcttgtacttccattaaaagagaagctagccttctttattacttttgtcaagaagaagtatttcaagccagagttaaggaattatacaccagatttcaagcttgcctttgagcatttctgtatccacgctggtggaagagctctaatagatgagctggagaagaaccttaagctttctccgttacacgtagaggcgtcaagaatgacactacacaggtttggtaacacttcttctagctcaatctggtacgagttagcttatacagaagctaaaggaaggatgaaggaaggagataggatttggcagattgctttggggtcaggttttaagtgtaacagttcagtatgggtggctctgcgagacgttaagccttcagctaacagtccatgggaagactgtatggatagatatccggttgagattgatatttaa

SEQ ID NO: 70944 - protein, 481 aa, Arabidopsis thaliana
  peptide (1)..(481): Ceres Seq. ID no. 3026805
  misc_feature (312)..(458): Pfam Name: Chalcone and stilbene synthases, C-terminal domain Pfam Description: Chalcone and stilbene synthases, C-terminal
  misc_feature (1)..(481): Homolog of NCBI NO: 30679326 NR Description: fatty acid elongase 1 (FAE1), putative
  misc_feature (6)..(481): Homolog of NCBI NO: 25411602 NR Description: probable fatty acid elongase [imported] - thaliana >gi|4115364|gb|AAD03366.1| putative fatty acid elongase
  misc_feature (1)..(481): Homolog of NCBI NO: 15235309 NR Description: fatty acid elongase - like protein; protein id: [Arabidopsis thaliana] >gi|7484964|pir||T04771 fatty acid
  misc_feature (8)..(480): Homolog of NCBI NO: 15236144 NR Description: fatty acid elongase 1; protein id: At4g34520.1
  misc_feature (8)..(480): Homolog of NCBI NO: 30424122 NR Description: beta-ketoacyl-CoA synthase FAE1.2 [Brassica
  misc_feature (20)..(479): Homolog of NCBI NO: 15223556 NR Description: very-long-chain fatty acid condensing enzyme putative; protein id: At1g19440.1, supported by cDNA: 158882.
  misc_feature (9)..(480): Homolog of NCBI NO: 14495235 NR Description: beta-ketoacyl-CoA synthase [Brassica napus]
  misc_feature (9)..(480): Homolog of NCBI NO: 19919734 NR Description: 3-ketoacyl-CoA synthase [Brassica oleracea]
  misc_feature (9)..(480): Homolog of NCBI NO: 19919736 NR Description: 3-ketoacyl-CoA synthase [Brassica rapa]
  misc_feature (9)..(480): Homolog of NCBI NO: 30424120 NR Description: beta-ketoacyl-CoA synthase FAE1.1 [Brassica
MKNLKMVFFKILFISLMAGLAMKGSKINVEDLQKFSLHHTQNNLQTISLLLFLVVFVWILYMLTRPKPVYLVDFSCYLPPSHLKVSIQTLMGHARRAREAGMCWKNKESDHLVDFQEKILERSGLGQETYIPEGLQCFPLQQGMGASRKETEEVIFGALDNLFRNTGVKPDDIGILVVNSSTFNPTPSLASMIVNKYKLRDNIKSLNLGGMGCSAGVIAVDVAKGLLQVHRNTYAIVVSTENITQNLYLGKNKSMLVTNCLFRVGGAAVLLSNRSRDRNRAKYELVHTVRIHTGSDDRSFECATQEEDEDGIIGVTLTKNLPMVAARTLKINIATLGPLVLPLKEKLAFFITFVKKKYFKPELRNYTPDFKLAFEHFCIHAGGRALIDELEKNLKLSPLHVEASRMTLHRFGNTSSSSIWYELAYTEAKGRMKEGDRIWQIALGSGFKCNSSVWVALRDVKPSANSPWEDCMDRYPVEIDI

SEQ ID NO: 70945 - protein, 476 aa, Arabidopsis thaliana
  peptide (1)..(476): Ceres Seq. ID no. 3026806
  misc_feature (307)..(453): Pfam Name: Chalcone and stilbene synthases, C-terminal domain Pfam Description: Chalcone and stilbene synthases, C-terminal
  misc_feature (1)..(476): Homolog of NCBI NO: 30679326 NR Description: fatty acid elongase 1 (FAE1), putative
  misc_feature (1)..(476): Homolog of NCBI NO: 25411602 NR Description: probable fatty acid elongase [imported] - thaliana >gi|4115364|gb|AAD03366.1| putative fatty acid elongase
  misc_feature (1)..(476): Homolog of NCBI NO: 15235309 NR Description: fatty acid elongase - like protein; protein id: [Arabidopsis thaliana] >gi|7484964|pir||T04771 fatty acid
  misc_feature (3)..(475): Homolog of NCBI NO: 15236144 NR Description: fatty acid elongase 1; protein id: At4g34520.1
  misc_feature (3)..(475): Homolog of NCBI NO: 30424122 NR Description: beta-ketoacyl-CoA synthase FAE1.2 [Brassica
  misc_feature (15)..(474): Homolog of NCBI NO: 15223556 NR Description: very-long-chain fatty acid condensing enzyme putative; protein id: At1g19440.1, supported by cDNA: 158882.
  misc_feature (4)..(475): Homolog of NCBI NO: 14495235 NR Description: beta-ketoacyl-CoA synthase [Brassica napus]
  misc_feature (4)..(475): Homolog of NCBI NO: 19919734 NR Description: 3-ketoacyl-CoA synthase [Brassica oleracea]
  misc_feature (4)..(475): Homolog of NCBI NO: 19919736 NR Description: 3-ketoacyl-CoA synthase [Brassica rapa]
  misc_feature (4)..(475): Homolog of NCBI NO: 30424120 NR Description: beta-ketoacyl-CoA synthase FAE1.1 [Brassica
MVFFKILFISLMAGLAMKGSKINVEDLQKFSLHHTQNNLQTISLLLFLVVFVWILYMLTRPKPVYLVDFSCYLPPSHLKVSIQTLMGHARRAREAGMCWKNKESDHLVDFQEKILERSGLGQETYIPEGLQCFPLQQGMGASRKETEEVIFGALDNLFRNTGVKPDDIGILVVNSSTFNPTPSLASMIVNKYKLRDNIKSLNLGGMGCSAGVIAVDVAKGLLQVHRNTYAIVVSTENITQNLYLGKNKSMLVTNCLFRVGGAAVLLSNRSRDRNRAKYELVHTVRIHTGSDDRSFECATQEEDEDGIIGVTLTKNLPMVAARTLKINIATLGPLVLPLKEKLAFFITFVKKKYFKPELRNYTPDFKLAFEHFCIHAGGRALIDELEKNLKLSPLHVEASRMTLHRFGNTSSSSIWYELAYTEAKGRMKEGDRIWQIALGSGFKCNSSVWVALRDVKPSANSPWEDCMDRYPVEIDI

SEQ ID NO: 70946 - protein, 465 aa, Arabidopsis thaliana
  peptide (1)..(465): Ceres Seq. ID no. 3026807
  misc_feature (296)..(442): Pfam Name: Chalcone and stilbene synthases, C-terminal domain Pfam Description: Chalcone and stilbene synthases, C-terminal
  misc_feature (1)..(465): Homolog of NCBI NO: 30679326 NR Description: fatty acid elongase 1 (FAE1), putative
  misc_feature (1)..(465): Homolog of NCBI NO: 25411602 NR Description: probable fatty acid elongase [imported] - thaliana >gi|4115364|gb|AAD03366.1| putative fatty acid elongase
  misc_feature (1)..(465): Homolog of NCBI NO: 15235309 NR Description: fatty acid elongase - like protein; protein id: [Arabidopsis thaliana] >gi|7484964|pir||T04771 fatty acid
  misc_feature (1)..(464): Homolog of NCBI NO: 15236144 NR Description: fatty acid elongase 1; protein id: At4g34520.1
  misc_feature (1)..(464): Homolog of NCBI NO: 30424122 NR Description: beta-ketoacyl-CoA synthase FAE1.2 [Brassica
  misc_feature (4)..(463): Homolog of NCBI NO: 15223556 NR Description: very-long-chain fatty acid condensing enzyme putative; protein id: At1g19440.1, supported by cDNA: 158882.
  misc_feature (1)..(464): Homolog of NCBI NO: 14495235 NR Description: beta-ketoacyl-CoA synthase [Brassica napus]
  misc_feature (1)..(464): Homolog of NCBI NO: 19919734 NR Description: 3-ketoacyl-CoA synthase [Brassica oleracea]
  misc_feature (1)..(464): Homolog of NCBI NO: 19919736 NR Description: 3-ketoacyl-CoA synthase [Brassica rapa]
  misc_feature (1)..(464): Homolog of NCBI NO: 30424120 NR Description: beta-ketoacyl-CoA synthase FAE1.1 [Brassica
MAGLAMKGSKINVEDLQKFSLHHTQNNLQTISLLLFLVVFVWILYMLTRPKPVYLVDFSCYLPPSHLKVSIQTLMGHARRAREAGMCWKNKESDHLVDFQEKILERSGLGQETYIPEGLQCFPLQQGMGASRKETEEVIFGALDNLFRNTGVKPDDIGILVVNSSTFNPTPSLASMIVNKYKLRDNIKSLNLGGMGCSAGVIAVDVAKGLLQVHRNTYAIVVSTENITQNLYLGKNKSMLVTNCLFRVGGAAVLLSNRSRDRNRAKYELVHTVRIHTGSDDRSFECATQEEDEDGIIGVTLTKNLPMVAARTLKINIATLGPLVLPLKEKLAFFITFVKKKYFKPELRNYTPDFKLAFEHFCIHAGGRALIDELEKNLKLSPLHVEASRMTLHRFGNTSSSSIWYELAYTEAKGRMKEGDRIWQIALGSGFKCNSSVWVALRDVKPSANSPWEDCMDRYPVEIDI

SEQ ID NO: 70947 - DNA, 1095 bp, Arabidopsis thaliana
  misc_feature (1)..(1095): Ceres Seq. ID no. 3027024
  misc_feature: MA Experiment ID: 20000328 Result: Down-regulated in Transcription
  misc_feature: MA Experiment 20000328 PARAMETER Experiment Name: At_42deg_Heat_Sub_P Parameter: Age (day) Value: 14
  misc_feature: MA Experiment 20000328 PARAMETER Experiment Name: At_42deg_Heat_Sub_P Parameter: Organism Value: A. thaliana
  misc_feature: MA Experiment 20000328 PARAMETER Experiment Name: At_42deg_Heat_Sub_P Parameter: Plant Line Value: WS
  misc_feature: MA Experiment 20000328 PARAMETER Experiment Name: At_42deg_Heat_Sub_P Parameter: Temperature (deg C) Value: 42 vs. 22
  misc_feature: MA Experiment 20000328 PARAMETER Experiment Name: At_42deg_Heat_Sub_P Parameter: Timepoint (hr) Value: 6
  misc_feature: MA Experiment 20000328 PARAMETER Experiment Name: At_42deg_Heat_Sub_P Parameter: Tissue Value: Aerial
  misc_feature: MA Experiment ID: 20000440 Result: Up-regulated in Transcription
  misc_feature: MA Experiment 20000440 PARAMETER Experiment Name: At_Closed-Flower__Sub_P Parameter: Tissue Value: Closed Flower vs. Whole Plant
atgagattcagaagaggaagtagagttgaggtgtttagcatcaaagaagcctcttatggtgtgtggcgatcagcggagattatatctggtaatggtcacacttacaatgttagatattactcttttgaaattgctaacaatgaggttgttgaggatagagttccaaggaagataattaggccgtgtcctccgcaagtagatgttgatagatgggaagctggtgaattggttgaggttcttgataataatatttcatggaaaactgctactgtcttggaggtgttatctggaagatattatgttgttcggttacttggtgctaaagcagaactcacggttcacaaagtttacctcagggctagacaatcttggcaagatgaaagatgggttatgattggaaaggtatcttgttctgtgaagtcctccacgctgactggatcagatgaacaccagaatagaccttcaccatgtgattgggcggagtctgctgaatcatgcactagaagtcctaagaagatacgatcattggaggaagaaggacaccagcaccggtttgcttcttcttcagcacagaaggtatataatgatagttctgaacgtaggggtgttgaattgtacgtgaaagcttcgtgtaacgagaataaaagtggtttccgtcaaatggtcagggtaagatcaaaaaggtttagtgaatgtgttggtacaggaaactcagtctctaatagttgttatgatactgatgcatcctcagttggtagttgtagccctattagttatgatgagagtgacaaaccaacttcttttctagatggtgccgactcttgtagtagtgatgctgaatcttcaaaagaagcatctggatgcagagatgaagctaggcgaaaacattcattatcaggtaatggatcagtggtgagatcatgtaggcctgaactttacacttaccgtagtacactgacgaagttatttgcttctggctccctaagttgggatcaggaagcatcactaactgatctccgactttctcttaatatatcaaatgatgaacatttgatggagctaagaaatctcaagtctgccggtacccacagttaa

SEQ ID NO: 70948 - protein, 364 aa, Arabidopsis thaliana
  peptide (1)..(364): Ceres Seq. ID no. 3027025
  misc_feature (3)..(67): Pfam Name: Agenet domain Pfam Description: Agenet domain
  misc_feature (1)..(224): Homolog of NCBI NO: 15224760 NR Description: hypothetical protein; protein id: At2g25590.1
  misc_feature (1)..(364): Homolog of NCBI NO: 15236804 NR Description: putative protein; protein id: At4g32440.1
  misc_feature (1)..(252): Homolog of NCBI NO: 15241247 NR Description: putative protein; protein id: At5g20030.1, by cDNA: 142064. [Arabidopsis thaliana] unknown [Arabidopsis thaliana] >gi|27808580|gb|AAO24570.1|
  misc_feature (248)..(359): Homolog of NCBI NO: 15241247 NR Description: putative protein; protein id: At5g20030.1, by cDNA: 142064. [Arabidopsis thaliana] unknown [Arabidopsis thaliana] >gi|27808580|gb|AAO24570.1|
  misc_feature (250)..(360): Homolog of NCBI NO: 34393474 NR Description: hypothetical protein [Oryza sativa (japonica
MRFRRGSRVEVFSIKEASYGVWRSAEIISGNGHTYNVRYYSFEIANNEVVEDRVPRKIIRPCPPQVDVDRWEAGELVEVLDNNISWKTATVLEVLSGRYYVVRLLGAKAELTVHKVYLRARQSWQDERWVMIGKVSCSVKSSTLTGSDEHQNRPSPCDWAESAESCTRSPKKIRSLEEEGHQHRFASSSAQKVYNDSSERRGVELYVKASCNENKSGFRQMVRVRSKRFSECVGTGNSVSNSCYDTDASSVGSCSPISYDESDKPTSFLDGADSCSSDAESSKEASGCRDEARRKHSLSGNGSVVRSCRPELYTYRSTLTKLFASGSLSWDQEASLTDLRLSLNISNDEHLMELRNLKSAGTHS

SEQ ID NO: 70949 - protein, 234 aa, Arabidopsis thaliana
  peptide (1)..(234): Ceres Seq. ID no. 3027026
  misc_feature (1)..(94): Homolog of NCBI NO: 15224760 NR Description: hypothetical protein; protein id: At2g25590.1
  misc_feature (1)..(234): Homolog of NCBI NO: 15236804 NR Description: putative protein; protein id: At4g32440.1
  misc_feature (1)..(122): Homolog of NCBI NO: 15241247 NR Description: putative protein; protein id: At5g20030.1, by cDNA: 142064. [Arabidopsis thaliana] unknown [Arabidopsis thaliana] >gi|27808580|gb|AAO24570.1|
  misc_feature (118)..(229): Homolog of NCBI NO: 15241247 NR Description: putative protein; protein id: At5g20030.1, by cDNA: 142064. [Arabidopsis thaliana] unknown [Arabidopsis thaliana] >gi|27808580|gb|AAO24570.1|
  misc_feature (120)..(230): Homolog of NCBI NO: 34393474 NR Description: hypothetical protein [Oryza sativa (japonica
MIGKVSCSVKSSTLTGSDEHQNRPSPCDWAESAESCTRSPKKIRSLEEEGHQHRFASSSAQKVYNDSSERRGVELYVKASCNENKSGFRQMVRVRSKRFSECVGTGNSVSNSCYDTDASSVGSCSPISYDESDKPTSFLDGADSCSSDAESSKEASGCRDEARRKHSLSGNGSVVRSCRPELYTYRSTLTKLFASGSLSWDQEASLTDLRLSLNISNDEHLMELRNLKSAGTHS

SEQ ID NO: 70950 - DNA, 2160 bp, Arabidopsis thaliana
  misc_feature (1)..(2160): Ceres Seq. ID no. 3027471
  misc_feature: MA Experiment ID: 20000327 Result: Up-regulated in Transcription
  misc_feature: MA Experiment 20000327 PARAMETER Experiment Name: At_42deg_Heat_Sub_P Parameter: Age (day) Value: 14
  misc_feature: MA Experiment 20000327 PARAMETER Experiment Name: At_42deg_Heat_Sub_P Parameter: Organism Value: A. thaliana
  misc_feature: MA Experiment 20000327 PARAMETER Experiment Name: At_42deg_Heat_Sub_P Parameter: Plant Line Value: WS
  misc_feature: MA Experiment 20000327 PARAMETER Experiment Name: At_42deg_Heat_Sub_P Parameter: Temperature (deg C) Value: 42 vs. 22
  misc_feature: MA Experiment 20000327 PARAMETER Experiment Name: At_42deg_Heat_Sub_P Parameter: Timepoint (hr) Value: 1
  misc_feature: MA Experiment 20000327 PARAMETER Experiment Name: At_42deg_Heat_Sub_P Parameter: Tissue Value: Aerial
  misc_feature: MA Experiment ID: 20000328 Result: Up-regulated in Transcription
  misc_feature: MA Experiment 20000328 PARAMETER Experiment Name: At_42deg_Heat_Sub_P Parameter: Age (day) Value: 14
  misc_feature: MA Experiment 20000328 PARAMETER Experiment Name: At_42deg_Heat_Sub_P Parameter: Organism Value: A. thaliana
  misc_feature: MA Experiment 20000328 PARAMETER Experiment Name: At_42deg_Heat_Sub_P Parameter: Plant Line Value: WS
  misc_feature: MA Experiment 20000328 PARAMETER Experiment Name: At_42deg_Heat_Sub_P Parameter: Temperature (deg C) Value: 42 vs. 22
  misc_feature: MA Experiment 20000328 PARAMETER Experiment Name: At_42deg_Heat_Sub_P Parameter: Timepoint (hr) Value: 6
  misc_feature: MA Experiment 20000328 PARAMETER Experiment Name: At_42deg_Heat_Sub_P Parameter: Tissue Value: Aerial
atggctcaagaggcaaatcctgtcaccccaaccatcgctccaccagctttctctctggaggacctcaaagccatcttcgccaccatgactaaagatctctccgatgctgtcacagaaaccaaccgccgattcgacgagttagtaaggggaatcccgcaacatccaaactccaagataacaccgccgagatcaattcaaccgcgtggcctcaccttcgacttcacggacgcacagtccaacagggtcaacaccatgttcccagggctacaccatcatgtcagtcagcacgggagaccacccatgccccttgaagaggaagacgctaagttggcggggaagtctcaaccacccaaaataaaagacagagcgcgggaagacttccaggagccacaatggggcgatttcaaacatgcccaaggtgaacacgcgaacaaaggacaacacttgctggagaatcatccaaaccaagaggaagatcatgcggaggaattcaggaccctagagaatgaactcccggggccttcaaaaagatggaggggacaacaaccccagcgagctccagaccacccccgtggaagaatttccacgaatatggtcggtctgtccgacgatgaagattcagtgtcagctctaaagaaaagagcacgacaagtatgcagcgttagggtcgtcccagaggctgcaccgctaagccaagagcccatcgtcttcacaccagaggacgctagtggtattcagcatccgcataacgacgcactggtcgtcaaactagtaatggaagattttgatgtggagcgggtcttgatcaacactggcagctcggtcaacttgattttcttgaaaactttcttaaagatggggatctccgaaagaaagataatgccaaaaatccggcctttgacgagatacgatggagaagcgaagatgtccataggagaaattaagctccttgtccaggcggacggcatcacccagaaaactaagttcgttgtcattgattcggaaccgatctacaacgccatcctgggaagtctctggatttactcgatgagagctatcccctcaacctaccatctgtgtttgaagttcccaatagcaacgggaatcttcaccctgtacgagccatcccgaacagtcggtatcggaagagaactagagggggagatgaaggaaaagctgattgccttcctgaaatcaaggtcgtccaccttcgcttggtccacaaaggatatgactgggatcgctcaaaaggtaacctgtcacaaattcaatatggatccgacttttaaaccagttcgccagaagcgcaggcggttgggatctgatcgtgccaaggctgttcaaaacgaggtcgaaagactgctgaaggctggtctgatcaaggaagtccaatattctgaatggctagccaacccggttgtagacaagaagaaaaacgggaagtggagagtttgtgtcgattataccgatctgaatagagcgtgcccaaaagacagttatcctctcccacacatagaccgcctcgtagaggcgactgccgggaatcagcttttgtccttcatggacgctttcttgggagaagtaccaaggctgacaggtcgcatcgcagctttgaatcgctttatcgcccgatcaacagacaagtgcctttctgtctacaaacttctacgtggcaataaggatttccatttggatgagaaatgtgaaaccgccttccaggagctcaaatcctaccttatgagcaggacgatcttggccaaacctgaggttggtgagactctatatatatatgtctcgatgtcaagttcggcggtgagtggagtgttagtaagagacgatcatggtaatgaaaaactggagaagctagcattggcagttataaaggctgctcatttcataaccgaactatctccatgtgtgatcgatgaagtccctaaagaaaactggatactctacgcaaatggctcttcatcactacaaggttacggtcttggaatcctactccagtctccgaccagggaggtgcttgaacagttgctccgacttccattcaaagcatccaacaacaaagcgcagtacgaggcacttctcgctggacttcgcctcactgaagggattggggccaaacaaatcaaagcctttagcgaactcaactcgtag

SEQ ID NO: 70951 - protein, 719 aa, Arabidopsis thaliana
  peptide (1)..(719): Ceres Seq. ID no. 3027472
  misc_feature (467)..(526): Pfam Name: Reverse transcriptase (RNA-dependent DNA polymerase) Pfam Description: Reverse transcriptase (RNA-dependent DNA
  misc_feature (136)..(453): Homolog of NCBI NO: 15237107 NR Description: putative protein; protein id: At4g20490.1
  misc_feature (3)..(171): Homolog of NCBI NO: 15237107 NR Description: putative protein; protein id: At4g20490.1
  misc_feature (172)..(386): Homolog of NCBI NO: 30686804 NR Description: retrotransposon gag protein family [Arabidopsis
  misc_feature (374)..(526): Homolog of NCBI NO: 30686804 NR Description: retrotransposon gag protein family [Arabidopsis
  misc_feature (527)..(618): Homolog of NCBI NO: 30686804 NR Description: retrotransposon gag protein family [Arabidopsis
  misc_feature (570)..(716): Homolog of NCBI NO: 30686804 NR Description: retrotransposon gag protein family [Arabidopsis
  misc_feature (164)..(387): Homolog of NCBI NO: 25405445 NR Description: hypothetical protein F11M15.5 [imported] - thaliana >gi|4836930|gb|AAD30632.1|AC006085_5 Hypothetical
  misc_feature (525)..(713): Homolog of NCBI NO: 25405445 NR Description: hypothetical protein F11M15.5 [imported] - thaliana >gi|4836930|gb|AAD30632.1|AC006085_5 Hypothetical
  misc_feature (410)..(524): Homolog of NCBI NO: 25405445 NR Description: hypothetical protein F11M15.5 [imported] - thaliana >gi|4836930|gb|AAD30632.1|AC006085_5 Hypothetical
  misc_feature (158)..(378): Homolog of NCBI NO: 18412374 NR Description: hypothetical protein; protein id: At4g03800.1
MAQEANPVTPTIAPPAFSLEDLKAIFATMTKDLSDAVTETNRRFDELVRGIPQHPNSKITPPRSIQPRGLTFDFTDAQSNRVNTMFPGLHHHVSQHGRPPMPLEEEDAKLAGKSQPPKIKDRAREDFQEPQWGDFKHAQGEHANKGQHLLENHPNQEEDHAEEFRTLENELPGPSKRWRGQQPQRAPDHPRGRISTNMVGLSDDEDSVSALKKRARQVCSVRVVPEAAPLSQEPIVFTPEDASGIQHPHNDALVVKLVMEDFDVERVLINTGSSVNLIFLKTFLKMGISERKIMPKIRPLTRYDGEAKMSIGEIKLLVQADGITQKTKFVVIDSEPIYNAILGSLWIYSMRAIPSTYHLCLKFPIATGIFTLYEPSRTVGIGRELEGEMKEKLIAFLKSRSSTFAWSTKDMTGIAQKVTCHKFNMDPTFKPVRQKRRRLGSDRAKAVQNEVERLLKAGLIKEVQYSEWLANPVVDKKKNGKWRVCVDYTDLNRACPKDSYPLPHIDRLVEATAGNQLLSFMDAFLGEVPRLTGRIAALNRFIARSTDKCLSVYKLLRGNKDFHLDEKCETAFQELKSYLMSRTILAKPEVGETLYIYVSMSSSAVSGVLVRDDHGNEKLEKLALAVIKAAHFITELSPCVIDEVPKENWILYANGSSSLQGYGLGILLQSPTREVLEQLLRLPFKASNNKAQYEALLAGLRLTEGIGAKQIKAFSELNS

SEQ ID NO: 70952 - protein, 691 aa, Arabidopsis thaliana
  peptide (1)..(691): Ceres Seq. ID no. 3027473
  misc_feature (439)..(498): Pfam Name: Reverse transcriptase (RNA-dependent DNA polymerase) Pfam Description: Reverse transcriptase (RNA-dependent DNA
  misc_feature (108)..(425): Homolog of NCBI NO: 15237107 NR Description: putative protein; protein id: At4g20490.1
  misc_feature (1)..(143): Homolog of NCBI NO: 15237107 NR Description: putative protein; protein id: At4g20490.1
  misc_feature (144)..(358): Homolog of NCBI NO: 30686804 NR Description: retrotransposon gag protein family [Arabidopsis
  misc_feature (346)..(498): Homolog of NCBI NO: 30686804 NR Description: retrotransposon gag protein family [Arabidopsis
  misc_feature (499)..(590): Homolog of NCBI NO: 30686804 NR Description: retrotransposon gag protein family [Arabidopsis
  misc_feature (542)..(688): Homolog of NCBI NO: 30686804 NR Description: retrotransposon gag protein family [Arabidopsis
  misc_feature (136)..(359): Homolog of NCBI NO: 25405445 NR Description: hypothetical protein F11M15.5 [imported] - thaliana >gi|4836930|gb|AAD30632.1|AC006085_5 Hypothetical
  misc_feature (497)..(685): Homolog of NCBI NO: 25405445 NR Description: hypothetical protein F11M15.5 [imported] - thaliana >gi|4836930|gb|AAD30632.1|AC006085_5 Hypothetical
  misc_feature (382)..(496): Homolog of NCBI NO: 25405445 NR Description: hypothetical protein F11M15.5 [imported] - thaliana >gi|4836930|gb|AAD30632.1|AC006085_5 Hypothetical
  misc_feature (130)..(350): Homolog of NCBI NO: 18412374 NR Description: hypothetical protein; protein id: At4g03800.1
MTKDLSDAVTETNRRFDELVRGIPQHPNSKITPPRSIQPRGLTFDFTDAQSNRVNTMFPGLHHHVSQHGRPPMPLEEEDAKLAGKSQPPKIKDRAREDFQEPQWGDFKHAQGEHANKGQHLLENHPNQEEDHAEEFRTLENELPGPSKRWRGQQPQRAPDHPRGRISTNMVGLSDDEDSVSALKKRARQVCSVRVVPEAAPLSQEPIVFTPEDASGIQHPHNDALVVKLVMEDFDVERVLINTGSSVNLIFLKTFLKMGISERKIMPKIRPLTRYDGEAKMSIGEIKLLVQADGITQKTKFVVIDSEPIYNAILGSLWIYSMRAIPSTYHLCLKFPIATGIFTLYEPSRTVGIGRELEGEMKEKLIAFLKSRSSTFAWSTKDMTGIAQKVTCHKFNMDPTFKPVRQKRRRLGSDRAKAVQNEVERLLKAGLIKEVQYSEWLANPVVDKKKNGKWRVCVDYTDLNRACPKDSYPLPHIDRLVEATAGNQLLSFMDAFLGEVPRLTGRIAALNRFIARSTDKCLSVYKLLRGNKDFHLDEKCETAFQELKSYLMSRTILAKPEVGETLYIYVSMSSSAVSGVLVRDDHGNEKLEKLALAVIKAAHFITELSPCVIDEVPKENWILYANGSSSLQGYGLGILLQSPTREVLEQLLRLPFKASNNKAQYEALLAGLRLTEGIGAKQIKAFSELNS

SEQ ID NO: 70953 - protein, 635 aa, Arabidopsis thaliana
  peptide (1)..(635): Ceres Seq. ID no. 3027474
  misc_feature (383)..(442): Pfam Name: Reverse transcriptase (RNA-dependent DNA polymerase) Pfam Description: Reverse transcriptase (RNA-dependent DNA
  misc_feature (52)..(369): Homolog of NCBI NO: 15237107 NR Description: putative protein; protein id: At4g20490.1
  misc_feature (1)..(87): Homolog of NCBI NO: 15237107 NR Description: putative protein; protein id: At4g20490.1
  misc_feature (88)..(302): Homolog of NCBI NO: 30686804 NR Description: retrotransposon gag protein family [Arabidopsis
  misc_feature (290)..(442): Homolog of NCBI NO: 30686804 NR Description: retrotransposon gag protein family [Arabidopsis
  misc_feature (443)..(534): Homolog of NCBI NO: 30686804 NR Description: retrotransposon gag protein family [Arabidopsis
  misc_feature (486)..(632): Homolog of NCBI NO: 30686804 NR Description: retrotransposon gag protein family [Arabidopsis
  misc_feature (80)..(303): Homolog of NCBI NO: 25405445 NR Description: hypothetical protein F11M15.5 [imported] - thaliana >gi|4836930|gb|AAD30632.1|AC006085_5 Hypothetical
  misc_feature (441)..(629): Homolog of NCBI NO: 25405445 NR Description: hypothetical protein F11M15.5 [imported] - thaliana >gi|4836930|gb|AAD30632.1|AC006085_5 Hypothetical
  misc_feature (326)..(440): Homolog of NCBI NO: 25405445 NR Description: hypothetical protein F11M15.5 [imported] - thaliana >gi|4836930|gb|AAD30632.1|AC006085_5 Hypothetical
  misc_feature (74)..(294): Homolog of NCBI NO: 18412374 NR Description: hypothetical protein; protein id: At4g03800.1
MFPGLHHHVSQHGRPPMPLEEEDAKLAGKSQPPKIKDRAREDFQEPQWGDFKHAQGEHANKGQHLLENHPNQEEDHAEEFRTLENELPGPSKRWRGQQPQRAPDHPRGRISTNMVGLSDDEDSVSALKKRARQVCSVRVVPEAAPLSQEPIVFTPEDASGIQHPHNDALVVKLVMEDFDVERVLINTGSSVNLIFLKTFLKMGISERKIMPKIRPLTRYDGEAKMSIGEIKLLVQADGITQKTKFVVIDSEPIYNAILGSLWIYSMRAIPSTYHLCLKFPIATGIFTLYEPSRTVGIGRELEGEMKEKLIAFLKSRSSTFAWSTKDMTGIAQKVTCHKFNMDPTFKPVRQKRRRLGSDRAKAVQNEVERLLKAGLIKEVQYSEWLANPVVDKKKNGKWRVCVDYTDLNRACPKDSYPLPHIDRLVEATAGNQLLSFMDAFLGEVPRLTGRIAALNRFIARSTDKCLSVYKLLRGNKDFHLDEKCETAFQELKSYLMSRTILAKPEVGETLYIYVSMSSSAVSGVLVRDDHGNEKLEKLALAVIKAAHFITELSPCVIDEVPKENWILYANGSSSLQGYGLGILLQSPTREVLEQLLRLPFKASNNKAQYEALLAGLRLTEGIGAKQIKAFSELNS

SEQ ID NO: 70954 - DNA, 753 bp, Arabidopsis thaliana
  misc_feature (1)..(753): Ceres Seq. ID no. 3027620
  misc_feature: MA Experiment ID: 20000184 Result: Down-regulated in Transcription
  misc_feature: MA Experiment 20000184 PARAMETER Experiment Name: At_Shoots__P Parameter: Age (day) Value: 7
  misc_feature: MA Experiment 20000184 PARAMETER Experiment Name: At_Shoots__P Parameter: Tissue Value: Shoots vs. Whole Plant
  misc_feature: MA Experiment ID: 20000265 Result: Up-regulated in Transcription
  misc_feature: MA Experiment 20000265 PARAMETER Experiment Name: At_Open_Flower_P Parameter: Age (day) Value: 21
  misc_feature: MA Experiment 20000265 PARAMETER Experiment Name: At_Open_Flower_P Parameter: Plant Line Value: WS
  misc_feature: MA Experiment 20000265 PARAMETER Experiment Name: At_Open_Flower_P Parameter: Tissue Value: Closed Flower vs. Whole Plant
  misc_feature: MA Experiment ID: 20000495 Result: Up-regulated in Transcription
  misc_feature: MA Experiment 20000495 PARAMETER Experiment Name: At_Guard_Cells_P Parameter: Harvest Date Value: 8/2/2002
  misc_feature: MA Experiment 20000495 PARAMETER Experiment Name: At_Guard_Cells_P Parameter: Organism Value: A. thaliana
  misc_feature: MA Experiment 20000495 PARAMETER Experiment Name: At_Guard_Cells_P Parameter: Tissue Value: Guard Cells vs. Leaves
  misc_feature: MA Experiment ID: 20001911 Result: Up-regulated in Transcription
  misc_feature: MA Experiment 20001911 PARAMETER Experiment Name: At_Drought_Reproduction_P Parameter: Age (day) Value: 40
  misc_feature: MA Experiment 20001911 PARAMETER Experiment Name: At_Drought_Reproduction_P Parameter: Organism Value: A. thaliana
  misc_feature: MA Experiment 20001911 PARAMETER Experiment Name: At_Drought_Reproduction_P Parameter: Plant Line Value: WS
  misc_feature: MA Experiment 20001911 PARAMETER Experiment Name: At_Drought_Reproduction_P Parameter: Timepoint (day) Value: 10
  misc_feature: MA Experiment 20001911 PARAMETER Experiment Name: At_Drought_Reproduction_P Parameter: Tissue Value: Flowers
  misc_feature: MA Experiment 20001911 PARAMETER Experiment Name: At_Drought_Reproduction_P Parameter: Treatment Value: Drought vs. No Drought
atgggagacggaagagaaggagactgggaatgtttaggatgcagaaacaggaattatgcgtttagatcattctgtaacagatgcaagcagcctcgtcttatcatggataataatacttctccaaactctaagtggcttcctcgtatcggcgattggatctgcactggttgtactaacaacaattatgcatcacgagaaaagtgcaagaaatgtgggcaatctaaggaagtagcagcattgtcagcacttgctatccctggagcttctcttcaaactcatctccattacttcacccgtggacctgagtcacatgatcaacctggttctttactcgcattctctaacgctacaaatcaagcttcggttcataaagaatggaggagtggtgactggatttgcagatgtggttttcacaattattcctctcgtatacagtgcaaaaagtgcaatgaaatagctccactagcccttggtacaaagagattagcatcagaagctttggctcatgaatgggatagcaaaagactgaatcaaggatatacaagcatgcaaacacagtcagcgatatatgcatcttttcctggtatgagcctaggaagggtctcaaattggcaacttcctctcccgtttctacaacaacactcaacacctgctttacttggaatgggagtgaaacaatggcgtgatggcgactggatgtgtacaaattgcaagaatcacaattatgcatcacgagcagagtgcaataggtga

SEQ ID NO: 70955 - protein, 250 aa, Arabidopsis thaliana
  peptide (1)..(250): Ceres Seq. ID no. 3027621
  misc_feature (5)..(34): Pfam Name: Zn-finger in Ran binding protein and others Pfam Description: Zn-finger in Ran binding protein and others
  misc_feature (1)..(250): Homolog of NCBI NO: 15227939 NR Description: similar to putative zinc finger protein; protein At2g17975.1 [Arabidopsis thaliana] >gi|7486984|pir||T00827
  misc_feature (157)..(250): Homolog of NCBI NO: 38345582 NR Description: OSJNBa0027H06.18 [Oryza sativa (japonica
  misc_feature (114)..(188): Homolog of NCBI NO: 38345582 NR Description: OSJNBa0027H06.18 [Oryza sativa (japonica
  misc_feature (5)..(160): Homolog of NCBI NO: 15239445 NR Description: putative protein; protein id: At5g25490.1 thaliana] >gi|26452848|dbj|BAC43503.1| unknown protein thaliana] >gi|28973315|gb|AAO63982.1| unknown protein
  misc_feature (127)..(180): Homolog of NCBI NO: 5679336 NR Description: putative zinc finger protein [Oryza sativa]
  misc_feature (50)..(92): Homolog of NCBI NO: 5679336 NR Description: putative zinc finger protein [Oryza sativa]
  misc_feature (127)..(180): Homolog of NCBI NO: 5803246 NR Description: ESTs AU077984(C62969),D41648(S4289), correspond to a region of the predicted gene.~Similar to putative
  misc_feature (50)..(90): Homolog of NCBI NO: 5803246 NR Description: ESTs AU077984(C62969),D41648(S4289), correspond to a region of the predicted gene.~Similar to putative
  misc_feature (5)..(84): Homolog of NCBI NO: 34913970 NR Description: B1110C07.23 [Oryza sativa (japonica
  misc_feature (4)..(75): Homolog of NCBI NO: 15865325 NR Description: putative non-ribosomal nucleolar protein
MGDGREGDWECLGCRNRNYAFRSFCNRCKQPRLIMDNNTSPNSKWLPRIGDWICTGCTNNNYASREKCKKCGQSKEVAALSALAIPGASLQTHLHYFTRGPESHDQPGSLLAFSNATNQASVHKEWRSGDWICRCGFHNYSSRIQCKKCNEIAPLALGTKRLASEALAHEWDSKRLNQGYTSMQTQSAIYASFPGMSLGRVSNWQLPLPFLQQHSTPALLGMGVKQWRDGDWMCTNCKNHNYASRAECNR

SEQ ID NO: 70956 - protein, 216 aa, Arabidopsis thaliana
  peptide (1)..(216): Ceres Seq. ID no. 3027622
  misc_feature (123)..(216): Homolog of NCBI NO: 38345582 NR Description: OSJNBa0027H06.18 [Oryza sativa (japonica
  misc_feature (80)..(154): Homolog of NCBI NO: 38345582 NR Description: OSJNBa0027H06.18 [Oryza sativa (japonica
  misc_feature (1)..(126): Homolog of NCBI NO: 15239445 NR Description: putative protein; protein id: At5g25490.1 thaliana] >gi|26452848|dbj|BAC43503.1| unknown protein thaliana] >gi|28973315|gb|AAO63982.1| unknown protein
  misc_feature (93)..(146): Homolog of NCBI NO: 5679336 NR Description: putative zinc finger protein [Oryza sativa]
  misc_feature (16)..(58): Homolog of NCBI NO: 5679336 NR Description: putative zinc finger protein [Oryza sativa]
  misc_feature (93)..(146): Homolog of NCBI NO: 5803246 NR Description: ESTs AU077984(C62969),D41648(S4289), correspond to a region of the predicted gene.~Similar to putative
  misc_feature (16)..(56): Homolog of NCBI NO: 5803246 NR Description: ESTs AU077984(C62969),D41648(S4289), correspond to a region of the predicted gene.~Similar to putative
  misc_feature (1)..(50): Homolog of NCBI NO: 34913970 NR Description: B1110C07.23 [Oryza sativa (japonica
  misc_feature (1)..(41): Homolog of NCBI NO: 15865325 NR Description: putative non-ribosomal nucleolar protein
  misc_feature (1)..(216): Homolog of NCBI NO: 15227939 NR Description: similar to putative zinc finger protein; protein At2g17975.1 [Arabidopsis thaliana] >gi|7486984|pir||T00827
MDNNTSPNSKWLPRIGDWICTGCTNNNYASREKCKKCGQSKEVAALSALAIPGASLQTHLHYFTRGPESHDQPGSLLAFSNATNQASVHKEWRSGDWICRCGFHNYSSRIQCKKCNEIAPLALGTKRLASEALAHEWDSKRLNQGYTSMQTQSAIYASFPGMSLGRVSNWQLPLPFLQQHSTPALLGMGVKQWRDGDWMCTNCKNHNYASRAECNR

SEQ ID NO: 70957 - DNA, 1035 bp, Arabidopsis thaliana
  misc_feature (1)..(1035): Ceres Seq. ID no. 3028243
  misc_feature: MA Experiment ID: 20000315 Result: Down-regulated in Transcription
  misc_feature: MA Experiment 20000315 PARAMETER Experiment Name: At_14day_Shoots-Roots_Sub_P Parameter: Age (day) Value: 14
  misc_feature: MA Experiment 20000315 PARAMETER Experiment Name: At_14day_Shoots-Roots_Sub_P Parameter: Organism Value: A. thaliana
  misc_feature: MA Experiment 20000315 PARAMETER Experiment Name: At_14day_Shoots-Roots_Sub_P Parameter: Plant Line Value: WS
  misc_feature: MA Experiment 20000315 PARAMETER Experiment Name: At_14day_Shoots-Roots_Sub_P Parameter: Tissue Value: Shoots vs. Whole Plant
  misc_feature: MA Experiment ID: 20000440 Result: Up-regulated in Transcription
  misc_feature: MA Experiment 20000440 PARAMETER Experiment Name: At_Closed-Flower__Sub_P Parameter: Tissue Value: Closed Flower vs. Whole Plant
atgggcgacgaacactctctcatcccaaaggatagttttgtcttcaagcttcctaaaaaatcaccacttgtgttgagaacggttgttctcttgtttgtgatggtttgtactgtttatatttgctctatttgtttaaagcaaattggtgttgtccctagtgctggattcttgaatgttgaagtgtttgagagaccttgtcctgagcctaacattcaaccttgggacattccttatgttcactatcctaaacctaagacctatagcagggaggaatgttcgtgcaatcccgttaggtattttgctattctctcgatgcagagatctggtagcggttggtttgagactttacttaacaatcatactaacattagctcgaacggggagatcttttcggttaaagataggagggctaatgtgtcgaccatttttgagacgttggacaaagtatataatttagattggttgagtagtgcttctaagaacgagtgtacatctgctgttggtttgaaatggatgcttaatcagggtctaatgaaaaaccatgaagagatagtagaatacttcaaaacccgaggcgtgtctgctattttcctctttagaagaaacctcttgcgccggatgatttcagttcttgcaaactcttacgatagagatgctaagccattaaacggaactcacaagtcccatgtccattcccctaaagaggctgagatattggcgcgctacaaaccattgatcaacacgagtcttttgatacctgatctgaagcaggttcaagagatgacttcaaaagcacttgcttactttaacaccacgcggcatatcttcctctactacgaagatgttgtcaagaaccgcaccaaactagacgatgtacaagagtttctgaaggtcccgaaactagatttaaagagtaggcaagtgaagattcatcatggtccgttgtcacaacacgtacaaaattgggaagaggtgcaaaagacactgaaagggaccggtttcgaaaactttctacttgaagattaccgcaggtga

SEQ ID NO: 70958 - protein, 344 aa, Arabidopsis thaliana
  peptide (1)..(344): Ceres Seq. ID no. 3028244
  misc_feature (100)..(326): Pfam Name: Sulfotransferase domain Pfam Description: Sulfotransferase domain
  misc_feature (1)..(344): Homolog of NCBI NO: 40823013 NR Description: At2g15730 [Arabidopsis thaliana]
  misc_feature (1)..(342): Homolog of NCBI NO: 22329158 NR Description: hypothetical protein; protein id: At4g34420.1
  misc_feature (8)..(343): Homolog of NCBI NO: 29824462 NR Description: unknown protein [Oryza sativa (japonica
  misc_feature (1)..(116): Homolog of NCBI NO: 30679514 NR Description: expressed protein [Arabidopsis thaliana]
  misc_feature (235)..(344): Homolog of NCBI NO: 30679514 NR Description: expressed protein [Arabidopsis thaliana]
  misc_feature (13)..(344): Homolog of NCBI NO: 33146729 NR Description: unknown protein [Oryza sativa (japonica
  misc_feature (91)..(312): Homolog of NCBI NO: 15229813 NR Description: hypothetical protein; protein id: At3g50620.1
  misc_feature (235)..(344): Homolog of NCBI NO: 25411661 NR Description: hypothetical protein At2g15730 [imported] - thaliana >gi|4335739|gb|AAD17417.1| hypothetical protein
  misc_feature (121)..(185): Homolog of NCBI NO: 25411661 NR Description: hypothetical protein At2g15730 [imported] - thaliana >gi|4335739|gb|AAD17417.1| hypothetical protein
  misc_feature (121)..(185): Homolog of NCBI NO: 30679514 NR Description: expressed protein [Arabidopsis thaliana]
MGDEHSLIPKDSFVFKLPKKSPLVLRTVVLLFVMVCTVYICSICLKQIGVVPSAGFLNVEVFERPCPEPNIQPWDIPYVHYPKPKTYSREECSCNPVRYFAILSMQRSGSGWFETLLNNHTNISSNGEIFSVKDRRANVSTIFETLDKVYNLDWLSSASKNECTSAVGLKWMLNQGLMKNHEEIVEYFKTRGVSAIFLFRRNLLRRMISVLANSYDRDAKPLNGTHKSHVHSPKEAEILARYKPLINTSLLIPDLKQVQEMTSKALAYFNTTRHIFLYYEDVVKNRTKLDDVQEFLKVPKLDLKSRQVKIHHGPLSQHVQNWEEVQKTLKGTGFENFLLEDYRR

SEQ ID NO: 70959 - protein, 311 aa, Arabidopsis thaliana
  peptide (1)..(311): Ceres Seq. ID no. 3028245
  misc_feature (67)..(293): Pfam Name: Sulfotransferase domain Pfam Description: Sulfotransferase domain
  misc_feature (1)..(311): Homolog of NCBI NO: 40823013 NR Description: At2g15730 [Arabidopsis thaliana]
  misc_feature (1)..(309): Homolog of NCBI NO: 22329158 NR Description: hypothetical protein; protein id: At4g34420.1
  misc_feature (1)..(310): Homolog of NCBI NO: 29824462 NR Description: unknown protein [Oryza sativa (japonica
  misc_feature (1)..(83): Homolog of NCBI NO: 30679514 NR Description: expressed protein [Arabidopsis thaliana]
  misc_feature (202)..(311): Homolog of NCBI NO: 30679514 NR Description: expressed protein [Arabidopsis thaliana]
  misc_feature (1)..(311): Homolog of NCBI NO: 33146729 NR Description: unknown protein [Oryza sativa (japonica
  misc_feature (58)..(279): Homolog of NCBI NO: 15229813 NR Description: hypothetical protein; protein id: At3g50620.1
  misc_feature (202)..(311): Homolog of NCBI NO: 25411661 NR Description: hypothetical protein At2g15730 [imported] - thaliana >gi|4335739|gb|AAD17417.1| hypothetical protein
  misc_feature (88)..(152): Homolog of NCBI NO: 25411661 NR Description: hypothetical protein At2g15730 [imported] - thaliana >gi|4335739|gb|AAD17417.1| hypothetical protein
  misc_feature (88)..(152): Homolog of NCBI NO: 30679514 NR Description: expressed protein [Arabidopsis thaliana]
MVCTVYICSICLKQIGVVPSAGFLNVEVFERPCPEPNIQPWDIPYVHYPKPKTYSREECSCNPVRYFAILSMQRSGSGWFETLLNNHTNISSNGEIFSVKDRRANVSTIFETLDKVYNLDWLSSASKNECTSAVGLKWMLNQGLMKNHEEIVEYFKTRGVSAIFLFRRNLLRRMISVLANSYDRDAKPLNGTHKSHVHSPKEAEILARYKPLINTSLLIPDLKQVQEMTSKALAYFNTTRHIFLYYEDVVKNRTKLDDVQEFLKVPKLDLKSRQVKIHHGPLSQHVQNWEEVQKTLKGTGFENFLLEDYRR

SEQ ID NO: 70960 - protein, 240 aa, Arabidopsis thaliana
  peptide (1)..(240): Ceres Seq. ID no. 3028246
  misc_feature (1)..(222): Pfam Name: Sulfotransferase domain Pfam Description: Sulfotransferase domain
  misc_feature (1)..(240): Homolog of NCBI NO: 40823013 NR Description: At2g15730 [Arabidopsis thaliana]
  misc_feature (1)..(238): Homolog of NCBI NO: 22329158 NR Description: hypothetical protein; protein id: At4g34420.1
  misc_feature (1)..(239): Homolog of NCBI NO: 29824462 NR Description: unknown protein [Oryza sativa (japonica
  misc_feature (1)..(12): Homolog of NCBI NO: 30679514 NR Description: expressed protein [Arabidopsis thaliana]
  misc_feature (131)..(240): Homolog of NCBI NO: 30679514 NR Description: expressed protein [Arabidopsis thaliana]
  misc_feature (1)..(240): Homolog of NCBI NO: 33146729 NR Description: unknown protein [Oryza sativa (japonica
  misc_feature (1)..(208): Homolog of NCBI NO: 15229813 NR Description: hypothetical protein; protein id: At3g50620.1
  misc_feature (131)..(240): Homolog of NCBI NO: 25411661 NR Description: hypothetical protein At2g15730 [imported] - thaliana >gi|4335739|gb|AAD17417.1| hypothetical protein
  misc_feature (17)..(81): Homolog of NCBI NO: 25411661 NR Description: hypothetical protein At2g15730 [imported] - thaliana >gi|4335739|gb|AAD17417.1| hypothetical protein
  misc_feature (17)..(81): Homolog of NCBI NO: 30679514 NR Description: expressed protein [Arabidopsis thaliana]
MQRSGSGWFETLLNNHTNISSNGEIFSVKDRRANVSTIFETLDKVYNLDWLSSASKNECTSAVGLKWMLNQGLMKNHEEIVEYFKTRGVSAIFLFRRNLLRRMISVLANSYDRDAKPLNGTHKSHVHSPKEAEILARYKPLINTSLLIPDLKQVQEMTSKALAYFNTTRHIFLYYEDVVKNRTKLDDVQEFLKVPKLDLKSRQVKIHHGPLSQHVQNWEEVQKTLKGTGFENFLLEDYRR

SEQ ID NO: 70961 - DNA, 3714 bp, Arabidopsis thaliana
  misc_feature (1)..(3714): Ceres Seq. ID no. 3030441
  misc_feature: MA Experiment ID: 108434 Result: Up-regulated in Transcription
  misc_feature: MA Experiment 108434 PARAMETER Experiment Name: At_Root_Tips_cDNA_P Parameter: Tissue Value: Root Tips
  misc_feature: MA Experiment ID: 108461 Result: Down-regulated in Transcription
  misc_feature: MA Experiment 108461 PARAMETER Experiment Name: At_Germinating_Seeds_cDNA_P Parameter: Age (day) Value: 1 vs. 0
  misc_feature: MA Experiment 108461 PARAMETER Experiment Name: At_Germinating_Seeds_cDNA_P Parameter: Tissue Value: Germinating Seeds
  misc_feature: MA Experiment ID: 108462 Result: Down-regulated in Transcription
  misc_feature: MA Experiment 108462 PARAMETER Experiment Name: At_Germinating_Seeds_cDNA_P Parameter: Age (day) Value: 2 vs. 0
  misc_feature: MA Experiment 108462 PARAMETER Experiment Name: At_Germinating_Seeds_cDNA_P Parameter: Tissue Value: Germinating Seeds
  misc_feature: MA Experiment ID: 108463 Result: Down-regulated in Transcription
  misc_feature: MA Experiment 108463 PARAMETER Experiment Name: At_Germinating_Seeds_cDNA_P Parameter: Age (day) Value: 3 vs. 0
  misc_feature: MA Experiment 108463 PARAMETER Experiment Name: At_Germinating_Seeds_cDNA_P Parameter: Tissue Value: Germinating Seeds
  misc_feature: MA Experiment ID: 20000180 Result: Down-regulated in Transcription
  misc_feature: MA Experiment 20000180 PARAMETER Experiment Name: At_Germinating_Seeds_P Parameter: Age (hr) Value: 24 vs. 0
  misc_feature: MA Experiment 20000180 PARAMETER Experiment Name: At_Germinating_Seeds_P Parameter: Tissue Value: Germinating Seeds
  misc_feature: MA Experiment ID: 20001558 Result: Up-regulated in Transcription
  misc_feature: MA Experiment 20001558 PARAMETER Experiment Name: At_Drought_Soil_Dry_P Parameter: Age (day) Value: 27
  misc_feature: MA Experiment 20001558 PARAMETER Experiment Name: At_Drought_Soil_Dry_P Parameter: Organism Value: A. thaliana
  misc_feature: MA Experiment 20001558 PARAMETER Experiment Name: At_Drought_Soil_Dry_P Parameter: Plant Line Value: WS
  misc_feature: MA Experiment 20001558 PARAMETER Experiment Name: At_Drought_Soil_Dry_P Parameter: Post Timepoint (hr) Value: 6
  misc_feature: MA Experiment 20001558 PARAMETER Experiment Name: At_Drought_Soil_Dry_P Parameter: Post-Treatment Value: Re-Water vs. No Drought
  misc_feature: MA Experiment 20001558 PARAMETER Experiment Name: At_Drought_Soil_Dry_P Parameter: Timepoint (day) Value: 13
  misc_feature: MA Experiment 20001558 PARAMETER Experiment Name: At_Drought_Soil_Dry_P Parameter: Treatment Value: Drought vs. No Drought
atgtgcggaattgcaattgtagtgtgcggcgttcgtatcgaactctcgacactttcgtcgtctctctctgaaactgagactcctttcgaacgattacaagtctctgttgaagatgttaaagctgtcttaagccaaagaggtcctgatagtgtaggagaaaagactattcatcttcgaccaaattgtggtcaagaatctgctactctctctgttgttgagactagtgaaggaacttataagcttgaggagactacttctttgggtgaattgcattttattggttctacattacagcttagaggaactagtcctataaggcaaccattggtggattcttctgggaacattctagcttacaatggcgaagtatttggtggaattgaactcaacagctatgataatgatactgaagtgcttttgaagtctttagagaaagcaaaatctttagttccagatgttctttcgatgattaaaggtccctgggccattatatattggcaggaaagctcgagaacgttatggtttggtaaagatccgtttggtcggaggagccttcttgttcactcgccaactgtggaagaccctcgttttcttctatcgtctgtttcaccagcttcttcagtttctcaaggtgctggattggatactgaaaatggtaatagccttcatagatattgggaagagcttccatgtggcgtgtacagtatttcttttggggtttcagaattatgtattcatggtgaagttacaaaacacgaatggagaaataccatctggaaagaattgattgaatgggaaaggaaattagttgtacctagacctgaagatctatcaacgtcatcgcttagtggagttcaggaagacaaatctgtgtcaacttctctaggtttagctttaggatttgcgcagacagttttggtcgtgttaaaggaatcagtgaggcggcgaacttcacttcatagcatttatcagggagataaagaagctgtcccagtagctgttcttttctctggtggattggattcgatgattcttgctgcgctgttgcatcagtgccttgatccaaaatatgaagttgatctccttaatgtcagttttgatggtcctaatgctcctgataggatctccgccaaggctggaataaaggaactcaaaaagattgcaccttttagaaggtggaaacttgttgagattgatgctgatctgtcaaaactaggctttgagacaaaacgtgttatgtcactcataaatcctgcagacacttacatggaccttaacataggaacagcattatggttagctgctcgtggtgatggttggattcacgaagataatggaaatccaagtgtagaggaaaataaccagcgggtcaagtataagtccgatgctagaatcctgcttgttggcgctggtgctgatgagcaatgtgccggttacggtaggcacagaactaaatatcgaaatggaagttgggttgcgttggatcaagaaatgaaattagatatgcagagaatttggaaaagaaatttgggtcgagatgatcgatgcattgcagataacggtaaagaggggcgattcccgttcttagatgaagatgtgataaagactctccttgacattcccttgtgggaaatcgctgatcttgagcaaccaagtggaacgggagacaagaagattcttagacaggttgcaagcctgcttggtgtacatgaagttgcaaagatgcctaagagagcaattcagtttggatcaagaatcgctcgtgaatcaaaccggaagaattttggaagtaaccgtgccgcaaaccaggcttctgccgggagcagacattctttcaatgatctcaaaactggtttgaacactgaacacaaatggactaataagaggacattttggttcttcatgttggaaaccgaaagcagtgtctgcgacaacatcgccggcaatgagaaatggcgagcggaagctgaaattggtggcaacgagagagctctgcaagcgcttcgagaactcattatcttcccttttcgttaccctctcgaagctcgaactcttggtctcaaatggcctagaggattgcttctctacggtcctcctggaaccggcaagacaagcttggtccgtgctgttgtccaggaatgtgatgcacatttgattgttttaagccctcattctgtacatcgagcacatgctggagaaagcgagaaagtcttaagggaagctttcgctgaggcttcttctcacgctgtttcagacaagccttctgtgatttttattgatgaaatcgatgttctttgtcctcgtcgtgatgctagacgagaacaagatgttcgtattgcttctcaactgtttacacttatggactcaaacaagccttcatcatctgcaccaagagttgttgttgtagcatccacaaatagggtggatgcgattgacccagcgctaagaagagcgggacgatttgatgctttagttgaagtgagcacaccaaatgaggaggatcgtttaaaaatcctgcagctgtacacaaagaaagtcaatttagatcctagtgtcgatcttcaagccattgcaatatcttgcaacggttatgttggagcagatttggaagctttatgtcgtgaagcgacaatatctgcaagtaaaagatcttcagattctcttattctaacatctcaagacttcaagattgcaaaatctgtggttggtccaagtataaacagaggcatcacagttgaaatccctaaagtgacatgggacgatgttggtggtcttaaagacttaaagaaaaagctccagcaagctgttgaatggccaatcaaacattcagctgcatttgtaaaaatgggcatatcgccaatgcgtgggatacttctacatggtcctccaggttgctcaaagacaactcttgctaaagccgctgcaaatgctgctcaagcctccttcttttccttaagctgtgcggagctattttctatgtatgttggagaaggtgaagcattattgcggaatacatttcaaagagctcgacttgcttctccaagtataatattctttgatgaagctgatgtcgttgcctgtaaaagaggtgatgagagctcaagcaatagttctacagttggagaaaggcttctatctacactgttaaccgaaatggacggtcttgaagaagcaaagggaatcctcgtcttggctgccacaaaccgcccgtatgcaattgatgctgctctaatgcgacctggtcgatttgatctcgtgctatacgtgccaccgcctgatctagaagcccggtttgaaatactgcaagtgcatacacgcaacatgacactaggagacgacgttgatctcagaaaaatcgctgaagaaaccgatctcttcacaggtgccgagctcgagggtctatgcagagaaagcggaactgtctcacttagagaaaacatcgcagcaaccgctgtcttcaatcgccatttccaaaccgcaaaaagctcgcttaaaccagcgttaacaatcgaagaagtcgaaacttattcatcattcaggaaggcggcgaaaagatctgattcgaaaccgattccgattaacaaaaagaaggcgacttccaccgtcttcggattctcatggcaattaggtgttttgagcttattgttgcttgctactggaaactattacttcaaccacactaaacatgaattactagtagcttctgctacatga

SEQ ID NO: 70962 - protein, 1237 aa, Arabidopsis thaliana
  peptide (1)..(1237): Ceres Seq. ID no. 3030442
  misc_feature (692)..(882): Pfam Name: ATPase family associated with various cellular Pfam Description: ATPase family associated with various cellular
  misc_feature (635)..(1237): Homolog of NCBI NO: 15227690 NR Description: putative AAA-type ATPase; protein id: supported by cDNA: gi_17064733 [Arabidopsis thaliana] Cell division control protein 48 homolog B (AtCDC48b)
  misc_feature (651)..(1178): Homolog of NCBI NO: 38345020 NR Description: OSJNBa0029H02.4 [Oryza sativa (japonica
  misc_feature (657)..(1185): Homolog of NCBI NO: 14602090 NR Description: transitional endoplasmic reticulum ATPase pernix] >gi|7435761|pir||B72479 probable transitional endoplasmic
  misc_feature (626)..(1168): Homolog of NCBI NO: 10946660 NR Description: spermatogenesis associated factor [Mus musculus]
  misc_feature (626)..(1168): Homolog of NCBI NO: 12847023 NR Description: unnamed protein product [Mus musculus]
  misc_feature (657)..(1176): Homolog of NCBI NO: 11498895 NR Description: cell division control protein 48, AAA family [Archaeoglobus fulgidus] >gi|7435749|pir||H69411 cell division
  misc_feature (658)..(1168): Homolog of NCBI NO: 21624654 NR Description: spermatogenesis associated factor SPAF [Homo >gi|19880131|gb|AAM00262.1|AF361489_1 spermatogenesis associated
  misc_feature (657)..(1176): Homolog of NCBI NO: 15679634 NR Description: cell division control protein Cdc48 thermautotrophicus] >gi|7435751|pir||A69086 cell division control
  misc_feature (658)..(1168): Homolog of NCBI NO: 21749742 NR Description: unnamed protein product [Homo sapiens]
  misc_feature (854)..(1181): Homolog of NCBI NO: 11499681 NR Description: cell division control protein 48, AAA family [Archaeoglobus fulgidus] >gi|7435750|pir||B69512 cell division
MCGIAIVVCGVRIELSTLSSSLSETETPFERLQVSVEDVKAVLSQRGPDSVGEKTIHLRPNCGQESATLSVVETSEGTYKLEETTSLGELHFIGSTLQLRGTSPIRQPLVDSSGNILAYNGEVFGGIELNSYDNDTEVLLKSLEKAKSLVPDVLSMIKGPWAIIYWQESSRTLWFGKDPFGRRSLLVHSPTVEDPRFLLSSVSPASSVSQGAGLDTENGNSLHRYWEELPCGVYSISFGVSELCIHGEVTKHEWRNTIWKELIEWERKLVVPRPEDLSTSSLSGVQEDKSVSTSLGLALGFAQTVLVVLKESVRRRTSLHSIYQGDKEAVPVAVLFSGGLDSMILAALLHQCLDPKYEVDLLNVSFDGPNAPDRISAKAGIKELKKIAPFRRWKLVEIDADLSKLGFETKRVMSLINPADTYMDLNIGTALWLAARGDGWIHEDNGNPSVEENNQRVKYKSDARILLVGAGADEQCAGYGRHRTKYRNGSWVALDQEMKLDMQRIWKRNLGRDDRCIADNGKEGRFPFLDEDVIKTLLDIPLWEIADLEQPSGTGDKKILRQVASLLGVHEVAKMPKRAIQFGSRIARESNRKNFGSNRAANQASAGSRHSFNDLKTGLNTEHKWTNKRTFWFFMLETESSVCDNIAGNEKWRAEAEIGGNERALQALRELIIFPFRYPLEARTLGLKWPRGLLLYGPPGTGKTSLVRAVVQECDAHLIVLSPHSVHRAHAGESEKVLREAFAEASSHAVSDKPSVIFIDEIDVLCPRRDARREQDVRIASQLFTLMDSNKPSSSAPRVVVVASTNRVDAIDPALRRAGRFDALVEVSTPNEEDRLKILQLYTKKVNLDPSVDLQAIAISCNGYVGADLEALCREATISASKRSSDSLILTSQDFKIAKSVVGPSINRGITVEIPKVTWDDVGGLKDLKKKLQQAVEWPIKHSAAFVKMGISPMRGILLHGPPGCSKTTLAKAAANAAQASFFSLSCAELFSMYVGEGEALLRNTFQRARLASPSIIFFDEADVVACKRGDESSSNSSTVGERLLSTLLTEMDGLEEAKGILVLAATNRPYAIDAALMRPGRFDLVLYVPPPDLEARFEILQVHTRNMTLGDDVDLRKIAEETDLFTGAELEGLCRESGTVSLRENIAATAVFNRHFQTAKSSLKPALTIEEVETYSSFRKAAKRSDSKPIPINKKKATSTVFGFSWQLGVLSLLLLATGNYYFNHTKHELLVASAT

SEQ ID NO: 70963 - protein, 1082 aa, Arabidopsis thaliana
  peptide (1)..(1082): Ceres Seq. ID no. 3030443
  misc_feature (537)..(727): Pfam Name: ATPase family associated with various cellular Pfam Description: ATPase family associated with various cellular
  misc_feature (480)..(1082): Homolog of NCBI NO: 15227690 NR Description: putative AAA-type ATPase; protein id: supported by cDNA: gi_17064733 [Arabidopsis thaliana] Cell division control protein 48 homolog B (AtCDC48b)
  misc_feature (496)..(1023): Homolog of NCBI NO: 38345020 NR Description: OSJNBa0029H02.4 [Oryza sativa (japonica
  misc_feature (502)..(1030): Homolog of NCBI NO: 14602090 NR Description: transitional endoplasmic reticulum ATPase pernix] >gi|7435761|pir||B72479 probable transitional endoplasmic
  misc_feature (471)..(1013): Homolog of NCBI NO: 10946660 NR Description: spermatogenesis associated factor [Mus musculus]
  misc_feature (471)..(1013): Homolog of NCBI NO: 12847023 NR Description: unnamed protein product [Mus musculus]
  misc_feature (502)..(1021): Homolog of NCBI NO: 11498895 NR Description: cell division control protein 48, AAA family [Archaeoglobus fulgidus] >gi|7435749|pir||H69411 cell division
  misc_feature (503)..(1013): Homolog of NCBI NO: 21624654 NR Description: spermatogenesis associated factor SPAF [Homo >gi|19880131|gb|AAM00262.1|AF361489_1 spermatogenesis associated
  misc_feature (502)..(1021): Homolog of NCBI NO: 15679634 NR Description: cell division control protein Cdc48 thermautotrophicus] >gi|7435751|pir||A69086 cell division control
  misc_feature (503)..(1013): Homolog of NCBI NO: 21749742 NR Description: unnamed protein product [Homo sapiens]
  misc_feature (699)..(1026): Homolog of NCBI NO: 11499681 NR Description: cell division control protein 48, AAA family [Archaeoglobus fulgidus] >gi|7435750|pir||B69512 cell division
MIKGPWAIIYWQESSRTLWFGKDPFGRRSLLVHSPTVEDPRFLLSSVSPASSVSQGAGLDTENGNSLHRYWEELPCGVYSISFGVSELCIHGEVTKHEWRNTIWKELIEWERKLVVPRPEDLSTSSLSGVQEDKSVSTSLGLALGFAQTVLVVLKESVRRRTSLHSIYQGDKEAVPVAVLFSGGLDSMILAALLHQCLDPKYEVDLLNVSFDGPNAPDRISAKAGIKELKKIAPFRRWKLVEIDADLSKLGFETKRVMSLINPADTYMDLNIGTALWLAARGDGWIHEDNGNPSVEENNQRVKYKSDARILLVGAGADEQCAGYGRHRTKYRNGSWVALDQEMKLDMQRIWKRNLGRDDRCIADNGKEGRFPFLDEDVIKTLLDIPLWEIADLEQPSGTGDKKILRQVASLLGVHEVAKMPKRAIQFGSRIARESNRKNFGSNRAANQASAGSRHSFNDLKTGLNTEHKWTNKRTFWFFMLETESSVCDNIAGNEKWRAEAEIGGNERALQALRELIIFPFRYPLEARTLGLKWPRGLLLYGPPGTGKTSLVRAVVQECDAHLIVLSPHSVHRAHAGESEKVLREAFAEASSHAVSDKPSVIFIDEIDVLCPRRDARREQDVRIASQLFTLMDSNKPSSSAPRVVVVASTNRVDAIDPALRRAGRFDALVEVSTPNEEDRLKILQLYTKKVNLDPSVDLQAIAISCNGYVGADLEALCREATISASKRSSDSLILTSQDFKIAKSVVGPSINRGITVEIPKVTWDDVGGLKDLKKKLQQAVEWPIKHSAAFVKMGISPMRGILLHGPPGCSKTTLAKAAANAAQASFFSLSCAELFSMYVGEGEALLRNTFQRARLASPSIIFFDEADVVACKRGDESSSNSSTVGERLLSTLLTEMDGLEEAKGILVLAATNRPYAIDAALMRPGRFDLVLYVPPPDLEARFEILQVHTRNMTLGDDVDLRKIAEETDLFTGAELEGLCRESGTVSLRENIAATAVFNRHFQTAKSSLKPALTIEEVETYSSFRKAAKRSDSKPIPINKKKATSTVFGFSWQLGVLSLLLLATGNYYFNHTKHELLVASAT

SEQ ID NO: 70964 - protein, 895 aa, Arabidopsis thaliana
  peptide (1)..(895): Ceres Seq. ID no. 3030444
  misc_feature (350)..(540): Pfam Name: ATPase family associated with various cellular Pfam Description: ATPase family associated with various cellular
  misc_feature (293)..(895): Homolog of NCBI NO: 15227690 NR Description: putative AAA-type ATPase; protein id: supported by cDNA: gi_17064733 [Arabidopsis thaliana] Cell division control protein 48 homolog B (AtCDC48b)
  misc_feature (309)..(836): Homolog of NCBI NO: 38345020 NR Description: OSJNBa0029H02.4 [Oryza sativa (japonica
  misc_feature (315)..(843): Homolog of NCBI NO: 14602090 NR Description: transitional endoplasmic reticulum ATPase pernix] >gi|7435761|pir||B72479 probable transitional endoplasmic
  misc_feature (284)..(826): Homolog of NCBI NO: 10946660 NR Description: spermatogenesis associated factor [Mus musculus]
  misc_feature (284)..(826): Homolog of NCBI NO: 12847023 NR Description: unnamed protein product [Mus musculus]
  misc_feature (315)..(834): Homolog of NCBI NO: 11498895 NR Description: cell division control protein 48, AAA family [Archaeoglobus fulgidus] >gi|7435749|pir||H69411 cell division
  misc_feature (316)..(826): Homolog of NCBI NO: 21624654 NR Description: spermatogenesis associated factor SPAF [Homo >gi|19880131|gb|AAM00262.1|AF361489_1 spermatogenesis associated
  misc_feature (315)..(834): Homolog of NCBI NO: 15679634 NR Description: cell division control protein Cdc48 thermautotrophicus] >gi|7435751|pir||A69086 cell division control
  misc_feature (316)..(826): Homolog of NCBI NO: 21749742 NR Description: unnamed protein product [Homo sapiens]
  misc_feature (512)..(839): Homolog of NCBI NO: 11499681 NR Description: cell division control protein 48, AAA family [Archaeoglobus fulgidus] >gi|7435750|pir||B69512 cell division
MILAALLHQCLDPKYEVDLLNVSFDGPNAPDRISAKAGIKELKKIAPFRRWKLVEIDADLSKLGFETKRVMSLINPADTYMDLNIGTALWLAARGDGWIHEDNGNPSVEENNQRVKYKSDARILLVGAGADEQCAGYGRHRTKYRNGSWVALDQEMKLDMQRIWKRNLGRDDRCIADNGKEGRFPFLDEDVIKTLLDIPLWEIADLEQPSGTGDKKILRQVASLLGVHEVAKMPKRAIQFGSRIARESNRKNFGSNRAANQASAGSRHSFNDLKTGLNTEHKWTNKRTFWFFMLETESSVCDNIAGNEKWRAEAEIGGNERALQALRELIIFPFRYPLEARTLGLKWPRGLLLYGPPGTGKTSLVRAVVQECDAHLIVLSPHSVHRAHAGESEKVLREAFAEASSHAVSDKPSVIFIDEIDVLCPRRDARREQDVRIASQLFTLMDSNKPSSSAPRVVVVASTNRVDAIDPALRRAGRFDALVEVSTPNEEDRLKILQLYTKKVNLDPSVDLQAIAISCNGYVGADLEALCREATISASKRSSDSLILTSQDFKIAKSVVGPSINRGITVEIPKVTWDDVGGLKDLKKKLQQAVEWPIKHSAAFVKMGISPMRGILLHGPPGCSKTTLAKAAANAAQASFFSLSCAELFSMYVGEGEALLRNTFQRARLASPSIIFFDEADVVACKRGDESSSNSSTVGERLLSTLLTEMDGLEEAKGILVLAATNRPYAIDAALMRPGRFDLVLYVPPPDLEARFEILQVHTRNMTLGDDVDLRKIAEETDLFTGAELEGLCRESGTVSLRENIAATAVFNRHFQTAKSSLKPALTIEEVETYSSFRKAAKRSDSKPIPINKKKATSTVFGFSWQLGVLSLLLLATGNYYFNHTKHELLVASAT

SEQ ID NO: 70965 - DNA, 1260 bp, Arabidopsis thaliana
  misc_feature (1)..(1260): Ceres Seq. ID no. 3030741
  misc_feature: MA Experiment ID: 20000439 Result: Down-regulated in Transcription
  misc_feature: MA Experiment 20000439 PARAMETER Experiment Name: At_Roots__P Parameter: Age (day) Value: 14 vs. 21
  misc_feature: MA Experiment 20000439 PARAMETER Experiment Name: At_Roots__P Parameter: Organism Value: A. thaliana
  misc_feature: MA Experiment 20000439 PARAMETER Experiment Name: At_Roots__P Parameter: Tissue Value: Roots vs. Whole Plant
  misc_feature: MA Experiment ID: 20000527 Result: Up-regulated in Transcription
  misc_feature: MA Experiment 20000527 PARAMETER Experiment Name: At_10percent_PEG_P Parameter: Age (day) Value: 20
  misc_feature: MA Experiment 20000527 PARAMETER Experiment Name: At_10percent_PEG_P Parameter: Organism Value: A. thaliana
  misc_feature: MA Experiment 20000527 PARAMETER Experiment Name: At_10percent_PEG_P Parameter: Plant Line Value: WS
  misc_feature: MA Experiment 20000527 PARAMETER Experiment Name: At_10percent_PEG_P Parameter: Timepoint (day) Value: 20
  misc_feature: MA Experiment 20000527 PARAMETER Experiment Name: At_10percent_PEG_P Parameter: Tissue Value: Whole Plant
  misc_feature: MA Experiment 20000527 PARAMETER Experiment Name: At_10percent_PEG_P Parameter: Treatment Value: 10percent PEG vs. No Treatment
  misc_feature: MA Experiment ID: 20001247 Result: Up-regulated in Transcription
  misc_feature: MA Experiment 20001247 PARAMETER Experiment Name: At_Far-red-induction_P Parameter: Age (day) Value: 7
  misc_feature: MA Experiment 20001247 PARAMETER Experiment Name: At_Far-red-induction_P Parameter: Light Value: Far-red vs. White
  misc_feature: MA Experiment 20001247 PARAMETER Experiment Name: At_Far-red-induction_P Parameter: Organism Value: A. thaliana
  misc_feature: MA Experiment 20001247 PARAMETER Experiment Name: At_Far-red-induction_P Parameter: Plant Line Value: Columbia
  misc_feature: MA Experiment 20001247 PARAMETER Experiment Name: At_Far-red-induction_P Parameter: Timepoint (hr) Value: 1
  misc_feature: MA Experiment 20001247 PARAMETER Experiment Name: At_Far-red-induction_P Parameter: Tissue Value: Whole Plant
  misc_feature: MA Experiment ID: 20001248 Result: Up-regulated in Transcription
  misc_feature: MA Experiment 20001248 PARAMETER Experiment Name: At_Far-red-induction_P Parameter: Age (day) Value: 7
  misc_feature: MA Experiment 20001248 PARAMETER Experiment Name: At_Far-red-induction_P Parameter: Light Value: Far-red vs. White
  misc_feature: MA Experiment 20001248 PARAMETER Experiment Name: At_Far-red-induction_P Parameter: Organism Value: A. thaliana
  misc_feature: MA Experiment 20001248 PARAMETER Experiment Name: At_Far-red-induction_P Parameter: Plant Line Value: Columbia
  misc_feature: MA Experiment 20001248 PARAMETER Experiment Name: At_Far-red-induction_P Parameter: Timepoint (hr) Value: 4
  misc_feature: MA Experiment 20001248 PARAMETER Experiment Name: At_Far-red-induction_P Parameter: Tissue Value: Whole Plant
  misc_feature: MA Experiment ID: 20001450 Result: Up-regulated in Transcription
  misc_feature: MA Experiment 20001450 PARAMETER Experiment Name: At_Far-red-induction_P Parameter: Age (day) Value: 7
  misc_feature: MA Experiment 20001450 PARAMETER Experiment Name: At_Far-red-induction_P Parameter: Light Value: Far-red vs. White
  misc_feature: MA Experiment 20001450 PARAMETER Experiment Name: At_Far-red-induction_P Parameter: Organism Value: A. thaliana
  misc_feature: MA Experiment 20001450 PARAMETER Experiment Name: At_Far-red-induction_P Parameter: Plant Line Value: Columbia
  misc_feature: MA Experiment 20001450 PARAMETER Experiment Name: At_Far-red-induction_P Parameter: Timepoint (hr) Value: 8
  misc_feature: MA Experiment 20001450 PARAMETER Experiment Name: At_Far-red-induction_P Parameter: Tissue Value: Whole Plant
  misc_feature: MA Experiment ID: 20001504 Result: Down-regulated in Transcription
  misc_feature: MA Experiment 20001504 PARAMETER Experiment Name: At_Far-red-enriched_P Parameter: Age (day) Value: 10
  misc_feature: MA Experiment 20001504 PARAMETER Experiment Name: At_Far-red-enriched_P Parameter: Light Value: Far-red enriched vs. White
  misc_feature: MA Experiment 20001504 PARAMETER Experiment Name: At_Far-red-enriched_P Parameter: Organism Value: A. thaliana
  misc_feature: MA Experiment 20001504 PARAMETER Experiment Name: At_Far-red-enriched_P Parameter: Plant Line Value: Columbia
  misc_feature: MA Experiment 20001504 PARAMETER Experiment Name: At_Far-red-enriched_P Parameter: Timepoint (day) Value: 6
  misc_feature: MA Experiment 20001504 PARAMETER Experiment Name: At_Far-red-enriched_P Parameter: Tissue Value: Whole Plant
atgggaccttttgggatggaaacaacacccggttttcctgatacttttgctggattcaaatctgccagtgtgagaacatcttcttcttcatcacttgttgatgagaatcttggccattcaatggaggataaaatgagtgacatgaagcatttcctaatggatcctcatcatgataataccgcggtggacagtttcttaggtcttggtatggagaatatgggcttaacctccaagatggaggagttttcacatggatttgacgttagctttctcccagattatggtggagttaacacttttagcactcaagatgtggaagcaggtttaaagtttgaaattcttgatggaattctggatggagttgatgaagtggaagatatctacgcatcacatgagctttcttctattgttaaccatttccctccagaaactgaagtcaagaagaatgaattagagggtgacccctatggtcttatgaacttcagttcagaatcttattctcctggaattagtggaagcatcggactcgcggagtggtcaaaagaaactgttccatatgctgaatcccagattgtatccagcgaaaaagttaaagatagttgggatacaaatgagtcagaagatgacaagaaaccactatccacatttataggctcttggattaaacgaaagaatcggaaacagaaattgctcaacaccgcttgtagtagattagattcttctcgtgaaagaaagtcttgcgagtcctatgacttcaggccccggaaaggacctatgaagaaatacattcacacttcaatggagaaaacattttctgatgatcagcttactttatctgagagtgaagatgacatttctgtaacaaagacatccagaaccaaaagtgacaggagaaagaatcagaggatatggactcttgatgaagtaatgaatttggttgatggtatttctcactttggtgttgggaaatggaccgatataaagaaccacttctttcattatgcagcacaccgcaaacccgttgatatcagagacaaatggcgtaatctactgaaagcaagttataacgaaaagcataacgatggacaggctgaagaaaaacgaaagtcagtggctcgctctataccgaaggatattctacatcgtgtaagagaacttgcttcactccatccatatcccttctccaaatcaccgtgtattgttcatgattcctcaagaagccgaagcacttcaaagaacaagaagaagaagagtggatga

SEQ ID NO: 70966 - protein, 419 aa, Arabidopsis thaliana
  peptide (1)..(419): Ceres Seq. ID no. 3030742
  misc_feature (302)..(351): Pfam Name: Myb-like DNA-binding domain Pfam Description: Myb-like DNA-binding domain
  misc_feature (1)..(419): Homolog of NCBI NO: 30687001 NR Description: expressed protein [Arabidopsis thaliana]
  misc_feature (261)..(409): Homolog of NCBI NO: 22329629 NR Description: hypothetical protein; protein id: At1g17460.1, by cDNA: gi_19347779 [Arabidopsis thaliana] unknown protein [Arabidopsis thaliana]
  misc_feature (279)..(387): Homolog of NCBI NO: 18410146 NR Description: expressed protein; protein id: At1g72650.1, by cDNA: 110945., supported by cDNA: gi_15010653 [Arabidopsis >gi|15010654|gb|AAK73986.1| At1g72650/F28P22_16 [Arabidopsis
  misc_feature (279)..(387): Homolog of NCBI NO: 21536766 NR Description: unknown [Arabidopsis thaliana]
  misc_feature (279)..(355): Homolog of NCBI NO: 25406198 NR Description: hypothetical protein F28P22.16 [imported] -
MGPFGMETTPGFPDTFAGFKSASVRTSSSSSLVDENLGHSMEDKMSDMKHFLMDPHHDNTAVDSFLGLGMENMGLTSKMEEFSHGFDVSFLPDYGGVNTFSTQDVEAGLKFEILDGILDGVDEVEDIYASHELSSIVNHFPPETEVKKNELEGDPYGLMNFSSESYSPGISGSIGLAEWSKETVPYAESQIVSSEKVKDSWDTNESEDDKKPLSTFIGSWIKRKNRKQKLLNTACSRLDSSRERKSCESYDFRPRKGPMKKYIHTSMEKTFSDDQLTLSESEDDISVTKTSRTKSDRRKNQRIWTLDEVMNLVDGISHFGVGKWTDIKNHFFHYAAHRKPVDIRDKWRNLLKASYNEKHNDGQAEEKRKSVARSIPKDILHRVRELASLHPYPFSKSPCIVHDSSRSRSTSKNKKKKSG

SEQ ID NO: 70967 - protein, 414 aa, Arabidopsis thaliana
  peptide (1)..(414): Ceres Seq. ID no. 3030743
  misc_feature (297)..(346): Pfam Name: Myb-like DNA-binding domain Pfam Description: Myb-like DNA-binding domain
  misc_feature (1)..(414): Homolog of NCBI NO: 30687001 NR Description: expressed protein [Arabidopsis thaliana]
  misc_feature (256)..(404): Homolog of NCBI NO: 22329629 NR Description: hypothetical protein; protein id: At1g17460.1, by cDNA: gi_19347779 [Arabidopsis thaliana] unknown protein [Arabidopsis thaliana]
  misc_feature (274)..(382): Homolog of NCBI NO: 18410146 NR Description: expressed protein; protein id: At1g72650.1, by cDNA: 110945., supported by cDNA: gi_15010653 [Arabidopsis >gi|15010654|gb|AAK73986.1| At1g72650/F28P22_16 [Arabidopsis
  misc_feature (274)..(382): Homolog of NCBI NO: 21536766 NR Description: unknown [Arabidopsis thaliana]
  misc_feature (274)..(350): Homolog of NCBI NO: 25406198 NR Description: hypothetical protein F28P22.16 [imported] -
METTPGFPDTFAGFKSASVRTSSSSSLVDENLGHSMEDKMSDMKHFLMDPHHDNTAVDSFLGLGMENMGLTSKMEEFSHGFDVSFLPDYGGVNTFSTQDVEAGLKFEILDGILDGVDEVEDIYASHELSSIVNHFPPETEVKKNELEGDPYGLMNFSSESYSPGISGSIGLAEWSKETVPYAESQIVSSEKVKDSWDTNESEDDKKPLSTFIGSWIKRKNRKQKLLNTACSRLDSSRERKSCESYDFRPRKGPMKKYIHTSMEKTFSDDQLTLSESEDDISVTKTSRTKSDRRKNQRIWTLDEVMNLVDGISHFGVGKWTDIKNHFFHYAAHRKPVDIRDKWRNLLKASYNEKHNDGQAEEKRKSVARSIPKDILHRVRELASLHPYPFSKSPCIVHDSSRSRSTSKNKKKKSG

SEQ ID NO: 70968 - protein, 379 aa, Arabidopsis thaliana
  peptide (1)..(379): Ceres Seq. ID no. 3030744
  misc_feature (262)..(311): Pfam Name: Myb-like DNA-binding domain Pfam Description: Myb-like DNA-binding domain
  misc_feature (1)..(379): Homolog of NCBI NO: 30687001 NR Description: expressed protein [Arabidopsis thaliana]
  misc_feature (221)..(369): Homolog of NCBI NO: 22329629 NR Description: hypothetical protein; protein id: At1g17460.1, by cDNA: gi_19347779 [Arabidopsis thaliana] unknown protein [Arabidopsis thaliana]
  misc_feature (239)..(347): Homolog of NCBI NO: 18410146 NR Description: expressed protein; protein id: At1g72650.1, by cDNA: 110945., supported by cDNA: gi_15010653 [Arabidopsis >gi|15010654|gb|AAK73986.1| At1g72650/F28P22_16 [Arabidopsis
  misc_feature (239)..(347): Homolog of NCBI NO: 21536766 NR Description: unknown [Arabidopsis thaliana]
  misc_feature (239)..(315): Homolog of NCBI NO: 25406198 NR Description: hypothetical protein F28P22.16 [imported] -
MEDKMSDMKHFLMDPHHDNTAVDSFLGLGMENMGLTSKMEEFSHGFDVSFLPDYGGVNTFSTQDVEAGLKFEILDGILDGVDEVEDIYASHELSSIVNHFPPETEVKKNELEGDPYGLMNFSSESYSPGISGSIGLAEWSKETVPYAESQIVSSEKVKDSWDTNESEDDKKPLSTFIGSWIKRKNRKQKLLNTACSRLDSSRERKSCESYDFRPRKGPMKKYIHTSMEKTFSDDQLTLSESEDDISVTKTSRTKSDRRKNQRIWTLDEVMNLVDGISHFGVGKWTDIKNHFFHYAAHRKPVDIRDKWRNLLKASYNEKHNDGQAEEKRKSVARSIPKDILHRVRELASLHPYPFSKSPCIVHDSSRSRSTSKNKKKKSG

SEQ ID NO: 70969 - DNA, 570 bp, Arabidopsis thaliana
  misc_feature (1)..(570): Ceres Seq. ID no. 3030818
  misc_feature: MA Experiment ID: 20000185 Result: Up-regulated in Transcription
  misc_feature: MA Experiment 20000185 PARAMETER Experiment Name: At_Roots__P Parameter: Age (day) Value: 7 vs. 21
  misc_feature: MA Experiment 20000185 PARAMETER Experiment Name: At_Roots__P Parameter: Organism Value: A. thaliana
  misc_feature: MA Experiment 20000185 PARAMETER Experiment Name: At_Roots__P Parameter: Tissue Value: Roots vs. Whole Plant
  misc_feature: MA Experiment ID: 20000264 Result: Up-regulated in Transcription
  misc_feature: MA Experiment 20000264 PARAMETER Experiment Name: At_Open_Flower_P Parameter: Age (day) Value: 21
  misc_feature: MA Experiment 20000264 PARAMETER Experiment Name: At_Open_Flower_P Parameter: Plant Line Value: WS
  misc_feature: MA Experiment 20000264 PARAMETER Experiment Name: At_Open_Flower_P Parameter: Tissue Value: Open Flower vs. Whole Plant
  misc_feature: MA Experiment ID: 20000286 Result: Up-regulated in Transcription
  misc_feature: MA Experiment 20000286 PARAMETER Experiment Name: At_Open_Flower_P Parameter: Age (day) Value: 21
  misc_feature: MA Experiment 20000286 PARAMETER Experiment Name: At_Open_Flower_P Parameter: Plant Line Value: WS
  misc_feature: MA Experiment 20000286 PARAMETER Experiment Name: At_Open_Flower_P Parameter: Tissue Value: Half Open vs. Whole Plant
  misc_feature: MA Experiment ID: 20000439 Result: Up-regulated in Transcription
  misc_feature: MA Experiment 20000439 PARAMETER Experiment Name: At_Roots__P Parameter: Age (day) Value: 14 vs. 21
  misc_feature: MA Experiment 20000439 PARAMETER Experiment Name: At_Roots__P Parameter: Organism Value: A. thaliana
  misc_feature: MA Experiment 20000439 PARAMETER Experiment Name: At_Roots__P Parameter: Tissue Value: Roots vs. Whole Plant
  misc_feature: MA Experiment ID: 20000794 Result: Up-regulated in Transcription
  misc_feature: MA Experiment 20000794 PARAMETER Experiment Name: At_Petals_P Parameter: Age (day) Value: 23-25 days
  misc_feature: MA Experiment 20000794 PARAMETER Experiment Name: At_Petals_P Parameter: Plant Line Value: WS
  misc_feature: MA Experiment 20000794 PARAMETER Experiment Name: At_Petals_P Parameter: Tissue Value: Petals vs. Whole plant
atggaggagccgaaatggctcgaaggtctcttaagaacaaacttcttcagcatttgccctcgacatcgcgagacaccgcgaaatgagtgcaacatgttctgtctctcctgtcaaaacgctgcgttttgcttctactgccgctcctcctttcacattgatcatcccgtccttcagataagaagatcgtcgtatcatgatgtggtgagagtatcggagatagagaatgcattggacataagaggagtgcaaacttatgtcatcaatagcgcgagggttctcttcttaaacgagagacctcagcctaagaactcctcccatggtgccgcctcctccactccgaaaaccatgtcctacttctgtgagacatgttgcagaacccttcttgatccctttcgcttctgttccttgggttgcaaggttgaaggaatgaggaagaataaggaagaggaagaagaaagattgcgtaaagaaagacaacaagaaacgcacaaaggcacgcatcctccaactcatacctctaattctaggcgacgaaaaggcattcctcatagagctccttttgcctcctaa

SEQ ID NO: 70970 - protein, 189 aa, Arabidopsis thaliana
  peptide (1)..(189): Ceres Seq. ID no. 3030819
  misc_feature (1)..(106): Pfam Name: Protein of unknown function, DUF597 Pfam Description: Protein of unknown function, DUF597
  misc_feature (1)..(106): Homolog of NCBI NO: 15226287 NR Description: unknown protein; protein id: At2g27930.1
  misc_feature (4)..(148): Homolog of NCBI NO: 20805059 NR Description: B1108H10.20 [Oryza sativa (japonica
  misc_feature (4)..(179): Homolog of NCBI NO: 18394936 NR Description: expressed protein; protein id: At1g21000.1, by cDNA: 119384., supported by cDNA: gi_14030626, supported by gi_16226406 [Arabidopsis thaliana]
  misc_feature (4)..(179): Homolog of NCBI NO: 25337907 NR Description: hypothetical protein F9H16.1 - Arabidopsis >gi|4836888|gb|AAD30591.1|AC007369_1 Unknown protein [Arabidopsis >gi|13877713|gb|AAK43934.1|AF370615_1 Unknown protein
  misc_feature (165)..(187): Homolog of NCBI NO: 18394936 NR Description: expressed protein; protein id: At1g21000.1, by cDNA: 119384., supported by cDNA: gi_14030626, supported by gi_16226406 [Arabidopsis thaliana]
  misc_feature (165)..(187): Homolog of NCBI NO: 25337907 NR Description: hypothetical protein F9H16.1 - Arabidopsis >gi|4836888|gb|AAD30591.1|AC007369_1 Unknown protein [Arabidopsis >gi|13877713|gb|AAK43934.1|AF370615_1 Unknown protein
  misc_feature (1)..(146): Homolog of NCBI NO: 18411153 NR Description: expressed protein; protein id: At1g76590.1,
  misc_feature (1)..(146): Homolog of NCBI NO: 21536890 NR Description: unknown [Arabidopsis thaliana]
  misc_feature (1)..(146): Homolog of NCBI NO: 25337904 NR Description: unknown protein F14G6.19 [imported] - Arabidopsis
  misc_feature (165)..(187): Homolog of NCBI NO: 18411153 NR Description: expressed protein; protein id: At1g76590.1,
MEEPKWLEGLLRTNFFSICPRHRETPRNECNMFCLSCQNAAFCFYCRSSFHIDHPVLQIRRSSYHDVVRVSEIENALDIRGVQTYVINSARVLFLNERPQPKNSSHGAASSTPKTMSYFCETCCRTLLDPFRFCSLGCKVEGMRKNKEEEEERLRKERQQETHKGTHPPTHTSNSRRRKGIPHRAPFAS

SEQ ID NO: 70971 - protein, 158 aa, Arabidopsis thaliana
  peptide (1)..(158): Ceres Seq. ID no. 3030820
  misc_feature (1)..(75): Pfam Name: Protein of unknown function, DUF597 Pfam Description: Protein of unknown function, DUF597
  misc_feature (134)..(156): Homolog of NCBI NO: 18394936 NR Description: expressed protein; protein id: At1g21000.1, by cDNA: 119384., supported by cDNA: gi_14030626, supported by gi_16226406 [Arabidopsis thaliana]
  misc_feature (134)..(156): Homolog of NCBI NO: 25337907 NR Description: hypothetical protein F9H16.1 - Arabidopsis >gi|4836888|gb|AAD30591.1|AC007369_1 Unknown protein [Arabidopsis >gi|13877713|gb|AAK43934.1|AF370615_1 Unknown protein
  misc_feature (1)..(115): Homolog of NCBI NO: 18411153 NR Description: expressed protein; protein id: At1g76590.1,
  misc_feature (1)..(75): Homolog of NCBI NO: 15226287 NR Description: unknown protein; protein id: At2g27930.1
  misc_feature (1)..(148): Homolog of NCBI NO: 18394936 NR Description: expressed protein; protein id: At1g21000.1, by cDNA: 119384., supported by cDNA: gi_14030626, supported by gi_16226406 [Arabidopsis thaliana]
  misc_feature (1)..(148): Homolog of NCBI NO: 25337907 NR Description: hypothetical protein F9H16.1 - Arabidopsis >gi|4836888|gb|AAD30591.1|AC007369_1 Unknown protein [Arabidopsis >gi|13877713|gb|AAK43934.1|AF370615_1 Unknown protein
  misc_feature (1)..(117): Homolog of NCBI NO: 20805059 NR Description: B1108H10.20 [Oryza sativa (japonica
  misc_feature (1)..(115): Homolog of NCBI NO: 21536890 NR Description: unknown [Arabidopsis thaliana]
  misc_feature (1)..(115): Homolog of NCBI NO: 25337904 NR Description: unknown protein F14G6.19 [imported] - Arabidopsis
  misc_feature (134)..(156): Homolog of NCBI NO: 18411153 NR Description: expressed protein; protein id: At1g76590.1,
MFCLSCQNAAFCFYCRSSFHIDHPVLQIRRSSYHDVVRVSEIENALDIRGVQTYVINSARVLFLNERPQPKNSSHGAASSTPKTMSYFCETCCRTLLDPFRFCSLGCKVEGMRKNKEEEEERLRKERQQETHKGTHPPTHTSNSRRRKGIPHRAPFAS

SEQ ID NO: 70972 - DNA, 1092 bp, Arabidopsis thaliana
  misc_feature (1)..(1092): Ceres Seq. ID no. 3031113
  misc_feature: MA Experiment ID: 20000180 Result: Down-regulated in Transcription
  misc_feature: MA Experiment 20000180 PARAMETER Experiment Name: At_Germinating_Seeds_P Parameter: Age (hr) Value: 24 vs. 0
  misc_feature: MA Experiment 20000180 PARAMETER Experiment Name: At_Germinating_Seeds_P Parameter: Tissue Value: Germinating Seeds
atgtcgacttctaagaccataaccttcactctcttcatagcagcactactctcgtcctgcgacgcagccacaaacgctacatcgcaaccactatttccagcgattcttatctttggcgattcaacagttgacacaggtaacaacaactaccactcacaaacaatcttcaaagccaaacatcttccttacggaatcgatctcccaaaccacaaagctagtggaagatttacaaatggcaaaatcttttccgacataatcgcaacaaaactcaacatcaaacagtttgttcctcccttcttacaaccaaatctctctgaccaagagattgtaaccggagtctgttttgcatcagccggtgcgggttacgatgaccataccagtctctctacgcaagcgattcgtgtcttggaccaacaaaagatgttcaagaattacattgctcgtcttaaaagtatcgtaggagacaagaaagctatggaaatcataaaaaatgctttggtggttataagtgcagggcctaacgattttatcttgaactattacgatattccttcaaggcgtcttgagtttcctcacatttctggttaccaagactttgttcttcaaaggcttgacaatttcgtgcgggagctttacagtttaggttgccggaaaattatggtaggaggtttaccgccgatgggttgtttaccgattcaaatgactgctaaattccgaaacgctctaaggttctgcttggaacaagagaaccgagactctgtcttatacaatcagaaacttcagaatctattacctcaaatcgaagcatcgcttacaggaagcaagatcctttactccaatgtctatgaccctatgatggacatgatgcaaaaccctagcaaatacggatttaaagagacgaagagaggatgttgtggaacagggcatttggagacgagcttcatgtgtaatgctttttctccaacgtgtagaaatcactcggagtttttgttctttgactcgattcatccatccgaagctacttataattatatgggcaattttctagatactcagatccgcgtgtggcttagcttgaggcttaagtcataa

SEQ ID NO: 70973 - protein, 363 aa, Arabidopsis thaliana
  peptide (1)..(363): Ceres Seq. ID no. 3031114
  misc_feature (35)..(349): Pfam Name: GDSL-like Lipase/Acylhydrolase Pfam Description: GDSL-like Lipase/Acylhydrolase
  misc_feature (1)..(300): Homolog of NCBI NO: 15224162 NR Description: putative GDSL-motif lipase/hydrolase; protein id:
  misc_feature (1)..(357): Homolog of NCBI NO: 15217963 NR Description: proline-rich protein, putative; protein id:
  misc_feature (1)..(357): Homolog of NCBI NO: 25336283 NR Description: hypothetical protein RXF26 [imported] -
  misc_feature (1)..(357): Homolog of NCBI NO: 21592974 NR Description: proline-rich protein, putative [Arabidopsis
  misc_feature (1)..(357): Homolog of NCBI NO: 15227734 NR Description: putative GDSL-motif lipase/hydrolase; protein id:
  misc_feature (1)..(354): Homolog of NCBI NO: 15225096 NR Description: putative GDSL-motif lipase/hydrolase; protein id:
  misc_feature (1)..(354): Homolog of NCBI NO: 21537117 NR Description: putative GDSL-motif lipase/hydrolase [Arabidopsis
  misc_feature (1)..(357): Homolog of NCBI NO: 15227723 NR Description: putative GDSL-motif lipase hydrolase; protein id:
  misc_feature (152)..(354): Homolog of NCBI NO: 25336273 NR Description: probable GDSL-motif lipase/hydrolase [imported] -
  misc_feature (1)..(119): Homolog of NCBI NO: 25336273 NR Description: probable GDSL-motif lipase/hydrolase [imported] -
MSTSKTITFTLFIAALLSSCDAATNATSQPLFPAILIFGDSTVDTGNNNYHSQTIFKAKHLPYGIDLPNHKASGRFTNGKIFSDIIATKLNIKQFVPPFLQPNLSDQEIVTGVCFASAGAGYDDHTSLSTQAIRVLDQQKMFKNYIARLKSIVGDKKAMEIIKNALVVISAGPNDFILNYYDIPSRRLEFPHISGYQDFVLQRLDNFVRELYSLGCRKIMVGGLPPMGCLPIQMTAKFRNALRFCLEQENRDSVLYNQKLQNLLPQIEASLTGSKILYSNVYDPMMDMMQNPSKYGFKETKRGCCGTGHLETSFMCNAFSPTCRNHSEFLFFDSIHPSEATYNYMGNFLDTQIRVWLSLRLKS

SEQ ID NO: 70974 - protein, 223 aa, Arabidopsis thaliana
  peptide (1)..(223): Ceres Seq. ID no. 3031115
  misc_feature (1)..(209): Pfam Name: GDSL-like Lipase/Acylhydrolase Pfam Description: GDSL-like Lipase/Acylhydrolase
  misc_feature (1)..(160): Homolog of NCBI NO: 15224162 NR Description: putative GDSL-motif lipase/hydrolase; protein id:
  misc_feature (1)..(217): Homolog of NCBI NO: 15217963 NR Description: proline-rich protein, putative; protein id:
  misc_feature (1)..(217): Homolog of NCBI NO: 25336283 NR Description: hypothetical protein RXF26 [imported] -
  misc_feature (1)..(217): Homolog of NCBI NO: 21592974 NR Description: proline-rich protein, putative [Arabidopsis
  misc_feature (1)..(217): Homolog of NCBI NO: 15227734 NR Description: putative GDSL-motif lipase/hydrolase; protein id:
  misc_feature (1)..(214): Homolog of NCBI NO: 15225096 NR Description: putative GDSL-motif lipase/hydrolase; protein id:
  misc_feature (1)..(214): Homolog of NCBI NO: 21537117 NR Description: putative GDSL-motif lipase/hydrolase [Arabidopsis
  misc_feature (1)..(217): Homolog of NCBI NO: 15227723 NR Description: putative GDSL-motif lipase hydrolase; protein id:
  misc_feature (12)..(214): Homolog of NCBI NO: 25336273 NR Description: probable GDSL-motif lipase/hydrolase [imported] -
  misc_feature (1)..(214): Homolog of NCBI NO: 18402700 NR Description: putative GDSL-motif lipase/hydrolase; protein id:
MFKNYIARLKSIVGDKKAMEIIKNALVVISAGPNDFILNYYDIPSRRLEFPHISGYQDFVLQRLDNFVRELYSLGCRKIMVGGLPPMGCLPIQMTAKFRNALRFCLEQENRDSVLYNQKLQNLLPQIEASLTGSKILYSNVYDPMMDMMQNPSKYGFKETKRGCCGTGHLETSFMCNAFSPTCRNHSEFLFFDSIHPSEATYNYMGNFLDTQIRVWLSLRLKS

SEQ ID NO: 70975 - protein, 205 aa, Arabidopsis thaliana
  peptide (1)..(205): Ceres Seq. ID no. 3031116
  misc_feature (1)..(191): Pfam Name: GDSL-like Lipase/Acylhydrolase Pfam Description: GDSL-like Lipase/Acylhydrolase
  misc_feature (1)..(142): Homolog of NCBI NO: 15224162 NR Description: putative GDSL-motif lipase/hydrolase; protein id:
  misc_feature (1)..(199): Homolog of NCBI NO: 15217963 NR Description: proline-rich protein, putative; protein id:
  misc_feature (1)..(199): Homolog of NCBI NO: 25336283 NR Description: hypothetical protein RXF26 [imported] -
  misc_feature (1)..(199): Homolog of NCBI NO: 21592974 NR Description: proline-rich protein, putative [Arabidopsis
  misc_feature (1)..(199): Homolog of NCBI NO: 15227734 NR Description: putative GDSL-motif lipase/hydrolase; protein id:
  misc_feature (1)..(196): Homolog of NCBI NO: 15225096 NR Description: putative GDSL-motif lipase/hydrolase; protein id:
  misc_feature (1)..(196): Homolog of NCBI NO: 21537117 NR Description: putative GDSL-motif lipase/hydrolase [Arabidopsis
  misc_feature (1)..(199): Homolog of NCBI NO: 15227723 NR Description: putative GDSL-motif lipase hydrolase; protein id:
  misc_feature (1)..(196): Homolog of NCBI NO: 25336273 NR Description: probable GDSL-motif lipase/hydrolase [imported] -
  misc_feature (1)..(196): Homolog of NCBI NO: 18402700 NR Description: putative GDSL-motif lipase/hydrolase; protein id:
MEIIKNALVVISAGPNDFILNYYDIPSRRLEFPHISGYQDFVLQRLDNFVRELYSLGCRKIMVGGLPPMGCLPIQMTAKFRNALRFCLEQENRDSVLYNQKLQNLLPQIEASLTGSKILYSNVYDPMMDMMQNPSKYGFKETKRGCCGTGHLETSFMCNAFSPTCRNHSEFLFFDSIHPSEATYNYMGNFLDTQIRVWLSLRLKS

SEQ ID NO: 70976 - DNA, 1929 bp, Arabidopsis thaliana
  misc_feature (1)..(1929): Ceres Seq. ID no. 3031144
  misc_feature: MA Experiment ID: 20000307 Result: Down-regulated in Transcription
  misc_feature: MA Experiment 20000307 PARAMETER Experiment Name: At_Germinating_Seeds_Sub_P Parameter: Age (hr) Value: 24 vs. 0
  misc_feature: MA Experiment 20000307 PARAMETER Experiment Name: At_Germinating_Seeds_Sub_P Parameter: Organism Value: A. thaliana
  misc_feature: MA Experiment 20000307 PARAMETER Experiment Name: At_Germinating_Seeds_Sub_P Parameter: Plant Line Value: WS
  misc_feature: MA Experiment 20000307 PARAMETER Experiment Name: At_Germinating_Seeds_Sub_P Parameter: Tissue Value: Germinating Seeds
atgtctatctttctccaagccactactacctctttcaattccttcaagttacaagtcgaacaagtccaaacccatctcacaaaatcaggtcttgatcggttcgtatacgtgaaaacatctcttcttaatctctacttgaagaagggttgcgtaacgagtgcacaaatgttgttcgatgaaatgcctgagagagatacagttgtttggaatgcattgatttgtgggtattcacgaaatggttatgagtgtgatgcgtggaagctttttatcgtaatgcttcagcaagggttttctccatctgctactacacttgtgaatttgttacctttttgtggacaatgtggttttgtatctcaagggagatctgttcatggtgttgctgcaaagtctggccttgagttggattctcaggtgaagaatgcgttgatttcgttttactcaaagtgtgcagagttgggttcagcagaagtcttgtttagagaaatgaaagataaaagcacagtttcttggaatacaatgattggtgcctatagccagagtggtttacaggaagaagccatcactgttttcaagaatatgtttgagaagaatgtggaaattagtccagtcactatcatcaatcttctttctgctcatgttagtcacgagccactacattgtcttgttgttaaatgtggaatggtgaatgatatatctgtggttacttctttggtctgtgcatattcaaggtgtgggtgtttggtttcagcagagcgtctttatgcgtctgctaaacaagatagtattgtcggcttaacttcgattgtttcatgctatgcggagaaaggagatatggatatagcagttgtgtatttttctaaaacgcgtcagttgtgtatgaaaattgatgctgtagctttagttggaattctccatggatgtaaaaagtcttcccatattgacataggaatgtcgttacatggttatgcgatcaaaagcggattgtgcacaaaaacactggttgtgaatggactgataactatgtactctaagtttgatgatgtagagactgtcctgtttttgtttgagcaactgcaggagactcctttaattagctggaactcagtgatatccgggtgtgtacagtctggaagggcaagtacagcttttgaggtgttccatcagatgatgttaactggtggacttttgccggatgccattacgatagccagtttgcttgctggctgttcccagctttgttgcttgaatttggggaaggagcttcatggctatactcttaggaacaattttgaaaatgagaactttgtttgcactgctctgatagatatgtatgccaaatgtggaaacgaagtacaagcggaaagtgtgttcaagagtataaaagctccgtgtacagcaacatggaactcaatgatatcaggatacagcttatcggggttacaacatcgagctctttcttgttacttggaaatgcgagagaaggggttgaaacctgacgagatcacctttttgggggttctgtctgcatgtaaccatggaggctttgtcgatgaaggaaaaatatgtttcagagcaatgatcaaagagtttggaatatctccaactttacagcattatgcacttatggttggcttgttgggaagagcatgtttatttactgaggcattgtatttaatttggaagatggatataaagccggattctgcagtatggggtgctctacttagcgcgtgcattattcacagagagttggaggttggggaatatgtagctaggaaaatgtttatgctggattacaagaatggagggctgtatgtattgatgtcaaacctatatgcaacagaagcaatgtgggacgacgtagttagagtcaggaatatgatgaaagataatggatacgatggttatttgggagttagccaaatataa

SEQ ID NO: 70977 - protein, 642 aa, Arabidopsis thaliana
  peptide (1)..(642): Ceres Seq. ID no. 3031145
  misc_feature (67)..(101): Pfam Name: PPR repeat Pfam Description: PPR repeat
  misc_feature (61)..(642): Homolog of NCBI NO: 15224419 NR Description: hypothetical protein; protein id: At2g04860.1
  misc_feature (26)..(630): Homolog of NCBI NO: 18394615 NR Description: hypothetical protein; protein id: At1g18485.1
  misc_feature (11)..(642): Homolog of NCBI NO: 15233590 NR Description: putative protein; protein id: At4g21300.1
  misc_feature (26)..(630): Homolog of NCBI NO: 25402861 NR Description: protein F15H18.4 [imported] - Arabidopsis >gi|6714305|gb|AAF26001.1|AC013354_20 F15H18.4 [Arabidopsis
  misc_feature (30)..(642): Homolog of NCBI NO: 34897084 NR Description: hypothetical protein [Oryza sativa (japonica group)] >gi|12957718|gb|AAK09236.1| hypothetical protein [Oryza
  misc_feature (20)..(642): Homolog of NCBI NO: 38423978 NR Description: PPR-repeat protein-like [Oryza sativa (japonica
  misc_feature (35)..(642): Homolog of NCBI NO: 15218216 NR Description: hypothetical protein; protein id: At1g15510.1
  misc_feature (13)..(642): Homolog of NCBI NO: 15220337 NR Description: hypothetical protein; protein id: At1g11290.1
  misc_feature (23)..(640): Homolog of NCBI NO: 15227623 NR Description: unknown protein; protein id: At2g03380.1
  misc_feature (1)..(632): Homolog of NCBI NO: 15235115 NR Description: putative protein; protein id: At4g39530.1
MSIFLQATTTSFNSFKLQVEQVQTHLTKSGLDRFVYVKTSLLNLYLKKGCVTSAQMLFDEMPERDTVVWNALICGYSRNGYECDAWKLFIVMLQQGFSPSATTLVNLLPFCGQCGFVSQGRSVHGVAAKSGLELDSQVKNALISFYSKCAELGSAEVLFREMKDKSTVSWNTMIGAYSQSGLQEEAITVFKNMFEKNVEISPVTIINLLSAHVSHEPLHCLVVKCGMVNDISVVTSLVCAYSRCGCLVSAERLYASAKQDSIVGLTSIVSCYAEKGDMDIAVVYFSKTRQLCMKIDAVALVGILHGCKKSSHIDIGMSLHGYAIKSGLCTKTLVVNGLITMYSKFDDVETVLFLFEQLQETPLISWNSVISGCVQSGRASTAFEVFHQMMLTGGLLPDAITIASLLAGCSQLCCLNLGKELHGYTLRNNFENENFVCTALIDMYAKCGNEVQAESVFKSIKAPCTATWNSMISGYSLSGLQHRALSCYLEMREKGLKPDEITFLGVLSACNHGGFVDEGKICFRAMIKEFGISPTLQHYALMVGLLGRACLFTEALYLIWKMDIKPDSAVWGALLSACIIHRELEVGEYVARKMFMLDYKNGGLYVLMSNLYATEAMWDDVVRVRNMMKDNGYDGYLGVSQI

SEQ ID NO: 70978 - protein, 587 aa, Arabidopsis thaliana
  peptide (1)..(587): Ceres Seq. ID no. 3031146
  misc_feature (12)..(46): Pfam Name: PPR repeat Pfam Description: PPR repeat
  misc_feature (6)..(587): Homolog of NCBI NO: 15224419 NR Description: hypothetical protein; protein id: At2g04860.1
  misc_feature (1)..(575): Homolog of NCBI NO: 18394615 NR Description: hypothetical protein; protein id: At1g18485.1
  misc_feature (1)..(587): Homolog of NCBI NO: 15233590 NR Description: putative protein; protein id: At4g21300.1
  misc_feature (1)..(575): Homolog of NCBI NO: 25402861 NR Description: protein F15H18.4 [imported] - Arabidopsis >gi|6714305|gb|AAF26001.1|AC013354_20 F15H18.4 [Arabidopsis
  misc_feature (1)..(587): Homolog of NCBI NO: 34897084 NR Description: hypothetical protein [Oryza sativa (japonica group)] >gi|12957718|gb|AAK09236.1| hypothetical protein [Oryza
  misc_feature (1)..(587): Homolog of NCBI NO: 38423978 NR Description: PPR-repeat protein-like [Oryza sativa (japonica
  misc_feature (1)..(587): Homolog of NCBI NO: 15218216 NR Description: hypothetical protein; protein id: At1g15510.1
  misc_feature (1)..(587): Homolog of NCBI NO: 15220337 NR Description: hypothetical protein; protein id: At1g11290.1
  misc_feature (1)..(585): Homolog of NCBI NO: 15227623 NR Description: unknown protein; protein id: At2g03380.1
  misc_feature (1)..(577): Homolog of NCBI NO: 15235115 NR Description: putative protein; protein id: At4g39530.1
MLFDEMPERDTVVWNALICGYSRNGYECDAWKLFIVMLQQGFSPSATTLVNLLPFCGQCGFVSQGRSVHGVAAKSGLELDSQVKNALISFYSKCAELGSAEVLFREMKDKSTVSWNTMIGAYSQSGLQEEAITVFKNMFEKNVEISPVTIINLLSAHVSHEPLHCLVVKCGMVNDISVVTSLVCAYSRCGCLVSAERLYASAKQDSIVGLTSIVSCYAEKGDMDIAVVYFSKTRQLCMKIDAVALVGILHGCKKSSHIDIGMSLHGYAIKSGLCTKTLVVNGLITMYSKFDDVETVLFLFEQLQETPLISWNSVISGCVQSGRASTAFEVFHQMMLTGGLLPDAITIASLLAGCSQLCCLNLGKELHGYTLRNNFENENFVCTALIDMYAKCGNEVQAESVFKSIKAPCTATWNSMISGYSLSGLQHRALSCYLEMREKGLKPDEITFLGVLSACNHGGFVDEGKICFRAMIKEFGISPTLQHYALMVGLLGRACLFTEALYLIWKMDIKPDSAVWGALLSACIIHRELEVGEYVARKMFMLDYKNGGLYVLMSNLYATEAMWDDVVRVRNMMKDNGYDGYLGVSQI

SEQ ID NO: 70979 - protein, 582 aa, Arabidopsis thaliana
  peptide (1)..(582): Ceres Seq. ID no. 3031147
  misc_feature (7)..(41): Pfam Name: PPR repeat Pfam Description: PPR repeat
  misc_feature (1)..(582): Homolog of NCBI NO: 15224419 NR Description: hypothetical protein; protein id: At2g04860.1
  misc_feature (1)..(570): Homolog of NCBI NO: 18394615 NR Description: hypothetical protein; protein id: At1g18485.1
  misc_feature (1)..(582): Homolog of NCBI NO: 15233590 NR Description: putative protein; protein id: At4g21300.1
  misc_feature (1)..(570): Homolog of NCBI NO: 25402861 NR Description: protein F15H18.4 [imported] - Arabidopsis >gi|6714305|gb|AAF26001.1|AC013354_20 F15H18.4 [Arabidopsis
  misc_feature (1)..(582): Homolog of NCBI NO: 34897084 NR Description: hypothetical protein [Oryza sativa (japonica group)] >gi|12957718|gb|AAK09236.1| hypothetical protein [Oryza
  misc_feature (1)..(582): Homolog of NCBI NO: 38423978 NR Description: PPR-repeat protein-like [Oryza sativa (japonica
  misc_feature (1)..(582): Homolog of NCBI NO: 15218216 NR Description: hypothetical protein; protein id: At1g15510.1
  misc_feature (1)..(582): Homolog of NCBI NO: 15220337 NR Description: hypothetical protein; protein id: At1g11290.1
  misc_feature (1)..(580): Homolog of NCBI NO: 15227623 NR Description: unknown protein; protein id: At2g03380.1
  misc_feature (1)..(572): Homolog of NCBI NO: 15235115 NR Description: putative protein; protein id: At4g39530.1
MPERDTVVWNALICGYSRNGYECDAWKLFIVMLQQGFSPSATTLVNLLPFCGQCGFVSQGRSVHGVAAKSGLELDSQVKNALISFYSKCAELGSAEVLFREMKDKSTVSWNTMIGAYSQSGLQEEAITVFKNMFEKNVEISPVTIINLLSAHVSHEPLHCLVVKCGMVNDISVVTSLVCAYSRCGCLVSAERLYASAKQDSIVGLTSIVSCYAEKGDMDIAVVYFSKTRQLCMKIDAVALVGILHGCKKSSHIDIGMSLHGYAIKSGLCTKTLVVNGLITMYSKFDDVETVLFLFEQLQETPLISWNSVISGCVQSGRASTAFEVFHQMMLTGGLLPDAITIASLLAGCSQLCCLNLGKELHGYTLRNNFENENFVCTALIDMYAKCGNEVQAESVFKSIKAPCTATWNSMISGYSLSGLQHRALSCYLEMREKGLKPDEITFLGVLSACNHGGFVDEGKICFRAMIKEFGISPTLQHYALMVGLLGRACLFTEALYLIWKMDIKPDSAVWGALLSACIIHRELEVGEYVARKMFMLDYKNGGLYVLMSNLYATEAMWDDVVRVRNMMKDNGYDGYLGVSQI

SEQ ID NO: 70980 - DNA, 2568 bp, Arabidopsis thaliana
  misc_feature (1)..(2568): Ceres Seq. ID no. 3031600
  misc_feature: MA Experiment ID: 20000180 Result: Up-regulated in Transcription
  misc_feature: MA Experiment 20000180 PARAMETER Experiment Name: At_Germinating_Seeds_P Parameter: Age (hr) Value: 24 vs. 0
  misc_feature: MA Experiment 20000180 PARAMETER Experiment Name: At_Germinating_Seeds_P Parameter: Tissue Value: Germinating Seeds
  misc_feature: MA Experiment ID: 20000185 Result: Up-regulated in Transcription
  misc_feature: MA Experiment 20000185 PARAMETER Experiment Name: At_Roots__P Parameter: Age (day) Value: 7 vs. 21
  misc_feature: MA Experiment 20000185 PARAMETER Experiment Name: At_Roots__P Parameter: Organism Value: A. thaliana
  misc_feature: MA Experiment 20000185 PARAMETER Experiment Name: At_Roots__P Parameter: Tissue Value: Roots vs. Whole Plant
  misc_feature: MA Experiment ID: 20000227 Result: Up-regulated in Transcription
  misc_feature: MA Experiment 20000227 PARAMETER Experiment Name: At_Root-Tips-vs-Tops_P Parameter: Tissue Value: Root Tips vs. Root Tops
  misc_feature: MA Experiment ID: 20000234 Result: Up-regulated in Transcription
  misc_feature: MA Experiment 20000234 PARAMETER Experiment Name: At_Siliques_P Parameter: Age (day) Value: 21
  misc_feature: MA Experiment 20000234 PARAMETER Experiment Name: At_Siliques_P Parameter: Organism Value: A. thaliana
  misc_feature: MA Experiment 20000234 PARAMETER Experiment Name: At_Siliques_P Parameter: Plant Line Value: WS
  misc_feature: MA Experiment 20000234 PARAMETER Experiment Name: At_Siliques_P Parameter: Tissue Value: Less Than 5mm Siliques vs. Whole Plant
  misc_feature: MA Experiment ID: 20000235 Result: Up-regulated in Transcription
  misc_feature: MA Experiment 20000235 PARAMETER Experiment Name: At_Siliques_P Parameter: Age (day) Value: 21
  misc_feature: MA Experiment 20000235 PARAMETER Experiment Name: At_Siliques_P Parameter: Organism Value: A. thaliana
  misc_feature: MA Experiment 20000235 PARAMETER Experiment Name: At_Siliques_P Parameter: Plant Line Value: WS
  misc_feature: MA Experiment 20000235 PARAMETER Experiment Name: At_Siliques_P Parameter: Tissue Value: 5-10mm Siliques vs. Whole Plant
  misc_feature: MA Experiment ID: 20000264 Result: Up-regulated in Transcription
  misc_feature: MA Experiment 20000264 PARAMETER Experiment Name: At_Open_Flower_P Parameter: Age (day) Value: 21
  misc_feature: MA Experiment 20000264 PARAMETER Experiment Name: At_Open_Flower_P Parameter: Plant Line Value: WS
  misc_feature: MA Experiment 20000264 PARAMETER Experiment Name: At_Open_Flower_P Parameter: Tissue Value: Open Flower vs. Whole Plant
  misc_feature: MA Experiment ID: 20000265 Result: Up-regulated in Transcription
  misc_feature: MA Experiment 20000265 PARAMETER Experiment Name: At_Open_Flower_P Parameter: Age (day) Value: 21
  misc_feature: MA Experiment 20000265 PARAMETER Experiment Name: At_Open_Flower_P Parameter: Plant Line Value: WS
  misc_feature: MA Experiment 20000265 PARAMETER Experiment Name: At_Open_Flower_P Parameter: Tissue Value: Closed Flower vs. Whole Plant
  misc_feature: MA Experiment ID: 20000286 Result: Up-regulated in Transcription
  misc_feature: MA Experiment 20000286 PARAMETER Experiment Name: At_Open_Flower_P Parameter: Age (day) Value: 21
  misc_feature: MA Experiment 20000286 PARAMETER Experiment Name: At_Open_Flower_P Parameter: Plant Line Value: WS
  misc_feature: MA Experiment 20000286 PARAMETER Experiment Name: At_Open_Flower_P Parameter: Tissue Value: Half Open vs. Whole Plant
  misc_feature: MA Experiment ID: 20000437 Result: Down-regulated in Transcription
  misc_feature: MA Experiment 20000437 PARAMETER Experiment Name: At_Drought_P Parameter: Age (day) Value: 8
  misc_feature: MA Experiment 20000437 PARAMETER Experiment Name: At_Drought_P Parameter: Organism Value: A. thaliana
  misc_feature: MA Experiment 20000437 PARAMETER Experiment Name: At_Drought_P Parameter: Plant Line Value: WS
  misc_feature: MA Experiment 20000437 PARAMETER Experiment Name: At_Drought_P Parameter: Timepoint (hr) Value: 24
  misc_feature: MA Experiment 20000437 PARAMETER Experiment Name: At_Drought_P Parameter: Tissue Value: Whole Plant
  misc_feature: MA Experiment 20000437 PARAMETER Experiment Name: At_Drought_P Parameter: Treatment Value: Drought vs. No Drought
  misc_feature: MA Experiment ID: 20000495 Result: Up-regulated in Transcription
  misc_feature: MA Experiment 20000495 PARAMETER Experiment Name: At_Guard_Cells_P Parameter: Harvest Date Value: 8/2/2002
  misc_feature: MA Experiment 20000495 PARAMETER Experiment Name: At_Guard_Cells_P Parameter: Organism Value: A. thaliana
  misc_feature: MA Experiment 20000495 PARAMETER Experiment Name: At_Guard_Cells_P Parameter: Tissue Value: Guard Cells vs. Leaves
  misc_feature: MA Experiment ID: 20001451 Result: Down-regulated in Transcription
  misc_feature: MA Experiment 20001451 PARAMETER Experiment Name: At_Far-red-induction_P Parameter: Age (day) Value: 7
  misc_feature: MA Experiment 20001451 PARAMETER Experiment Name: At_Far-red-induction_P Parameter: Light Value: Far-red vs. White
  misc_feature: MA Experiment 20001451 PARAMETER Experiment Name: At_Far-red-induction_P Parameter: Organism Value: A. thaliana
  misc_feature: MA Experiment 20001451 PARAMETER Experiment Name: At_Far-red-induction_P Parameter: Plant Line Value: Columbia
  misc_feature: MA Experiment 20001451 PARAMETER Experiment Name: At_Far-red-induction_P Parameter: Timepoint (hr) Value: 24
  misc_feature: MA Experiment 20001451 PARAMETER Experiment Name: At_Far-red-induction_P Parameter: Tissue Value: Whole Plant
  misc_feature: MA Experiment ID: 20001555 Result: Down-regulated in Transcription
  misc_feature: MA Experiment 20001555 PARAMETER Experiment Name: At_Drought_Soil_Dry_P Parameter: Age (day) Value: 24
  misc_feature: MA Experiment 20001555 PARAMETER Experiment Name: At_Drought_Soil_Dry_P Parameter: Organism Value: A. thaliana
  misc_feature: MA Experiment 20001555 PARAMETER Experiment Name: At_Drought_Soil_Dry_P Parameter: Plant Line Value: WS
  misc_feature: MA Experiment 20001555 PARAMETER Experiment Name: At_Drought_Soil_Dry_P Parameter: Post Timepoint (hr) Value: None
  misc_feature: MA Experiment 20001555 PARAMETER Experiment Name: At_Drought_Soil_Dry_P Parameter: Post-Treatment Value: None
  misc_feature: MA Experiment 20001555 PARAMETER Experiment Name: At_Drought_Soil_Dry_P Parameter: Timepoint (day) Value: 10
  misc_feature: MA Experiment 20001555 PARAMETER Experiment Name: At_Drought_Soil_Dry_P Parameter: Treatment Value: Drought vs. No Drought
  misc_feature: MA Experiment ID: 20001558 Result: Up-regulated in Transcription
  misc_feature: MA Experiment 20001558 PARAMETER Experiment Name: At_Drought_Soil_Dry_P Parameter: Age (day) Value: 27
  misc_feature: MA Experiment 20001558 PARAMETER Experiment Name: At_Drought_Soil_Dry_P Parameter: Organism Value: A. thaliana
  misc_feature: MA Experiment 20001558 PARAMETER Experiment Name: At_Drought_Soil_Dry_P Parameter: Plant Line Value: WS
  misc_feature: MA Experiment 20001558 PARAMETER Experiment Name: At_Drought_Soil_Dry_P Parameter: Post Timepoint (hr) Value: 6
  misc_feature: MA Experiment 20001558 PARAMETER Experiment Name: At_Drought_Soil_Dry_P Parameter: Post-Treatment Value: Re-Water vs. No Drought
  misc_feature: MA Experiment 20001558 PARAMETER Experiment Name: At_Drought_Soil_Dry_P Parameter: Timepoint (day) Value: 13
  misc_feature: MA Experiment 20001558 PARAMETER Experiment Name: At_Drought_Soil_Dry_P Parameter: Treatment Value: Drought vs. No Drought
  misc_feature: MA Experiment ID: 20001560 Result: Up-regulated in Transcription
  misc_feature: MA Experiment 20001560 PARAMETER Experiment Name: At_Drought_Soil_Dry_P Parameter: Age (day) Value: 28
  misc_feature: MA Experiment 20001560 PARAMETER Experiment Name: At_Drought_Soil_Dry_P Parameter: Organism Value: A. thaliana
  misc_feature: MA Experiment 20001560 PARAMETER Experiment Name: At_Drought_Soil_Dry_P Parameter: Plant Line Value: WS
  misc_feature: MA Experiment 20001560 PARAMETER Experiment Name: At_Drought_Soil_Dry_P Parameter: Post Timepoint (hr) Value: None
  misc_feature: MA Experiment 20001560 PARAMETER Experiment Name: At_Drought_Soil_Dry_P Parameter: Post-Treatment Value: None
  misc_feature: MA Experiment 20001560 PARAMETER Experiment Name: At_Drought_Soil_Dry_P Parameter: Timepoint (day) Value: 14
  misc_feature: MA Experiment 20001560 PARAMETER Experiment Name: At_Drought_Soil_Dry_P Parameter: Treatment Value: Drought vs. No Drought
atggcttctgattcttctctcggcaacaccaacgacggtcctccttctcccggagaaaacgtttcaagccctatcgaaaacacatactcttcccccgccgcacttcaccgtcgccggcgaggaagatcctctactcccacgcaattcgcaactcctccaccaccgccttcacgtctcgcatcatccaattccactcctccaacatctcgtccttccgccgccagatctaaaggaagaaatggacacggaggtggcggtggtggcggtggtggcggagacccagggacgccaatgtccactgacgagccactgccttcttccgatgacggtgaagaagacggaggcgacgatactactccgactttcgtttggggaactaacatcagtgtgcaagatgttaaatctgcgattgaaatgtttgttaagcatttcagagaagctagagagaatagtgatgatttgtttagagaagggaagtatatggtttcgataaggaaggtgattgagattgaaggagaatggattgatgttgatgcgtttgatgtgtttgattatgatcctgatttgtataacaagatggttcgttatcctttggaagttctcgctatcttcgatattgtgctgatggatattgtttccacgattaatcgtttgttcgagaaacatgttcaagttaggatttttaacctcaggacatctacttccatgagaaatctcaatccatctgatatcgagaagatgatctctttgaaaggtatgataattcggagtagctctatcattcctgaaataagggaagctgtgtttagatgccttgtttgtggttacttctctgaccccatcatcgttgatagagggaaaataagtgagcctcctacttgcttgaaacaagagtgcatgaccaagaactccatgacactagtgcacaaccgatgcaggtttgctgataagcagattgtgaggcttcaggaaacacctgatgagattccagaaggaggaacacctcacacagttagcttgttgctgcatgataagctagttgataatgggaagcctggtgatagaattgaggtcaccggaatttacagagcaatgactgtccgagtgggacctgctcacaggactgtgaaatctgtgtttaaggcatgtcatcttatttcttcctctacctatatcgattgccttcacataaagaaagcaagtaagttaagaatgtctgctgaggatcctatggatgttgacaatagtctgcgtagagttgatgaagatgtcgagttagatgaggagaagctgaggaagtttcaggaactctctaaacaaccagatatatatgagaggcttagtagatcactagcaccaaacatctgggagttggatgatgttaaaaagggtcttctatgccagctttttggagggaatgctttgaacttagcatctggtgctaattttcgtggtgacatcaacatcttacttgttggtgaccctggtacgagcaagtcccagctgctccagtacattcataagctttcaccccgtggcatttacacaagtgggcgagggagctcagctgttggtttaacagcttatgtagctaaagatcctgagacaggagaaactgttttggagagtggagctcttgttcttagtgaccgaggtatctgctgtattgatgaatttgacaaaatgtctgacagtgcgaggagcatgctacacgaggtgatggaacagcagactgtttcaatagcaaaggctggtattattgcatctctaaatgccagaacctctgtgttggcttgtgcaaatcctagtggctcacgttataatccccggctttctgttattgagaatattcaccttcctccaaccttgctatctagattcgatttgatctacttgattcttgacaagcccgatgagcagactgaccgaaggcttgcaaagcatattgtggcccttcactttgagaacgctgagagtgctcaggaggaagctatagatattactacactgacaacttatgttagctatgcccgcaagaacattcatcctaaactgtcagatgaagctgcagaggagttgacccgaggatatgttgagctgagaaaagcagggaagtttgctggcagtagcaaaaaggtcataacagcaactcctaggcagattgaaagtttgatcagacttagtgaggccttggctcggatgcgcttctccgaatgggttgaaaagcatgacgtggacgaggcatttcgacttctcagagttgcaatgcagcaatcagcaacggatcacgccacagggaccattgacatggacctgataaatactggagtgtcagcaagtgaacgaatgaggcgggatacctttgcgtcgtcaattagagacatagctctggagaagatgcaaattggaggatcatcaatgcgcttatccgagttacttgaagaactgaagaagcatggaggcaacataaacaccgaaattcatcttcatgatgttagaaaagcagtcgcgacgctagcgagtgaaggatttctggtagctgaaggtgatagaatcaagagagtataa

SEQ ID NO: 70981 - protein, 855 aa, Arabidopsis thaliana
  peptide (1)..(855): Ceres Seq. ID no. 3031601
  misc_feature (232)..(757): Pfam Name: MCM2/3/5 family Pfam Description: MCM2/3/5 family
  misc_feature (8)..(832): Homolog of NCBI NO: 34913746 NR Description: putative cdc21 protein [Oryza sativa (japonica group)] >gi|20161792|dbj|BAB90707.1| putative cdc21 protein
  misc_feature (223)..(849): Homolog of NCBI NO: 28829641 NR Description: similar to essential for initiation of DNA homolog of S. pombe CDC21; Cdc54p [Saccharomyces cerevisiae]
  misc_feature (101)..(227): Homolog of NCBI NO: 28829641 NR Description: similar to essential for initiation of DNA homolog of S. pombe CDC21; Cdc54p [Saccharomyces cerevisiae]
  misc_feature (117)..(843): Homolog of NCBI NO: 283070 NR Description: replication licensing factor MCM4 - fission yeast
  misc_feature (117)..(818): Homolog of NCBI NO: 6226565 NR Description: Cdc21 protein >gi|4165293|emb|CAA41628.1| cdc21
  misc_feature (160)..(854): Homolog of NCBI NO: 6325276 NR Description: essential for initiation of DNA replication; of S. pombe CDC21; Cdc54p [Saccharomyces cerevisiae] Cell division control protein 54 >gi|1084526|pir||S56050
  misc_feature (2)..(853): Homolog of NCBI NO: 34870013 NR Description: mini chromosome maintenance deficient 4 homolog
  misc_feature (123)..(853): Homolog of NCBI NO: 940536 NR Description: P1 Cdc21 protein [Homo sapiens]
  misc_feature (123)..(853): Homolog of NCBI NO: 1705520 NR Description: DNA REPLICATION LICENSING FACTOR MCM4 (CDC21
  misc_feature (92)..(853): Homolog of NCBI NO: 26354819 NR Description: unnamed protein product [Mus musculus]
MASDSSLGNTNDGPPSPGENVSSPIENTYSSPAALHRRRRGRSSTPTQFATPPPPPSRLASSNSTPPTSRPSAARSKGRNGHGGGGGGGGGGDPGTPMSTDEPLPSSDDGEEDGGDDTTPTFVWGTNISVQDVKSAIEMFVKHFREARENSDDLFREGKYMVSIRKVIEIEGEWIDVDAFDVFDYDPDLYNKMVRYPLEVLAIFDIVLMDIVSTINRLFEKHVQVRIFNLRTSTSMRNLNPSDIEKMISLKGMIIRSSSIIPEIREAVFRCLVCGYFSDPIIVDRGKISEPPTCLKQECMTKNSMTLVHNRCRFADKQIVRLQETPDEIPEGGTPHTVSLLLHDKLVDNGKPGDRIEVTGIYRAMTVRVGPAHRTVKSVFKACHLISSSTYIDCLHIKKASKLRMSAEDPMDVDNSLRRVDEDVELDEEKLRKFQELSKQPDIYERLSRSLAPNIWELDDVKKGLLCQLFGGNALNLASGANFRGDINILLVGDPGTSKSQLLQYIHKLSPRGIYTSGRGSSAVGLTAYVAKDPETGETVLESGALVLSDRGICCIDEFDKMSDSARSMLHEVMEQQTVSIAKAGIIASLNARTSVLACANPSGSRYNPRLSVIENIHLPPTLLSRFDLIYLILDKPDEQTDRRLAKHIVALHFENAESAQEEAIDITTLTTYVSYARKNIHPKLSDEAAEELTRGYVELRKAGKFAGSSKKVITATPRQIESLIRLSEALARMRFSEWVEKHDVDEAFRLLRVAMQQSATDHATGTIDMDLINTGVSASERMRRDTFASSIRDIALEKMQIGGSSMRLSELLEELKKHGGNINTEIHLHDVRKAVATLASEGFLVAEGDRIKRV

SEQ ID NO: 70982 - protein, 758 aa, Arabidopsis thaliana
  peptide (1)..(758): Ceres Seq. ID no. 3031602
  misc_feature (135)..(660): Pfam Name: MCM2/3/5 family Pfam Description: MCM2/3/5 family
  misc_feature (1)..(735): Homolog of NCBI NO: 34913746 NR Description: putative cdc21 protein [Oryza sativa (japonica group)] >gi|20161792|dbj|BAB90707.1| putative cdc21 protein
  misc_feature (126)..(752): Homolog of NCBI NO: 28829641 NR Description: similar to essential for initiation of DNA homolog of S. pombe CDC21; Cdc54p [Saccharomyces cerevisiae]
  misc_feature (4)..(130): Homolog of NCBI NO: 28829641 NR Description: similar to essential for initiation of DNA homolog of S. pombe CDC21; Cdc54p [Saccharomyces cerevisiae]
  misc_feature (20)..(746): Homolog of NCBI NO: 283070 NR Description: replication licensing factor MCM4 - fission yeast
  misc_feature (20)..(721): Homolog of NCBI NO: 6226565 NR Description: Cdc21 protein >gi|4165293|emb|CAA41628.1| cdc21
  misc_feature (63)..(757): Homolog of NCBI NO: 6325276 NR Description: essential for initiation of DNA replication; of S. pombe CDC21; Cdc54p [Saccharomyces cerevisiae] Cell division control protein 54 >gi|1084526|pir||S56050
  misc_feature (1)..(756): Homolog of NCBI NO: 34870013 NR Description: mini chromosome maintenance deficient 4 homolog
  misc_feature (26)..(756): Homolog of NCBI NO: 940536 NR Description: P1 Cdc21 protein [Homo sapiens]
  misc_feature (26)..(756): Homolog of NCBI NO: 1705520 NR Description: DNA REPLICATION LICENSING FACTOR MCM4 (CDC21
  misc_feature (1)..(756): Homolog of NCBI NO: 26354819 NR Description: unnamed protein product [Mus musculus]
MSTDEPLPSSDDGEEDGGDDTTPTFVWGTNISVQDVKSAIEMFVKHFREARENSDDLFREGKYMVSIRKVIEIEGEWIDVDAFDVFDYDPDLYNKMVRYPLEVLAIFDIVLMDIVSTINRLFEKHVQVRIFNLRTSTSMRNLNPSDIEKMISLKGMIIRSSSIIPEIREAVFRCLVCGYFSDPIIVDRGKISEPPTCLKQECMTKNSMTLVHNRCRFADKQIVRLQETPDEIPEGGTPHTVSLLLHDKLVDNGKPGDRIEVTGIYRAMTVRVGPAHRTVKSVFKACHLISSSTYIDCLHIKKASKLRMSAEDPMDVDNSLRRVDEDVELDEEKLRKFQELSKQPDIYERLSRSLAPNIWELDDVKKGLLCQLFGGNALNLASGANFRGDINILLVGDPGTSKSQLLQYIHKLSPRGIYTSGRGSSAVGLTAYVAKDPETGETVLESGALVLSDRGICCIDEFDKMSDSARSMLHEVMEQQTVSIAKAGIIASLNARTSVLACANPSGSRYNPRLSVIENIHLPPTLLSRFDLIYLILDKPDEQTDRRLAKHIVALHFENAESAQEEAIDITTLTTYVSYARKNIHPKLSDEAAEELTRGYVELRKAGKFAGSSKKVITATPRQIESLIRLSEALARMRFSEWVEKHDVDEAFRLLRVAMQQSATDHATGTIDMDLINTGVSASERMRRDTFASSIRDIALEKMQIGGSSMRLSELLEELKKHGGNINTEIHLHDVRKAVATLASEGFLVAEGDRIKRV

SEQ ID NO: 70983 - protein, 717 aa, Arabidopsis thaliana
  peptide (1)..(717): Ceres Seq. ID no. 3031603
  misc_feature (94)..(619): Pfam Name: MCM2/3/5 family Pfam Description: MCM2/3/5 family
  misc_feature (1)..(694): Homolog of NCBI NO: 34913746 NR Description: putative cdc21 protein [Oryza sativa (japonica group)] >gi|20161792|dbj|BAB90707.1| putative cdc21 protein
  misc_feature (85)..(711): Homolog of NCBI NO: 28829641 NR Description: similar to essential for initiation of DNA homolog of S. pombe CDC21; Cdc54p [Saccharomyces cerevisiae]
  misc_feature (1)..(89): Homolog of NCBI NO: 28829641 NR Description: similar to essential for initiation of DNA homolog of S. pombe CDC21; Cdc54p [Saccharomyces cerevisiae]
  misc_feature (1)..(705): Homolog of NCBI NO: 283070 NR Description: replication licensing factor MCM4 - fission yeast
  misc_feature (1)..(680): Homolog of NCBI NO: 6226565 NR Description: Cdc21 protein >gi|4165293|emb|CAA41628.1| cdc21
  misc_feature (22)..(716): Homolog of NCBI NO: 6325276 NR Description: essential for initiation of DNA replication; of S. pombe CDC21; Cdc54p [Saccharomyces cerevisiae] Cell division control protein 54 >gi|1084526|pir||S56050
  misc_feature (1)..(715): Homolog of NCBI NO: 34870013 NR Description: mini chromosome maintenance deficient 4 homolog
  misc_feature (1)..(715): Homolog of NCBI NO: 940536 NR Description: P1 Cdc21 protein [Homo sapiens]
  misc_feature (1)..(715): Homolog of NCBI NO: 1705520 NR Description: DNA REPLICATION LICENSING FACTOR MCM4 (CDC21
  misc_feature (1)..(715): Homolog of NCBI NO: 26354819 NR Description: unnamed protein product [Mus musculus]
MFVKHFREARENSDDLFREGKYMVSIRKVIEIEGEWIDVDAFDVFDYDPDLYNKMVRYPLEVLAIFDIVLMDIVSTINRLFEKHVQVRIFNLRTSTSMRNLNPSDIEKMISLKGMIIRSSSIIPEIREAVFRCLVCGYFSDPIIVDRGKISEPPTCLKQECMTKNSMTLVHNRCRFADKQIVRLQETPDEIPEGGTPHTVSLLLHDKLVDNGKPGDRIEVTGIYRAMTVRVGPAHRTVKSVFKACHLISSSTYIDCLHIKKASKLRMSAEDPMDVDNSLRRVDEDVELDEEKLRKFQELSKQPDIYERLSRSLAPNIWELDDVKKGLLCQLFGGNALNLASGANFRGDINILLVGDPGTSKSQLLQYIHKLSPRGIYTSGRGSSAVGLTAYVAKDPETGETVLESGALVLSDRGICCIDEFDKMSDSARSMLHEVMEQQTVSIAKAGIIASLNARTSVLACANPSGSRYNPRLSVIENIHLPPTLLSRFDLIYLILDKPDEQTDRRLAKHIVALHFENAESAQEEAIDITTLTTYVSYARKNIHPKLSDEAAEELTRGYVELRKAGKFAGSSKKVITATPRQIESLIRLSEALARMRFSEWVEKHDVDEAFRLLRVAMQQSATDHATGTIDMDLINTGVSASERMRRDTFASSIRDIALEKMQIGGSSMRLSELLEELKKHGGNINTEIHLHDVRKAVATLASEGFLVAEGDRIKRV

SEQ ID NO: 70984 - DNA, 1077 bp, Arabidopsis thaliana
  misc_feature (1)..(1077): Ceres Seq. ID no. 3031896
  misc_feature: MA Experiment ID: 20000347 Result: Down-regulated in Transcription
  misc_feature: MA Experiment 20000347 PARAMETER Experiment Name: At_2mM_SA_Sub_P Parameter: Age (day) Value: 14
  misc_feature: MA Experiment 20000347 PARAMETER Experiment Name: At_2mM_SA_Sub_P Parameter: Organism Value: A. thaliana
  misc_feature: MA Experiment 20000347 PARAMETER Experiment Name: At_2mM_SA_Sub_P Parameter: Plant Line Value: WS
  misc_feature: MA Experiment 20000347 PARAMETER Experiment Name: At_2mM_SA_Sub_P Parameter: Timepoint (hr) Value: 6
  misc_feature: MA Experiment 20000347 PARAMETER Experiment Name: At_2mM_SA_Sub_P Parameter: Tissue Value: Aerial
  misc_feature: MA Experiment 20000347 PARAMETER Experiment Name: At_2mM_SA_Sub_P Parameter: Treatment Value: 2mM SA vs. No Treatment
  misc_feature: MA Experiment ID: 20000349 Result: Down-regulated in Transcription
  misc_feature: MA Experiment 20000349 PARAMETER Experiment Name: At_100uM_ABA_Sub_P Parameter: Age (day) Value: 14
  misc_feature: MA Experiment 20000349 PARAMETER Experiment Name: At_100uM_ABA_Sub_P Parameter: Organism Value: A. thaliana
  misc_feature: MA Experiment 20000349 PARAMETER Experiment Name: At_100uM_ABA_Sub_P Parameter: Plant Line Value: WS
  misc_feature: MA Experiment 20000349 PARAMETER Experiment Name: At_100uM_ABA_Sub_P Parameter: Timepoint (hr) Value: 6
  misc_feature: MA Experiment 20000349 PARAMETER Experiment Name: At_100uM_ABA_Sub_P Parameter: Tissue Value: Aerial
  misc_feature: MA Experiment 20000349 PARAMETER Experiment Name: At_100uM_ABA_Sub_P Parameter: Treatment Value: 100uM ABA vs. No Treatment
atgggattccgtgggaagtacttcttcccaattctcatgactctatcgttatttctaataatcagatacaactacatagtctccgatgatcctcctctccggcaagaactccccggtcgccgatcagcttcttccggagatgacatcacatataccgtcaagactccgtcaaagaagacaaagagactgtttcacacggcggtgacagccacggattccgtgtacagcacgtggcagtgtcgggtcatgtattattggtacaacaggttcagggacgaacccgggtcggatatgggcgggtatacccggatcttgcattcgggtcgacccgatggactcatggatgagatccctactttcgttgctgaccctcttccctccggtgttgacaagggatatgttgttctaaataggccttgggcctttgttcaatggcttcaacaagcacatatagaggaagattacattctcatggcggaacctgatcatatcatagttaaaccgataccaaacctagctagaggcaatctcgcggctgcgtttccctttttctacattgaaccaaagaaatatgaatcggttctccgcaaattcttccccaaagagaatggaccaatatcaagaatcgatcccatcgggaattctccagtgatcgtcactaagaatgcattaatgaaaattgctccaacatggatgaatgtttctttggctatgaagaatgacccacaaacagataaagcttttggttgggtccttgaaatgtatgcatatgctgtttcttctgcgttacacggcgtgagcaacattctacacaaggacttcatgattcagcctccttgggacactgaaacaaagaagacgttcataatacattacacttacggctgtgatttcgacatgaaggggaagatgatggtagggaagattggagaatggagattcgataaacggtcttacggggataaaccacccccaagaaatctcacactgcctccccgaggtgttcccgagagcgtggtgacattggtgacaatgataaacgaagctactgctaatattcccaactgggaatcttga

SEQ ID NO: 70985 - protein, 358 aa, Arabidopsis thaliana
  peptide (1)..(358): Ceres Seq. ID no. 3031897
  misc_feature (189)..(358): Homolog of NCBI NO: 30682704 NR Description: expressed protein [Arabidopsis thaliana]
  misc_feature (1)..(133): Homolog of NCBI NO: 30682704 NR Description: expressed protein [Arabidopsis thaliana]
  misc_feature (189)..(340): Homolog of NCBI NO: 25371351 NR Description: hypothetical protein At2g25260 [imported] - thaliana >gi|4567251|gb|AAD23665.1| unknown protein [Arabidopsis
  misc_feature (1)..(133): Homolog of NCBI NO: 25371351 NR Description: hypothetical protein At2g25260 [imported] - thaliana >gi|4567251|gb|AAD23665.1| unknown protein [Arabidopsis
  misc_feature (1)..(358): Homolog of NCBI NO: 22327055 NR Description: Expressed protein; protein id: At5g25265.1, by cDNA: gi_17065061 [Arabidopsis thaliana]
  misc_feature (2)..(358): Homolog of NCBI NO: 24413996 NR Description: hypothetical protein~similar to Arabidopsis
  misc_feature (57)..(358): Homolog of NCBI NO: 15240642 NR Description: putative protein; protein id: At5g13500.1, by cDNA: 6674., supported by cDNA: gi_19699008 [Arabidopsis >gi|9955542|emb|CAC05427.1| putative protein [Arabidopsis
  misc_feature (61)..(157): Homolog of NCBI NO: 34903224 NR Description: unnamed protein product [Oryza sativa (japonica group)] >gi|6815101|dbj|BAA90387.1| unnamed protein product
  misc_feature (58)..(319): Homolog of NCBI NO: 22330795 NR Description: unknown protein; protein id: At3g01720.1, by cDNA: gi_18175796, supported by cDNA: gi_20465700 [Arabidopsis >gi|18175797|gb|AAL59929.1| unknown protein [Arabidopsis
MGFRGKYFFPILMTLSLFLIIRYNYIVSDDPPLRQELPGRRSASSGDDITYTVKTPSKKTKRLFHTAVTATDSVYSTWQCRVMYYWYNRFRDEPGSDMGGYTRILHSGRPDGLMDEIPTFVADPLPSGVDKGYVVLNRPWAFVQWLQQAHIEEDYILMAEPDHIIVKPIPNLARGNLAAAFPFFYIEPKKYESVLRKFFPKENGPISRIDPIGNSPVIVTKNALMKIAPTWMNVSLAMKNDPQTDKAFGWVLEMYAYAVSSALHGVSNILHKDFMIQPPWDTETKKTFIIHYTYGCDFDMKGKMMVGKIGEWRFDKRSYGDKPPPRNLTLPPRGVPESVVTLVTMINEATANIPNWES

SEQ ID NO: 70986 - protein, 346 aa, Arabidopsis thaliana
  peptide (1)..(346): Ceres Seq. ID no. 3031898
  misc_feature (46)..(307): Homolog of NCBI NO: 22330795 NR Description: unknown protein; protein id: At3g01720.1, by cDNA: gi_18175796, supported by cDNA: gi_20465700 [Arabidopsis >gi|18175797|gb|AAL59929.1| unknown protein [Arabidopsis
  misc_feature (177)..(346): Homolog of NCBI NO: 30682704 NR Description: expressed protein [Arabidopsis thaliana]
  misc_feature (1)..(121): Homolog of NCBI NO: 30682704 NR Description: expressed protein [Arabidopsis thaliana]
  misc_feature (177)..(328): Homolog of NCBI NO: 25371351 NR Description: hypothetical protein At2g25260 [imported] - thaliana >gi|4567251|gb|AAD23665.1| unknown protein [Arabidopsis
  misc_feature (1)..(121): Homolog of NCBI NO: 25371351 NR Description: hypothetical protein At2g25260 [imported] - thaliana >gi|4567251|gb|AAD23665.1| unknown protein [Arabidopsis
  misc_feature (1)..(346): Homolog of NCBI NO: 22327055 NR Description: Expressed protein; protein id: At5g25265.1, by cDNA: gi_17065061 [Arabidopsis thaliana]
  misc_feature (1)..(346): Homolog of NCBI NO: 24413996 NR Description: hypothetical protein~similar to Arabidopsis
  misc_feature (45)..(346): Homolog of NCBI NO: 15240642 NR Description: putative protein; protein id: At5g13500.1, by cDNA: 6674., supported by cDNA: gi_19699008 [Arabidopsis >gi|9955542|emb|CAC05427.1| putative protein [Arabidopsis
  misc_feature (49)..(145): Homolog of NCBI NO: 34903224 NR Description: unnamed protein product [Oryza sativa (japonica group)] >gi|6815101|dbj|BAA90387.1| unnamed protein product
MTLSLFLIIRYNYIVSDDPPLRQELPGRRSASSGDDITYTVKTPSKKTKRLFHTAVTATDSVYSTWQCRVMYYWYNRFRDEPGSDMGGYTRILHSGRPDGLMDEIPTFVADPLPSGVDKGYVVLNRPWAFVQWLQQAHIEEDYILMAEPDHIIVKPIPNLARGNLAAAFPFFYIEPKKYESVLRKFFPKENGPISRIDPIGNSPVIVTKNALMKIAPTWMNVSLAMKNDPQTDKAFGWVLEMYAYAVSSALHGVSNILHKDFMIQPPWDTETKKTFIIHYTYGCDFDMKGKMMVGKIGEWRFDKRSYGDKPPPRNLTLPPRGVPESVVTLVTMINEATANIPNWES

SEQ ID NO: 70987 - protein, 276 aa, Arabidopsis thaliana
  peptide (1)..(276): Ceres Seq. ID no. 3031899
  misc_feature (107)..(276): Homolog of NCBI NO: 30682704 NR Description: expressed protein [Arabidopsis thaliana]
  misc_feature (1)..(51): Homolog of NCBI NO: 30682704 NR Description: expressed protein [Arabidopsis thaliana]
  misc_feature (107)..(258): Homolog of NCBI NO: 25371351 NR Description: hypothetical protein At2g25260 [imported] - thaliana >gi|4567251|gb|AAD23665.1| unknown protein [Arabidopsis
  misc_feature (1)..(51): Homolog of NCBI NO: 25371351 NR Description: hypothetical protein At2g25260 [imported] - thaliana >gi|4567251|gb|AAD23665.1| unknown protein [Arabidopsis
  misc_feature (1)..(276): Homolog of NCBI NO: 22327055 NR Description: Expressed protein; protein id: At5g25265.1, by cDNA: gi_17065061 [Arabidopsis thaliana]
  misc_feature (1)..(276): Homolog of NCBI NO: 24413996 NR Description: hypothetical protein~similar to Arabidopsis
  misc_feature (1)..(276): Homolog of NCBI NO: 15240642 NR Description: putative protein; protein id: At5g13500.1, by cDNA: 6674., supported by cDNA: gi_19699008 [Arabidopsis >gi|9955542|emb|CAC05427.1| putative protein [Arabidopsis
  misc_feature (1)..(75): Homolog of NCBI NO: 34903224 NR Description: unnamed protein product [Oryza sativa (japonica group)] >gi|6815101|dbj|BAA90387.1| unnamed protein product
  misc_feature (1)..(237): Homolog of NCBI NO: 22330795 NR Description: unknown protein; protein id: At3g01720.1, by cDNA: gi_18175796, supported by cDNA: gi_20465700 [Arabidopsis >gi|18175797|gb|AAL59929.1| unknown protein [Arabidopsis
MYYWYNRFRDEPGSDMGGYTRILHSGRPDGLMDEIPTFVADPLPSGVDKGYVVLNRPWAFVQWLQQAHIEEDYILMAEPDHIIVKPIPNLARGNLAAAFPFFYIEPKKYESVLRKFFPKENGPISRIDPIGNSPVIVTKNALMKIAPTWMNVSLAMKNDPQTDKAFGWVLEMYAYAVSSALHGVSNILHKDFMIQPPWDTETKKTFIIHYTYGCDFDMKGKMMVGKIGEWRFDKRSYGDKPPPRNLTLPPRGVPESVVTLVTMINEATANIPNWES

SEQ ID NO: 70988 - DNA, 1689 bp, Arabidopsis thaliana
  misc_feature (1)..(1689): Ceres Seq. ID no. 3031983
  misc_feature: MA Experiment ID: 20000173 Result: Down-regulated in Transcription
  misc_feature: MA Experiment 20000173 PARAMETER Experiment Name: At_42deg_Heat_P Parameter: Age (day) Value: 14
  misc_feature: MA Experiment 20000173 PARAMETER Experiment Name: At_42deg_Heat_P Parameter: Organism Value: A. thaliana
  misc_feature: MA Experiment 20000173 PARAMETER Experiment Name: At_42deg_Heat_P Parameter: Plant Line Value: WS
  misc_feature: MA Experiment 20000173 PARAMETER Experiment Name: At_42deg_Heat_P Parameter: Temperature (deg C) Value: 42 vs. 22
  misc_feature: MA Experiment 20000173 PARAMETER Experiment Name: At_42deg_Heat_P Parameter: Timepoint (hr) Value: 6
  misc_feature: MA Experiment 20000173 PARAMETER Experiment Name: At_42deg_Heat_P Parameter: Tissue Value: Aerial
  misc_feature: MA Experiment ID: 20000184 Result: Down-regulated in Transcription
  misc_feature: MA Experiment 20000184 PARAMETER Experiment Name: At_Shoots__P Parameter: Age (day) Value: 7
  misc_feature: MA Experiment 20000184 PARAMETER Experiment Name: At_Shoots__P Parameter: Tissue Value: Shoots vs. Whole Plant
  misc_feature: MA Experiment ID: 20001451 Result: Down-regulated in Transcription
  misc_feature: MA Experiment 20001451 PARAMETER Experiment Name: At_Far-red-induction_P Parameter: Age (day) Value: 7
  misc_feature: MA Experiment 20001451 PARAMETER Experiment Name: At_Far-red-induction_P Parameter: Light Value: Far-red vs. White
  misc_feature: MA Experiment 20001451 PARAMETER Experiment Name: At_Far-red-induction_P Parameter: Organism Value: A. thaliana
  misc_feature: MA Experiment 20001451 PARAMETER Experiment Name: At_Far-red-induction_P Parameter: Plant Line Value: Columbia
  misc_feature: MA Experiment 20001451 PARAMETER Experiment Name: At_Far-red-induction_P Parameter: Timepoint (hr) Value: 24
  misc_feature: MA Experiment 20001451 PARAMETER Experiment Name: At_Far-red-induction_P Parameter: Tissue Value: Whole Plant
  misc_feature: MA Experiment ID: 20001560 Result: Down-regulated in Transcription
  misc_feature: MA Experiment 20001560 PARAMETER Experiment Name: At_Drought_Soil_Dry_P Parameter: Age (day) Value: 28
  misc_feature: MA Experiment 20001560 PARAMETER Experiment Name: At_Drought_Soil_Dry_P Parameter: Organism Value: A. thaliana
  misc_feature: MA Experiment 20001560 PARAMETER Experiment Name: At_Drought_Soil_Dry_P Parameter: Plant Line Value: WS
  misc_feature: MA Experiment 20001560 PARAMETER Experiment Name: At_Drought_Soil_Dry_P Parameter: Post Timepoint (hr) Value: None
  misc_feature: MA Experiment 20001560 PARAMETER Experiment Name: At_Drought_Soil_Dry_P Parameter: Post-Treatment Value: None
  misc_feature: MA Experiment 20001560 PARAMETER Experiment Name: At_Drought_Soil_Dry_P Parameter: Timepoint (day) Value: 14
  misc_feature: MA Experiment 20001560 PARAMETER Experiment Name: At_Drought_Soil_Dry_P Parameter: Treatment Value: Drought vs. No Drought
atggattctgaagaagacatgctcgatgcgcacgatatggagtctggagaggatgatttctacagcggtggaactgatgattgtaatgatagtgatgatggtgaacctgattatgggtttgttgaggaagatgctgatgattctgctatgatcgcctctcatcgctctcagaaaaacttttgtgttctgagggaagaagatattcgcaggcatcagatggataatattgaacgagtttccgttgttctctcgataactgaggttgaagcgagtattctacttcgtcactttcactggagtgtcggtagagttcatgatgagtggtttgctgatgaagagagagttcggaagactgttggcatattggagagtcatgttgttccaccatctgatgacagtgaacttacatgtggaatctgtttcgattcctaccctcctgagaaaatcgcttcagtttcttgtggccatcctttctgcactacatgctggacaggttatatcagcacaaccattaatgatggcccgggatgtttgatgctaagatgtcctgacccatcttgtcttgctgctgttggtcatgatatggttgacaaattagcgtctgaagacgaaaaggagaagtacaacagatattttcttaggtcttatattgaagacaacagaaagatgaagtggtgtcctgccccgggatgtgattttgcgattgattttgttgcagggtctggaaattatgatgtttcctgcttgtgctcgtttagcttttgctggaattgcactgaggaggctcaccgacctgtggattgtagcacagtttcaaaatggatattaaagaacagcgctgaatctgaaaatatgaattggatacttgccaattcaaagccttgtccgagatgtaagaggccaattgaaaagaatcagggctgtatgcacatgacatgtacaccgccttgtaaatatgaattttgttggctatgtcttggtgcatggatggatcacggggaaagaactggtggtttttatgcttgtaaccgttatgaggtggccaagcaagaaggacagtatgatgagacagagaggaggagagagatggccaaaaattcgctagagagatacacacactattatgaacgctgggcaagcaatcaaacgtcgaggcaaaaggctatggctgatctgcagcaagcgcagatgcagaatcttgagaagcttagtgataaacagtgcacaccagagtctcagctcaaattcattttagaagcttggcttcagatcatcgaatgtaggcgagtcttgaaatggacttatgcatatggatactacctacctgagcatgaacatgccaaacgacaatttttcgagtatttgcaaggtgaagctgagtcaggtttagagaggctccatcaatgcgtagagaaagacttggttcagtttctcattgcggaaggtccatcaaaagatttcaatgatttccggacaaaactagctggtttgaccagcgtgacgaaaaactactttgagaatttggtgaaagctctggagaacggtcttgctgatgtagactcacatgcggcttgcagcagcaaatcaacaagctctaaatcaacaggttgcagtagcaaaacaagaggtaaaggcaaaggaagttccagaactggtggatccagcagaaacccagatgacaacttataa

SEQ ID NO: 70989 - protein, 562 aa, Arabidopsis thaliana
  peptide (1)..(562): Ceres Seq. ID no. 3031984
  misc_feature (206)..(268): Pfam Name: IBR domain Pfam Description: IBR domain
  misc_feature (288)..(562): Homolog of NCBI NO: 30684981 NR Description: RING zinc finger protein -related [Arabidopsis
  misc_feature (1)..(231): Homolog of NCBI NO: 30684981 NR Description: RING zinc finger protein -related [Arabidopsis
  misc_feature (288)..(542): Homolog of NCBI NO: 25408165 NR Description: probable RING zinc finger protein [imported] - thaliana >gi|4582446|gb|AAD24830.1| putative RING zinc finger
  misc_feature (1)..(231): Homolog of NCBI NO: 25408165 NR Description: probable RING zinc finger protein [imported] - thaliana >gi|4582446|gb|AAD24830.1| putative RING zinc finger
  misc_feature (1)..(561): Homolog of NCBI NO: 30679494 NR Description: expressed protein [Arabidopsis thaliana] unknown protein [Arabidopsis thaliana]
  misc_feature (1)..(561): Homolog of NCBI NO: 29125025 NR Description: ARIADNE-like protein ARI5 [Arabidopsis thaliana]
  misc_feature (1)..(561): Homolog of NCBI NO: 38346221 NR Description: OJ990528_30.1 [Oryza sativa (japonica
  misc_feature (1)..(292): Homolog of NCBI NO: 25406877 NR Description: hypothetical protein [imported] - Arabidopsis
  misc_feature (323)..(561): Homolog of NCBI NO: 25406877 NR Description: hypothetical protein [imported] - Arabidopsis
  misc_feature (13)..(555): Homolog of NCBI NO: 22330435 NR Description: unknown protein; protein id: At1g65430.1, by cDNA: gi_17065463 [Arabidopsis thaliana]
MDSEEDMLDAHDMESGEDDFYSGGTDDCNDSDDGEPDYGFVEEDADDSAMIASHRSQKNFCVLREEDIRRHQMDNIERVSVVLSITEVEASILLRHFHWSVGRVHDEWFADEERVRKTVGILESHVVPPSDDSELTCGICFDSYPPEKIASVSCGHPFCTTCWTGYISTTINDGPGCLMLRCPDPSCLAAVGHDMVDKLASEDEKEKYNRYFLRSYIEDNRKMKWCPAPGCDFAIDFVAGSGNYDVSCLCSFSFCWNCTEEAHRPVDCSTVSKWILKNSAESENMNWILANSKPCPRCKRPIEKNQGCMHMTCTPPCKYEFCWLCLGAWMDHGERTGGFYACNRYEVAKQEGQYDETERRREMAKNSLERYTHYYERWASNQTSRQKAMADLQQAQMQNLEKLSDKQCTPESQLKFILEAWLQIIECRRVLKWTYAYGYYLPEHEHAKRQFFEYLQGEAESGLERLHQCVEKDLVQFLIAEGPSKDFNDFRTKLAGLTSVTKNYFENLVKALENGLADVDSHAACSSKSTSSKSTGCSSKTRGKGKGSSRTGGSSRNPDDNL

SEQ ID NO: 70990 - protein, 556 aa, Arabidopsis thaliana
  peptide (1)..(556): Ceres Seq. ID no. 3031985
  misc_feature (200)..(262): Pfam Name: IBR domain Pfam Description: IBR domain
  misc_feature (282)..(556): Homolog of NCBI NO: 30684981 NR Description: RING zinc finger protein -related [Arabidopsis
  misc_feature (1)..(225): Homolog of NCBI NO: 30684981 NR Description: RING zinc finger protein -related [Arabidopsis
  misc_feature (282)..(536): Homolog of NCBI NO: 25408165 NR Description: probable RING zinc finger protein [imported] - thaliana >gi|4582446|gb|AAD24830.1| putative RING zinc finger
  misc_feature (1)..(225): Homolog of NCBI NO: 25408165 NR Description: probable RING zinc finger protein [imported] - thaliana >gi|4582446|gb|AAD24830.1| putative RING zinc finger
  misc_feature (1)..(555): Homolog of NCBI NO: 30679494 NR Description: expressed protein [Arabidopsis thaliana] unknown protein [Arabidopsis thaliana]
  misc_feature (1)..(555): Homolog of NCBI NO: 29125025 NR Description: ARIADNE-like protein ARI5 [Arabidopsis thaliana]
  misc_feature (1)..(555): Homolog of NCBI NO: 38346221 NR Description: OJ990528_30.1 [Oryza sativa (japonica
  misc_feature (1)..(286): Homolog of NCBI NO: 25406877 NR Description: hypothetical protein [imported] - Arabidopsis
  misc_feature (317)..(555): Homolog of NCBI NO: 25406877 NR Description: hypothetical protein [imported] - Arabidopsis
  misc_feature (7)..(549): Homolog of NCBI NO: 22330435 NR Description: unknown protein; protein id: At1g65430.1, by cDNA: gi_17065463 [Arabidopsis thaliana]
MLDAHDMESGEDDFYSGGTDDCNDSDDGEPDYGFVEEDADDSAMIASHRSQKNFCVLREEDIRRHQMDNIERVSVVLSITEVEASILLRHFHWSVGRVHDEWFADEERVRKTVGILESHVVPPSDDSELTCGICFDSYPPEKIASVSCGHPFCTTCWTGYISTTINDGPGCLMLRCPDPSCLAAVGHDMVDKLASEDEKEKYNRYFLRSYIEDNRKMKWCPAPGCDFAIDFVAGSGNYDVSCLCSFSFCWNCTEEAHRPVDCSTVSKWILKNSAESENMNWILANSKPCPRCKRPIEKNQGCMHMTCTPPCKYEFCWLCLGAWMDHGERTGGFYACNRYEVAKQEGQYDETERRREMAKNSLERYTHYYERWASNQTSRQKAMADLQQAQMQNLEKLSDKQCTPESQLKFILEAWLQIIECRRVLKWTYAYGYYLPEHEHAKRQFFEYLQGEAESGLERLHQCVEKDLVQFLIAEGPSKDFNDFRTKLAGLTSVTKNYFENLVKALENGLADVDSHAACSSKSTSSKSTGCSSKTRGKGKGSSRTGGSSRNPDDNL

SEQ ID NO: 70991 - protein, 550 aa, Arabidopsis thaliana
  peptide (1)..(550): Ceres Seq. ID no. 3031986
  misc_feature (194)..(256): Pfam Name: IBR domain Pfam Description: IBR domain
  misc_feature (276)..(550): Homolog of NCBI NO: 30684981 NR Description: RING zinc finger protein -related [Arabidopsis
  misc_feature (1)..(219): Homolog of NCBI NO: 30684981 NR Description: RING zinc finger protein -related [Arabidopsis
  misc_feature (276)..(530): Homolog of NCBI NO: 25408165 NR Description: probable RING zinc finger protein [imported] - thaliana >gi|4582446|gb|AAD24830.1| putative RING zinc finger
  misc_feature (1)..(219): Homolog of NCBI NO: 25408165 NR Description: probable RING zinc finger protein [imported] - thaliana >gi|4582446|gb|AAD24830.1| putative RING zinc finger
  misc_feature (1)..(549): Homolog of NCBI NO: 30679494 NR Description: expressed protein [Arabidopsis thaliana] unknown protein [Arabidopsis thaliana]
  misc_feature (1)..(549): Homolog of NCBI NO: 29125025 NR Description: ARIADNE-like protein ARI5 [Arabidopsis thaliana]
  misc_feature (1)..(549): Homolog of NCBI NO: 38346221 NR Description: OJ990528_30.1 [Oryza sativa (japonica
  misc_feature (1)..(280): Homolog of NCBI NO: 25406877 NR Description: hypothetical protein [imported] - Arabidopsis
  misc_feature (311)..(549): Homolog of NCBI NO: 25406877 NR Description: hypothetical protein [imported] - Arabidopsis
  misc_feature (1)..(543): Homolog of NCBI NO: 22330435 NR Description: unknown protein; protein id: At1g65430.1, by cDNA: gi_17065463 [Arabidopsis thaliana]
MESGEDDFYSGGTDDCNDSDDGEPDYGFVEEDADDSAMIASHRSQKNFCVLREEDIRRHQMDNIERVSVVLSITEVEASILLRHFHWSVGRVHDEWFADEERVRKTVGILESHVVPPSDDSELTCGICFDSYPPEKIASVSCGHPFCTTCWTGYISTTINDGPGCLMLRCPDPSCLAAVGHDMVDKLASEDEKEKYNRYFLRSYIEDNRKMKWCPAPGCDFAIDFVAGSGNYDVSCLCSFSFCWNCTEEAHRPVDCSTVSKWILKNSAESENMNWILANSKPCPRCKRPIEKNQGCMHMTCTPPCKYEFCWLCLGAWMDHGERTGGFYACNRYEVAKQEGQYDETERRREMAKNSLERYTHYYERWASNQTSRQKAMADLQQAQMQNLEKLSDKQCTPESQLKFILEAWLQIIECRRVLKWTYAYGYYLPEHEHAKRQFFEYLQGEAESGLERLHQCVEKDLVQFLIAEGPSKDFNDFRTKLAGLTSVTKNYFENLVKALENGLADVDSHAACSSKSTSSKSTGCSSKTRGKGKGSSRTGGSSRNPDDNL

SEQ ID NO: 70992 - DNA, 2352 bp, Arabidopsis thaliana
  misc_feature (1)..(2352): Ceres Seq. ID no. 3031991
  misc_feature: MA Experiment ID: 20000315 Result: Down-regulated in Transcription
  misc_feature: MA Experiment 20000315 PARAMETER Experiment Name: At_14day_Shoots-Roots_Sub_P Parameter: Age (day) Value: 14
  misc_feature: MA Experiment 20000315 PARAMETER Experiment Name: At_14day_Shoots-Roots_Sub_P Parameter: Organism Value: A. thaliana
  misc_feature: MA Experiment 20000315 PARAMETER Experiment Name: At_14day_Shoots-Roots_Sub_P Parameter: Plant Line Value: WS
  misc_feature: MA Experiment 20000315 PARAMETER Experiment Name: At_14day_Shoots-Roots_Sub_P Parameter: Tissue Value: Shoots vs. Whole Plant
  misc_feature: MA Experiment ID: 20000328 Result: Down-regulated in Transcription
  misc_feature: MA Experiment 20000328 PARAMETER Experiment Name: At_42deg_Heat_Sub_P Parameter: Age (day) Value: 14
  misc_feature: MA Experiment 20000328 PARAMETER Experiment Name: At_42deg_Heat_Sub_P Parameter: Organism Value: A. thaliana
  misc_feature: MA Experiment 20000328 PARAMETER Experiment Name: At_42deg_Heat_Sub_P Parameter: Plant Line Value: WS
  misc_feature: MA Experiment 20000328 PARAMETER Experiment Name: At_42deg_Heat_Sub_P Parameter: Temperature (deg C) Value: 42 vs. 22
  misc_feature: MA Experiment 20000328 PARAMETER Experiment Name: At_42deg_Heat_Sub_P Parameter: Timepoint (hr) Value: 6
  misc_feature: MA Experiment 20000328 PARAMETER Experiment Name: At_42deg_Heat_Sub_P Parameter: Tissue Value: Aerial
  misc_feature: MA Experiment ID: 20000347 Result: Up-regulated in Transcription
  misc_feature: MA Experiment 20000347 PARAMETER Experiment Name: At_2mM_SA_Sub_P Parameter: Age (day) Value: 14
  misc_feature: MA Experiment 20000347 PARAMETER Experiment Name: At_2mM_SA_Sub_P Parameter: Organism Value: A. thaliana
  misc_feature: MA Experiment 20000347 PARAMETER Experiment Name: At_2mM_SA_Sub_P Parameter: Plant Line Value: WS
  misc_feature: MA Experiment 20000347 PARAMETER Experiment Name: At_2mM_SA_Sub_P Parameter: Timepoint (hr) Value: 6
  misc_feature: MA Experiment 20000347 PARAMETER Experiment Name: At_2mM_SA_Sub_P Parameter: Tissue Value: Aerial
  misc_feature: MA Experiment 20000347 PARAMETER Experiment Name: At_2mM_SA_Sub_P Parameter: Treatment Value: 2mM SA vs. No Treatment
atgggagctaagtgttgcagaggtcaccgaggatcagtggtggaatcaaatggttccgtgatcttgtcgttagctgacctagaggtccaagctactgaccttagggagatgactgtggtagaggcaagagatgctgctggaccatcagaaccaagacctccaagtcctaccttgaggccttcagaagttgaggagacatccgagcctgtatgtcagggatcactagtagaaacctctaatactgatgatgctggaccatcagaaccaaatccaccaagtcctaccttgaggccttcagaagttgagaagatatacgtgcctgtatgtcagggatcactagcagaaacctctaatcttgatcaagatggggtgtcaagttatgaagcatcgaatattttttggagtactgggtccttatcagacccgatcccaagtggtttttacactgtgatcccggttgagagattgatgcattttaaaagcattcctacattggaagaaattaatgcgctgggggaagatcgtcttaaggctgatgcgatttttgtagatcttaagaacgatatacagcttgttttgataaaggagtttgtcatcaaacttgtcacaggattggactccgataaagttattaagaaaattgctggactggtggcaaatatatataaaagaaaaactctgcagagtccggcaagaacgctgcaatattttgacgttcaagggtttaccctgctaggacaaatcaagcatggttcttgtcgtgcacgagcaatcctctttaaagttctagctgatgctgttggtcttgacagtaagcttgtaatgggtttccctactgatctgagattttctgctagcatcgactcatataatcatatctctgctgtggttgagctcaataatgttgaaatgctagtcgaccttaagcgatgtcctggtcagcttaaacccttctcacccaaggcagtttatatggctcatatctcaatggcatggcagcctgattttgtagacaataacccttgtgcttcaccattggagccaaacagtcccatggaacggtctggtccaccatctgcattacaatccgggcaagcaaaagcgttatgcacgtataaaagtaacttttgttgtttcctcagtcgttcactaggcgagccaaacatagctactgaagttttgcggagaaaggtcatcaaggaaccgccacctgctgatttcagtggtaactcaggagcagcggaatcggaaagtaagagaacaaatggaagggcaacaatgatgcagagtgacctcttgaaagagcgaggtgttgatgattcatctccttactctccagatgaaaagaatgtctctggtttccagcttgattcccatgacctagtgtctggtgaatgttcgacagtatatccgcggaagtcaatatcattgccgtcatctccgcgaagctatcaaattcaattatctgaaagaagtgaacattcacctcaagaaataagccacatttggaatgaagtgctggagtctccaatgttccagaataaacctttgttaccatttgaagaatggaacatagatttctccaagttgaaagttggggcttctgttgggagtggaacttctggagtagtatgtcgtggcgtctggaataaaactgaagttgcgatcaagatatttcttggacaacagcttacagctgagaacatgaaagttttctgcaatgagatatctattcttagccgtcttcaacatcccaatgttattctgctccttggagcatgcacaaagcctcctcagttatcactggtcacagagtatatgagtacggggtccttgtatgatgtgatccgtaccagaaaaaaggagttgagctggcaaaggaaactaaagattctggctgaaatttgcaggggtttgatgtacatacacaagatggggatagtccaccgtgatctaaccagtgcgaactgcctgttaaacaagtcgatagtcaagatctgtgattttgggctctcgagaaggatgacaggtacggcagtgaaagatactgaagctgcaggaactcctgagtggatggctcctgaacttatccgcaatgaacccgtcacagaaaaaagcgacatctttagctttggtgttataatgtgggaacttagcactctatccaagccctggaaaggagtcccaaaagaaaaagtcattcatatcgttgcaaacgaaggagcccggctcaaaatacctgaaggaccactacagaagcttattgcagattgttggtcggaaccagagcaaaggccgagctgtaaagagatactgcaccgtcttaagacctgcgagattccgatttgctga

SEQ ID NO: 70993 - protein, 783 aa, Arabidopsis thaliana
  peptide (1)..(783): Ceres Seq. ID no. 3031992
  misc_feature (530)..(775): Pfam Name: Protein kinase domain Pfam Description: Protein kinase domain
  misc_feature (382)..(783): Homolog of NCBI NO: 18411001 NR Description: putative protein; protein id: At3g58640.1, by cDNA: gi_15146175 [Arabidopsis thaliana] AT3g58640/F14P22_230 [Arabidopsis thaliana]
  misc_feature (82)..(443): Homolog of NCBI NO: 18411001 NR Description: putative protein; protein id: At3g58640.1, by cDNA: gi_15146175 [Arabidopsis thaliana] AT3g58640/F14P22_230 [Arabidopsis thaliana]
  misc_feature (382)..(783): Homolog of NCBI NO: 22655056 NR Description: unknown protein [Arabidopsis thaliana]
  misc_feature (82)..(443): Homolog of NCBI NO: 22655056 NR Description: unknown protein [Arabidopsis thaliana]
  misc_feature (382)..(783): Homolog of NCBI NO: 11346387 NR Description: hypothetical protein F14P22.230 - Arabidopsis >gi|6735381|emb|CAB68202.1| putative protein [Arabidopsis
  misc_feature (82)..(443): Homolog of NCBI NO: 11346387 NR Description: hypothetical protein F14P22.230 - Arabidopsis >gi|6735381|emb|CAB68202.1| putative protein [Arabidopsis
  misc_feature (427)..(783): Homolog of NCBI NO: 15227972 NR Description: putative protein kinase; protein id: At2g42630.1
  misc_feature (218)..(410): Homolog of NCBI NO: 15227973 NR Description: hypothetical protein; protein id: At2g42640.1
  misc_feature (37)..(218): Homolog of NCBI NO: 15227973 NR Description: hypothetical protein; protein id: At2g42640.1
  misc_feature (41)..(84): Homolog of NCBI NO: 18411001 NR Description: putative protein; protein id: At3g58640.1, by cDNA: gi_15146175 [Arabidopsis thaliana] AT3g58640/F14P22_230 [Arabidopsis thaliana]
MGAKCCRGHRGSVVESNGSVILSLADLEVQATDLREMTVVEARDAAGPSEPRPPSPTLRPSEVEETSEPVCQGSLVETSNTDDAGPSEPNPPSPTLRPSEVEKIYVPVCQGSLAETSNLDQDGVSSYEASNIFWSTGSLSDPIPSGFYTVIPVERLMHFKSIPTLEEINALGEDRLKADAIFVDLKNDIQLVLIKEFVIKLVTGLDSDKVIKKIAGLVANIYKRKTLQSPARTLQYFDVQGFTLLGQIKHGSCRARAILFKVLADAVGLDSKLVMGFPTDLRFSASIDSYNHISAVVELNNVEMLVDLKRCPGQLKPFSPKAVYMAHISMAWQPDFVDNNPCASPLEPNSPMERSGPPSALQSGQAKALCTYKSNFCCFLSRSLGEPNIATEVLRRKVIKEPPPADFSGNSGAAESESKRTNGRATMMQSDLLKERGVDDSSPYSPDEKNVSGFQLDSHDLVSGECSTVYPRKSISLPSSPRSYQIQLSERSEHSPQEISHIWNEVLESPMFQNKPLLPFEEWNIDFSKLKVGASVGSGTSGVVCRGVWNKTEVAIKIFLGQQLTAENMKVFCNEISILSRLQHPNVILLLGACTKPPQLSLVTEYMSTGSLYDVIRTRKKELSWQRKLKILAEICRGLMYIHKMGIVHRDLTSANCLLNKSIVKICDFGLSRRMTGTAVKDTEAAGTPEWMAPELIRNEPVTEKSDIFSFGVIMWELSTLSKPWKGVPKEKVIHIVANEGARLKIPEGPLQKLIADCWSEPEQRPSCKEILHRLKTCEIPIC

SEQ ID NO: 70994 - protein, 747 aa, Arabidopsis thaliana
  peptide (1)..(747): Ceres Seq. ID no. 3031993
  misc_feature (494)..(739): Pfam Name: Protein kinase domain Pfam Description: Protein kinase domain
  misc_feature (346)..(747): Homolog of NCBI NO: 18411001 NR Description: putative protein; protein id: At3g58640.1, by cDNA: gi_15146175 [Arabidopsis thaliana] AT3g58640/F14P22_230 [Arabidopsis thaliana]
  misc_feature (46)..(407): Homolog of NCBI NO: 18411001 NR Description: putative protein; protein id: At3g58640.1, by cDNA: gi_15146175 [Arabidopsis thaliana] AT3g58640/F14P22_230 [Arabidopsis thaliana]
  misc_feature (346)..(747): Homolog of NCBI NO: 22655056 NR Description: unknown protein [Arabidopsis thaliana]
  misc_feature (46)..(407): Homolog of NCBI NO: 22655056 NR Description: unknown protein [Arabidopsis thaliana]
  misc_feature (346)..(747): Homolog of NCBI NO: 11346387 NR Description: hypothetical protein F14P22.230 - Arabidopsis >gi|6735381|emb|CAB68202.1| putative protein [Arabidopsis
  misc_feature (46)..(407): Homolog of NCBI NO: 11346387 NR Description: hypothetical protein F14P22.230 - Arabidopsis >gi|6735381|emb|CAB68202.1| putative protein [Arabidopsis
  misc_feature (391)..(747): Homolog of NCBI NO: 15227972 NR Description: putative protein kinase; protein id: At2g42630.1
  misc_feature (182)..(374): Homolog of NCBI NO: 15227973 NR Description: hypothetical protein; protein id: At2g42640.1
  misc_feature (1)..(182): Homolog of NCBI NO: 15227973 NR Description: hypothetical protein; protein id: At2g42640.1
  misc_feature (5)..(48): Homolog of NCBI NO: 18411001 NR Description: putative protein; protein id: At3g58640.1, by cDNA: gi_15146175 [Arabidopsis thaliana] AT3g58640/F14P22_230 [Arabidopsis thaliana]
MTVVEARDAAGPSEPRPPSPTLRPSEVEETSEPVCQGSLVETSNTDDAGPSEPNPPSPTLRPSEVEKIYVPVCQGSLAETSNLDQDGVSSYEASNIFWSTGSLSDPIPSGFYTVIPVERLMHFKSIPTLEEINALGEDRLKADAIFVDLKNDIQLVLIKEFVIKLVTGLDSDKVIKKIAGLVANIYKRKTLQSPARTLQYFDVQGFTLLGQIKHGSCRARAILFKVLADAVGLDSKLVMGFPTDLRFSASIDSYNHISAVVELNNVEMLVDLKRCPGQLKPFSPKAVYMAHISMAWQPDFVDNNPCASPLEPNSPMERSGPPSALQSGQAKALCTYKSNFCCFLSRSLGEPNIATEVLRRKVIKEPPPADFSGNSGAAESESKRTNGRATMMQSDLLKERGVDDSSPYSPDEKNVSGFQLDSHDLVSGECSTVYPRKSISLPSSPRSYQIQLSERSEHSPQEISHIWNEVLESPMFQNKPLLPFEEWNIDFSKLKVGASVGSGTSGVVCRGVWNKTEVAIKIFLGQQLTAENMKVFCNEISILSRLQHPNVILLLGACTKPPQLSLVTEYMSTGSLYDVIRTRKKELSWQRKLKILAEICRGLMYIHKMGIVHRDLTSANCLLNKSIVKICDFGLSRRMTGTAVKDTEAAGTPEWMAPELIRNEPVTEKSDIFSFGVIMWELSTLSKPWKGVPKEKVIHIVANEGARLKIPEGPLQKLIADCWSEPEQRPSCKEILHRLKTCEIPIC

SEQ ID NO: 70995 - protein, 627 aa, Arabidopsis thaliana
  peptide (1)..(627): Ceres Seq. ID no. 3031994
  misc_feature (374)..(619): Pfam Name: Protein kinase domain Pfam Description: Protein kinase domain
  misc_feature (226)..(627): Homolog of NCBI NO: 18411001 NR Description: putative protein; protein id: At3g58640.1, by cDNA: gi_15146175 [Arabidopsis thaliana] AT3g58640/F14P22_230 [Arabidopsis thaliana]
  misc_feature (1)..(287): Homolog of NCBI NO: 18411001 NR Description: putative protein; protein id: At3g58640.1, by cDNA: gi_15146175 [Arabidopsis thaliana] AT3g58640/F14P22_230 [Arabidopsis thaliana]
  misc_feature (226)..(627): Homolog of NCBI NO: 22655056 NR Description: unknown protein [Arabidopsis thaliana]
  misc_feature (1)..(287): Homolog of NCBI NO: 22655056 NR Description: unknown protein [Arabidopsis thaliana]
  misc_feature (226)..(627): Homolog of NCBI NO: 11346387 NR Description: hypothetical protein F14P22.230 - Arabidopsis >gi|6735381|emb|CAB68202.1| putative protein [Arabidopsis
  misc_feature (1)..(287): Homolog of NCBI NO: 11346387 NR Description: hypothetical protein F14P22.230 - Arabidopsis >gi|6735381|emb|CAB68202.1| putative protein [Arabidopsis
  misc_feature (271)..(627): Homolog of NCBI NO: 15227972 NR Description: putative protein kinase; protein id: At2g42630.1
  misc_feature (62)..(254): Homolog of NCBI NO: 15227973 NR Description: hypothetical protein; protein id: At2g42640.1
  misc_feature (1)..(62): Homolog of NCBI NO: 15227973 NR Description: hypothetical protein; protein id: At2g42640.1
  misc_feature (1)..(196): Homolog of NCBI NO: 34911062 NR Description: P0485G01.18 [Oryza sativa (japonica
MHFKSIPTLEEINALGEDRLKADAIFVDLKNDIQLVLIKEFVIKLVTGLDSDKVIKKIAGLVANIYKRKTLQSPARTLQYFDVQGFTLLGQIKHGSCRARAILFKVLADAVGLDSKLVMGFPTDLRFSASIDSYNHISAVVELNNVEMLVDLKRCPGQLKPFSPKAVYMAHISMAWQPDFVDNNPCASPLEPNSPMERSGPPSALQSGQAKALCTYKSNFCCFLSRSLGEPNIATEVLRRKVIKEPPPADFSGNSGAAESESKRTNGRATMMQSDLLKERGVDDSSPYSPDEKNVSGFQLDSHDLVSGECSTVYPRKSISLPSSPRSYQIQLSERSEHSPQEISHIWNEVLESPMFQNKPLLPFEEWNIDFSKLKVGASVGSGTSGVVCRGVWNKTEVAIKIFLGQQLTAENMKVFCNEISILSRLQHPNVILLLGACTKPPQLSLVTEYMSTGSLYDVIRTRKKELSWQRKLKILAEICRGLMYIHKMGIVHRDLTSANCLLNKSIVKICDFGLSRRMTGTAVKDTEAAGTPEWMAPELIRNEPVTEKSDIFSFGVIMWELSTLSKPWKGVPKEKVIHIVANEGARLKIPEGPLQKLIADCWSEPEQRPSCKEILHRLKTCEIPIC

SEQ ID NO: 70996 - DNA, 558 bp, Arabidopsis thaliana
  misc_feature (1)..(558): Ceres Seq. ID no. 3032488
  misc_feature: MA Experiment ID: 20000355 Result: Up-regulated in Transcription
  misc_feature: MA Experiment 20000355 PARAMETER Experiment Name: At_Siliques_Sub_P Parameter: Age (day) Value: 21
  misc_feature: MA Experiment 20000355 PARAMETER Experiment Name: At_Siliques_Sub_P Parameter: Organism Value: A. thaliana
  misc_feature: MA Experiment 20000355 PARAMETER Experiment Name: At_Siliques_Sub_P Parameter: Plant Line Value: WS
  misc_feature: MA Experiment 20000355 PARAMETER Experiment Name: At_Siliques_Sub_P Parameter: Tissue Value: Less Than 5mm Siliques vs. Whole Plant
atgctacaaccttcagtgtcgtggttcatacaaacaagtaacaccattattcttggaggcaccattactcctgtctctacattcgagggtaaacaatttgagatcactgtatcagtatggaaagatcaagagtccgaaaactggtggctgagtttgggatccaaccattcattggttggatattggccaggtacaattttcccaaatttagcttatgcagacgacgtgcaatggggtggtgaggtcgtgaattcacaaagtcttggccgacacacaacaacacaaatgggatctggtcgcttctccgacggaggcttcagaaaagttagctactttcacaatttggagattgtcgataacaacagattcaagtccgttcgtgatgtaggagtactagtagacgaccctaagttctacaacatcagagcgatgtttagagatgattggggtagttacattttgtatggagggccagaccatatgcattcaggagtctcttttctagcattgagttcgcttattttttactttagtttcatcattttcattattatttag

SEQ ID NO: 70997 - protein, 185 aa, Arabidopsis thaliana
  peptide (1)..(185): Ceres Seq. ID no. 3032489
  misc_feature (7)..(121): Pfam Name: Arabidopsis proteins of unknown function Pfam Description: Arabidopsis proteins of unknown function
  misc_feature (7)..(158): Homolog of NCBI NO: 15238835 NR Description: putative protein; protein id: At5g18460.1, by cDNA: 119256. [Arabidopsis thaliana]
  misc_feature (7)..(158): Homolog of NCBI NO: 15240622 NR Description: putative protein; protein id: At5g50150.1, by cDNA: gi_15529144, supported by cDNA: gi_17386117 [Arabidopsis >gi|15529145|gb|AAK97667.1| AT5g50150/MPF21_17 [Arabidopsis
  misc_feature (7)..(158): Homolog of NCBI NO: 6573746 NR Description: F20B24.18 [Arabidopsis thaliana]
  misc_feature (7)..(158): Homolog of NCBI NO: 25345706 NR Description: hypothetical protein [imported] - Arabidopsis >gi|4874273|gb|AAD31338.1|AC007354_11 Similar to gi|3128199
  misc_feature (7)..(158): Homolog of NCBI NO: 15220207 NR Description: putative carboxyl-terminal peptidase; protein id:
  misc_feature (7)..(158): Homolog of NCBI NO: 15222707 NR Description: unknown protein; protein id: At1g55360.1
  misc_feature (7)..(158): Homolog of NCBI NO: 27311623 NR Description: unknown protein [Arabidopsis thaliana]
  misc_feature (7)..(158): Homolog of NCBI NO: 18406483 NR Description: expressed protein; protein id: At2g44210.1, by cDNA: 39057., supported by cDNA: gi_15081718 [Arabidopsis
  misc_feature (7)..(158): Homolog of NCBI NO: 21389708 NR Description: putative carboxyl-terminal proteinase [Gossypium
  misc_feature (7)..(158): Homolog of NCBI NO: 7486433 NR Description: hypothetical protein At2g44220 [imported] - thaliana >gi|3128169|gb|AAC16073.1| hypothetical protein
MLQPSVSWFIQTSNTIILGGTITPVSTFEGKQFEITVSVWKDQESENWWLSLGSNHSLVGYWPGTIFPNLAYADDVQWGGEVVNSQSLGRHTTTQMGSGRFSDGGFRKVSYFHNLEIVDNNRFKSVRDVGVLVDDPKFYNIRAMFRDDWGSYILYGGPDHMHSGVSFLALSSLIFYFSFIIFIII

SEQ ID NO: 70998 - DNA, 1050 bp, Arabidopsis thaliana
  misc_feature (1)..(1050): Ceres Seq. ID no. 3032595
  misc_feature: MA Experiment ID: 20000307 Result: Up-regulated in Transcription
  misc_feature: MA Experiment 20000307 PARAMETER Experiment Name: At_Germinating_Seeds_Sub_P Parameter: Age (hr) Value: 24 vs. 0
  misc_feature: MA Experiment 20000307 PARAMETER Experiment Name: At_Germinating_Seeds_Sub_P Parameter: Organism Value: A. thaliana
  misc_feature: MA Experiment 20000307 PARAMETER Experiment Name: At_Germinating_Seeds_Sub_P Parameter: Plant Line Value: WS
  misc_feature: MA Experiment 20000307 PARAMETER Experiment Name: At_Germinating_Seeds_Sub_P Parameter: Tissue Value: Germinating Seeds
  misc_feature: MA Experiment ID: 20000315 Result: Down-regulated in Transcription
  misc_feature: MA Experiment 20000315 PARAMETER Experiment Name: At_14day_Shoots-Roots_Sub_P Parameter: Age (day) Value: 14
  misc_feature: MA Experiment 20000315 PARAMETER Experiment Name: At_14day_Shoots-Roots_Sub_P Parameter: Organism Value: A. thaliana
  misc_feature: MA Experiment 20000315 PARAMETER Experiment Name: At_14day_Shoots-Roots_Sub_P Parameter: Plant Line Value: WS
  misc_feature: MA Experiment 20000315 PARAMETER Experiment Name: At_14day_Shoots-Roots_Sub_P Parameter: Tissue Value: Shoots vs. Whole Plant
  misc_feature: MA Experiment ID: 20000328 Result: Down-regulated in Transcription
  misc_feature: MA Experiment 20000328 PARAMETER Experiment Name: At_42deg_Heat_Sub_P Parameter: Age (day) Value: 14
  misc_feature: MA Experiment 20000328 PARAMETER Experiment Name: At_42deg_Heat_Sub_P Parameter: Organism Value: A. thaliana
  misc_feature: MA Experiment 20000328 PARAMETER Experiment Name: At_42deg_Heat_Sub_P Parameter: Plant Line Value: WS
  misc_feature: MA Experiment 20000328 PARAMETER Experiment Name: At_42deg_Heat_Sub_P Parameter: Temperature (deg C) Value: 42 vs. 22
  misc_feature: MA Experiment 20000328 PARAMETER Experiment Name: At_42deg_Heat_Sub_P Parameter: Timepoint (hr) Value: 6
  misc_feature: MA Experiment 20000328 PARAMETER Experiment Name: At_42deg_Heat_Sub_P Parameter: Tissue Value: Aerial
  misc_feature: MA Experiment ID: 20000329 Result: Up-regulated in Transcription
  misc_feature: MA Experiment 20000329 PARAMETER Experiment Name: At_4deg_Cold_Sub_P Parameter: Age (day) Value: 14
  misc_feature: MA Experiment 20000329 PARAMETER Experiment Name: At_4deg_Cold_Sub_P Parameter: Organism Value: A. thaliana
  misc_feature: MA Experiment 20000329 PARAMETER Experiment Name: At_4deg_Cold_Sub_P Parameter: Plant Line Value: WS
  misc_feature: MA Experiment 20000329 PARAMETER Experiment Name: At_4deg_Cold_Sub_P Parameter: Temperature (deg C) Value: 4 vs. 22
  misc_feature: MA Experiment 20000329 PARAMETER Experiment Name: At_4deg_Cold_Sub_P Parameter: Timepoint (hr) Value: 6
  misc_feature: MA Experiment 20000329 PARAMETER Experiment Name: At_4deg_Cold_Sub_P Parameter: Tissue Value: Aerial
  misc_feature: MA Experiment ID: 20000332 Result: Up-regulated in Transcription
  misc_feature: MA Experiment 20000332 PARAMETER Experiment Name: At_4deg_Cold_Sub_P Parameter: Age (day) Value: 14
  misc_feature: MA Experiment 20000332 PARAMETER Experiment Name: At_4deg_Cold_Sub_P Parameter: Organism Value: A. thaliana
  misc_feature: MA Experiment 20000332 PARAMETER Experiment Name: At_4deg_Cold_Sub_P Parameter: Plant Line Value: WS
  misc_feature: MA Experiment 20000332 PARAMETER Experiment Name: At_4deg_Cold_Sub_P Parameter: Temperature (deg C) Value: 4 vs. 22
  misc_feature: MA Experiment 20000332 PARAMETER Experiment Name: At_4deg_Cold_Sub_P Parameter: Timepoint (hr) Value: 2
  misc_feature: MA Experiment 20000332 PARAMETER Experiment Name: At_4deg_Cold_Sub_P Parameter: Tissue Value: Aerial
  misc_feature: MA Experiment ID: 20000352 Result: Up-regulated in Transcription
  misc_feature: MA Experiment 20000352 PARAMETER Experiment Name: At_Drought_Sub_P Parameter: Age (day) Value: 7
  misc_feature: MA Experiment 20000352 PARAMETER Experiment Name: At_Drought_Sub_P Parameter: Organism Value: A. thaliana
  misc_feature: MA Experiment 20000352 PARAMETER Experiment Name: At_Drought_Sub_P Parameter: Plant Line Value: WS
  misc_feature: MA Experiment 20000352 PARAMETER Experiment Name: At_Drought_Sub_P Parameter: Timepoint (hr) Value: 6
  misc_feature: MA Experiment 20000352 PARAMETER Experiment Name: At_Drought_Sub_P Parameter: Tissue Value: Whole Plant
  misc_feature: MA Experiment 20000352 PARAMETER Experiment Name: At_Drought_Sub_P Parameter: Treatment Value: Drought vs. No Drought
  misc_feature: MA Experiment ID: 20000440 Result: Up-regulated in Transcription
  misc_feature: MA Experiment 20000440 PARAMETER Experiment Name: At_Closed-Flower__Sub_P Parameter: Tissue Value: Closed Flower vs. Whole Plant
atggttagattcatcgaagaaaatattactaaaatgttggagacaaaggccatctcaaactcggaggttttatatgtcggaggagacgacggagacacgtcaccaacgacgaaagttcttcatgattttcagatcaacagcggaggaggactgataagatcatgggttgattctatgagagcttgttctcctactcgccctaaatccttcaatagccaatcttgttggattaaggaacatccatctgctttgaacatgttcgaagaaatacttcataaatctgaaggaaaacaaatagttatgtttcttgattatgatggtactctctctcccattgttgatgatcctgatcgagctttcatgtccaagaagatgcgaaatactgtgaggaaacttgcaaagtgttttccaacagccatagttagtgggagatgcagagagaaggtttctagttttgtgaaattaactgagttatactacgctggaagtcatggcatggacatcaaaggaccagagcaaggatctaaatacaagaaagaaaatcagtctcttctttgtcaacccgcaactgaattcctcccggtgataaacgaggtttataaaaaactagtcgagaacactcaatcgattccaggagcgaaagttgagaacaacaaattttgtgcgtctgttcactttcgatgcgtagaagaaaataaatggagtgacttggcccatcaagttcgatcagtcttgaagaattaccccaagctcatgcttacccaaggaagaaaagtattggagattcgtccaatcattaagtgggataaaggcaaagcactcgagtttttgttagaatcactaggatatgataattgtaccgatgtttttcctatatatattggagatgatcgtaccgacgaagacgcctttaagatactgagagacaaaaaacaaggtcttggaattcttgtgtccaaatacgcaaaggagactaatgcttcttattctttgcaagagccagatgagatttcttataaaaaaaagtctcttattttctacgttttatag

SEQ ID NO: 70999 - protein, 349 aa, Arabidopsis thaliana
  peptide (1)..(349): Ceres Seq. ID no. 3032596
  misc_feature (102)..(335): Pfam Name: Trehalose-phosphatase Pfam Description: Trehalose-phosphatase
  misc_feature (1)..(337): Homolog of NCBI NO: 30692524 NR Description: trehalose-6-phosphate phosphatase, putative thaliana] >gi|26452744|dbj|BAC43453.1| putative protein thaliana] >gi|28973301|gb|AAO63975.1| unknown protein
  misc_feature (86)..(337): Homolog of NCBI NO: 15227161 NR Description: putative trehalose-6-phosphate phosphatase;
  misc_feature (10)..(338): Homolog of NCBI NO: 15238360 NR Description: trehalose-6-phosphate phosphatase; protein id:
  misc_feature (38)..(338): Homolog of NCBI NO: 11282598 NR Description: trehalose-6-phosphate phosphatase-like protein -
  misc_feature (38)..(337): Homolog of NCBI NO: 30683008 NR Description: trehalose-6-phosphate phosphatase, putative
  misc_feature (18)..(337): Homolog of NCBI NO: 18399940 NR Description: trehalose-phosphatase, putative; protein id:
  misc_feature (18)..(337): Homolog of NCBI NO: 21554408 NR Description: trehalose-phosphatase, putative [Arabidopsis
  misc_feature (86)..(331): Homolog of NCBI NO: 7487212 NR Description: hypothetical protein T19P19.160 - Arabidopsis >gi|3080446|emb|CAA18763.1| puative protein [Arabidopsis >gi|7270961|emb|CAB80640.1| puative protein [Arabidopsis
  misc_feature (18)..(337): Homolog of NCBI NO: 25354597 NR Description: probable trehalose-phosphatase [imported] -
  misc_feature (52)..(338): Homolog of NCBI NO: 25354595 NR Description: trehalose-phosphatase (EC 3.1.3.12) B [imported] -
MVRFIEENITKMLETKAISNSEVLYVGGDDGDTSPTTKVLHDFQINSGGGLIRSWVDSMRACSPTRPKSFNSQSCWIKEHPSALNMFEEILHKSEGKQIVMFLDYDGTLSPIVDDPDRAFMSKKMRNTVRKLAKCFPTAIVSGRCREKVSSFVKLTELYYAGSHGMDIKGPEQGSKYKKENQSLLCQPATEFLPVINEVYKKLVENTQSIPGAKVENNKFCASVHFRCVEENKWSDLAHQVRSVLKNYPKLMLTQGRKVLEIRPIIKWDKGKALEFLLESLGYDNCTDVFPIYIGDDRTDEDAFKILRDKKQGLGILVSKYAKETNASYSLQEPDEISYKKKSLIFYVL

SEQ ID NO: 71000 - protein, 338 aa, Arabidopsis thaliana
  peptide (1)..(338): Ceres Seq. ID no. 3032597
  misc_feature (91)..(324): Pfam Name: Trehalose-phosphatase Pfam Description: Trehalose-phosphatase
  misc_feature (75)..(320): Homolog of NCBI NO: 7487212 NR Description: hypothetical protein T19P19.160 - Arabidopsis >gi|3080446|emb|CAA18763.1| puative protein [Arabidopsis >gi|7270961|emb|CAB80640.1| puative protein [Arabidopsis
  misc_feature (7)..(326): Homolog of NCBI NO: 25354597 NR Description: probable trehalose-phosphatase [imported] -
  misc_feature (75)..(326): Homolog of NCBI NO: 15227161 NR Description: putative trehalose-6-phosphate phosphatase;
  misc_feature (27)..(327): Homolog of NCBI NO: 11282598 NR Description: trehalose-6-phosphate phosphatase-like protein -
  misc_feature (7)..(326): Homolog of NCBI NO: 18399940 NR Description: trehalose-phosphatase, putative; protein id:
  misc_feature (7)..(326): Homolog of NCBI NO: 21554408 NR Description: trehalose-phosphatase, putative [Arabidopsis
  misc_feature (27)..(326): Homolog of NCBI NO: 30683008 NR Description: trehalose-6-phosphate phosphatase, putative
  misc_feature (1)..(327): Homolog of NCBI NO: 15238360 NR Description: trehalose-6-phosphate phosphatase; protein id:
  misc_feature (1)..(326): Homolog of NCBI NO: 30692524 NR Description: trehalose-6-phosphate phosphatase, putative thaliana] >gi|26452744|dbj|BAC43453.1| putative protein thaliana] >gi|28973301|gb|AAO63975.1| unknown protein
  misc_feature (41)..(327): Homolog of NCBI NO: 25354595 NR Description: trehalose-phosphatase (EC 3.1.3.12) B [imported] -
MLETKAISNSEVLYVGGDDGDTSPTTKVLHDFQINSGGGLIRSWVDSMRACSPTRPKSFNSQSCWIKEHPSALNMFEEILHKSEGKQIVMFLDYDGTLSPIVDDPDRAFMSKKMRNTVRKLAKCFPTAIVSGRCREKVSSFVKLTELYYAGSHGMDIKGPEQGSKYKKENQSLLCQPATEFLPVINEVYKKLVENTQSIPGAKVENNKFCASVHFRCVEENKWSDLAHQVRSVLKNYPKLMLTQGRKVLEIRPIIKWDKGKALEFLLESLGYDNCTDVFPIYIGDDRTDEDAFKILRDKKQGLGILVSKYAKETNASYSLQEPDEISYKKKSLIFYVL

SEQ ID NO: 71001 - protein, 291 aa, Arabidopsis thaliana
  peptide (1)..(291): Ceres Seq. ID no. 3032598
  misc_feature (44)..(277): Pfam Name: Trehalose-phosphatase Pfam Description: Trehalose-phosphatase
  misc_feature (1)..(279): Homolog of NCBI NO: 30692524 NR Description: trehalose-6-phosphate phosphatase, putative thaliana] >gi|26452744|dbj|BAC43453.1| putative protein thaliana] >gi|28973301|gb|AAO63975.1| unknown protein
  misc_feature (28)..(279): Homolog of NCBI NO: 15227161 NR Description: putative trehalose-6-phosphate phosphatase;
  misc_feature (1)..(280): Homolog of NCBI NO: 15238360 NR Description: trehalose-6-phosphate phosphatase; protein id:
  misc_feature (1)..(280): Homolog of NCBI NO: 11282598 NR Description: trehalose-6-phosphate phosphatase-like protein -
  misc_feature (1)..(279): Homolog of NCBI NO: 30683008 NR Description: trehalose-6-phosphate phosphatase, putative
  misc_feature (1)..(279): Homolog of NCBI NO: 18399940 NR Description: trehalose-phosphatase, putative; protein id:
  misc_feature (1)..(279): Homolog of NCBI NO: 21554408 NR Description: trehalose-phosphatase, putative [Arabidopsis
  misc_feature (28)..(273): Homolog of NCBI NO: 7487212 NR Description: hypothetical protein T19P19.160 - Arabidopsis >gi|3080446|emb|CAA18763.1| puative protein [Arabidopsis >gi|7270961|emb|CAB80640.1| puative protein [Arabidopsis
  misc_feature (1)..(279): Homolog of NCBI NO: 25354597 NR Description: probable trehalose-phosphatase [imported] -
  misc_feature (1)..(280): Homolog of NCBI NO: 25354595 NR Description: trehalose-phosphatase (EC 3.1.3.12) B [imported] -
MRACSPTRPKSFNSQSCWIKEHPSALNMFEEILHKSEGKQIVMFLDYDGTLSPIVDDPDRAFMSKKMRNTVRKLAKCFPTAIVSGRCREKVSSFVKLTELYYAGSHGMDIKGPEQGSKYKKENQSLLCQPATEFLPVINEVYKKLVENTQSIPGAKVENNKFCASVHFRCVEENKWSDLAHQVRSVLKNYPKLMLTQGRKVLEIRPIIKWDKGKALEFLLESLGYDNCTDVFPIYIGDDRTDEDAFKILRDKKQGLGILVSKYAKETNASYSLQEPDEISYKKKSLIFYVL

SEQ ID NO: 71002 - DNA, 1356 bp, Arabidopsis thaliana
  misc_feature (1)..(1356): Ceres Seq. ID no. 3034710
  misc_feature: MA Experiment ID: 20000184 Result: Down-regulated in Transcription
  misc_feature: MA Experiment 20000184 PARAMETER Experiment Name: At_Shoots__P Parameter: Age (day) Value: 7
  misc_feature: MA Experiment 20000184 PARAMETER Experiment Name: At_Shoots__P Parameter: Tissue Value: Shoots vs. Whole Plant
  misc_feature: MA Experiment ID: 20000185 Result: Down-regulated in Transcription
  misc_feature: MA Experiment 20000185 PARAMETER Experiment Name: At_Roots__P Parameter: Age (day) Value: 7 vs. 21
  misc_feature: MA Experiment 20000185 PARAMETER Experiment Name: At_Roots__P Parameter: Organism Value: A. thaliana
  misc_feature: MA Experiment 20000185 PARAMETER Experiment Name: At_Roots__P Parameter: Tissue Value: Roots vs. Whole Plant
  misc_feature: MA Experiment ID: 20000234 Result: Down-regulated in Transcription
  misc_feature: MA Experiment 20000234 PARAMETER Experiment Name: At_Siliques_P Parameter: Age (day) Value: 21
  misc_feature: MA Experiment 20000234 PARAMETER Experiment Name: At_Siliques_P Parameter: Organism Value: A. thaliana
  misc_feature: MA Experiment 20000234 PARAMETER Experiment Name: At_Siliques_P Parameter: Plant Line Value: WS
  misc_feature: MA Experiment 20000234 PARAMETER Experiment Name: At_Siliques_P Parameter: Tissue Value: Less Than 5mm Siliques vs. Whole Plant
  misc_feature: MA Experiment ID: 20000235 Result: Down-regulated in Transcription
  misc_feature: MA Experiment 20000235 PARAMETER Experiment Name: At_Siliques_P Parameter: Age (day) Value: 21
  misc_feature: MA Experiment 20000235 PARAMETER Experiment Name: At_Siliques_P Parameter: Organism Value: A. thaliana
  misc_feature: MA Experiment 20000235 PARAMETER Experiment Name: At_Siliques_P Parameter: Plant Line Value: WS
  misc_feature: MA Experiment 20000235 PARAMETER Experiment Name: At_Siliques_P Parameter: Tissue Value: 5-10mm Siliques vs. Whole Plant
  misc_feature: MA Experiment ID: 20000264 Result: Down-regulated in Transcription
  misc_feature: MA Experiment 20000264 PARAMETER Experiment Name: At_Open_Flower_P Parameter: Age (day) Value: 21
  misc_feature: MA Experiment 20000264 PARAMETER Experiment Name: At_Open_Flower_P Parameter: Plant Line Value: WS
  misc_feature: MA Experiment 20000264 PARAMETER Experiment Name: At_Open_Flower_P Parameter: Tissue Value: Open Flower vs. Whole Plant
  misc_feature: MA Experiment ID: 20000286 Result: Down-regulated in Transcription
  misc_feature: MA Experiment 20000286 PARAMETER Experiment Name: At_Open_Flower_P Parameter: Age (day) Value: 21
  misc_feature: MA Experiment 20000286 PARAMETER Experiment Name: At_Open_Flower_P Parameter: Plant Line Value: WS
  misc_feature: MA Experiment 20000286 PARAMETER Experiment Name: At_Open_Flower_P Parameter: Tissue Value: Half Open vs. Whole Plant
  misc_feature: MA Experiment ID: 20000437 Result: Up-regulated in Transcription
  misc_feature: MA Experiment 20000437 PARAMETER Experiment Name: At_Drought_P Parameter: Age (day) Value: 8
  misc_feature: MA Experiment 20000437 PARAMETER Experiment Name: At_Drought_P Parameter: Organism Value: A. thaliana
  misc_feature: MA Experiment 20000437 PARAMETER Experiment Name: At_Drought_P Parameter: Plant Line Value: WS
  misc_feature: MA Experiment 20000437 PARAMETER Experiment Name: At_Drought_P Parameter: Timepoint (hr) Value: 24
  misc_feature: MA Experiment 20000437 PARAMETER Experiment Name: At_Drought_P Parameter: Tissue Value: Whole Plant
  misc_feature: MA Experiment 20000437 PARAMETER Experiment Name: At_Drought_P Parameter: Treatment Value: Drought vs. No Drought
  misc_feature: MA Experiment ID: 20000438 Result: Down-regulated in Transcription
  misc_feature: MA Experiment 20000438 PARAMETER Experiment Name: At_Shoots__P Parameter: Age (day) Value: 14
  misc_feature: MA Experiment 20000438 PARAMETER Experiment Name: At_Shoots__P Parameter: Tissue Value: Shoots vs. Whole Plant
  misc_feature: MA Experiment ID: 20000439 Result: Down-regulated in Transcription
  misc_feature: MA Experiment 20000439 PARAMETER Experiment Name: At_Roots__P Parameter: Age (day) Value: 14 vs. 21
  misc_feature: MA Experiment 20000439 PARAMETER Experiment Name: At_Roots__P Parameter: Organism Value: A. thaliana
  misc_feature: MA Experiment 20000439 PARAMETER Experiment Name: At_Roots__P Parameter: Tissue Value: Roots vs. Whole Plant
  misc_feature: MA Experiment ID: 20000453 Result: Up-regulated in Transcription
  misc_feature: MA Experiment 20000453 PARAMETER Experiment Name: At_100uM_ABA_P Parameter: Age (day) Value: 15
  misc_feature: MA Experiment 20000453 PARAMETER Experiment Name: At_100uM_ABA_P Parameter: Organism Value: A. thaliana
  misc_feature: MA Experiment 20000453 PARAMETER Experiment Name: At_100uM_ABA_P Parameter: Plant Line Value: WS
  misc_feature: MA Experiment 20000453 PARAMETER Experiment Name: At_100uM_ABA_P Parameter: Timepoint (hr) Value: 24
  misc_feature: MA Experiment 20000453 PARAMETER Experiment Name: At_100uM_ABA_P Parameter: Tissue Value: Aerial
  misc_feature: MA Experiment 20000453 PARAMETER Experiment Name: At_100uM_ABA_P Parameter: Treatment Value: 100uM ABA vs. No Treatment
  misc_feature: MA Experiment ID: 20001554 Result: Up-regulated in Transcription
  misc_feature: MA Experiment 20001554 PARAMETER Experiment Name: At_Drought_Soil_Dry_P Parameter: Age (day) Value: 21
  misc_feature: MA Experiment 20001554 PARAMETER Experiment Name: At_Drought_Soil_Dry_P Parameter: Organism Value: A. thaliana
  misc_feature: MA Experiment 20001554 PARAMETER Experiment Name: At_Drought_Soil_Dry_P Parameter: Plant Line Value: WS
  misc_feature: MA Experiment 20001554 PARAMETER Experiment Name: At_Drought_Soil_Dry_P Parameter: Post Timepoint (hr) Value: None
  misc_feature: MA Experiment 20001554 PARAMETER Experiment Name: At_Drought_Soil_Dry_P Parameter: Post-Treatment Value: None
  misc_feature: MA Experiment 20001554 PARAMETER Experiment Name: At_Drought_Soil_Dry_P Parameter: Timepoint (day) Value: 7
  misc_feature: MA Experiment 20001554 PARAMETER Experiment Name: At_Drought_Soil_Dry_P Parameter: Treatment Value: Drought vs. No Drought
  misc_feature: MA Experiment ID: 20001555 Result: Up-regulated in Transcription
  misc_feature: MA Experiment 20001555 PARAMETER Experiment Name: At_Drought_Soil_Dry_P Parameter: Age (day) Value: 24
  misc_feature: MA Experiment 20001555 PARAMETER Experiment Name: At_Drought_Soil_Dry_P Parameter: Organism Value: A. thaliana
  misc_feature: MA Experiment 20001555 PARAMETER Experiment Name: At_Drought_Soil_Dry_P Parameter: Plant Line Value: WS
  misc_feature: MA Experiment 20001555 PARAMETER Experiment Name: At_Drought_Soil_Dry_P Parameter: Post Timepoint (hr) Value: None
  misc_feature: MA Experiment 20001555 PARAMETER Experiment Name: At_Drought_Soil_Dry_P Parameter: Post-Treatment Value: None
  misc_feature: MA Experiment 20001555 PARAMETER Experiment Name: At_Drought_Soil_Dry_P Parameter: Timepoint (day) Value: 10
  misc_feature: MA Experiment 20001555 PARAMETER Experiment Name: At_Drought_Soil_Dry_P Parameter: Treatment Value: Drought vs. No Drought
atgggtggagaagagagatcaggagatggagaaaaaagaggggaagaagtagttgatgctggttctctcttcgtccttaaatccaaagggacatggtggcactgcggattccacttgacgacgtctatagtggcgcctgcgctactgagtctaccgtacgccttcaagttcttaggatgggctgccgggatatcttgtctggtcggaggagcagccgttactttctactcgtacactcttctttctcttactctcgaacaccacgcttctctcggcaaccgttacctccgcttccgtgacatggctcatcacatcctcagtccgaaatggggaaggtactacgttggaccaatacaaatggcggtgtgctatggtgtggttattgccaatgcgctcttgggagggcaatgcctaaaggcaatgtacttggtagtgcagccaaatggggaaatgaaactctttgagtttgtgattatttttggatgcttacttttggttttggcacaattcccatcctttcactctctacgatacatcaactcactgtctctcctcctctgcctcctctacagtgcttctgccgctgctgcatccatctacattggaaaagaaccaaatgcaccagagaaggactatactatagttggtgatccagaaactagagtgtttggaatctttaatgctatggctattattgctactacatacggcaatggcattatacctgaaattcaggcaacaatatcggcaccagtgaaaggaaaaatgatgaaagggttgtgtatgtgttaccttgtagtaataatgacatttttcacagtagccatcacaggatattgggcattcggtaaaaaagccaatggacttatcttcaccaatttcttaaatgccgagacaaaccattactttgtccctacttggtttatttttctcgtcaatctcttcactgtccttcaactttcggccgttgctgtggtatacctacaacctataaacgatattttggaaagtgtgatcagcgatccaacaaagaaagaattctctatccgcaatgtcatccctcgactagttgtgcgttccctcttcgtcgtgatggctacaatcgttgcggcaatgcttccattttttggagatgtaaactccttgttaggcgctttcggttttatacctctagacttcgttcttcctgtagttttcttcaactttactttcaagccgtctaaaaaaagtttcattttttggatcaacactgtgatcgccgtggttttttcgtgtttaggggtgattgctatggtagcggcggttagacagattataatagatgccaatacgtataagttgtttgcggatgtataa

SEQ ID NO: 71003 - protein, 451 aa, Arabidopsis thaliana
  peptide (1)..(451): Ceres Seq. ID no. 3034711
  misc_feature (53)..(451): Homolog of NCBI NO: 6579208 NR Description: T23G18.9 [Arabidopsis thaliana]
  misc_feature (1)..(58): Homolog of NCBI NO: 6579208 NR Description: T23G18.9 [Arabidopsis thaliana]
  misc_feature (120)..(451): Homolog of NCBI NO: 30680565 NR Description: amino acid transporter family [Arabidopsis
  misc_feature (10)..(451): Homolog of NCBI NO: 34908432 NR Description: OJ1402_H07.15 [Oryza sativa (japonica
  misc_feature (19)..(449): Homolog of NCBI NO: 18422139 NR Description: amino acid permease-like protein; proline protein; protein id: At5g41800.1, supported by cDNA: 20725., by cDNA: gi_20466437 [Arabidopsis thaliana]
  misc_feature (19)..(449): Homolog of NCBI NO: 21554158 NR Description: amino acid permease-like protein [Arabidopsis
  misc_feature (110)..(450): Homolog of NCBI NO: 34912776 NR Description: P0407B12.25 [Oryza sativa (japonica
  misc_feature (30)..(106): Homolog of NCBI NO: 34912776 NR Description: P0407B12.25 [Oryza sativa (japonica
  misc_feature (59)..(449): Homolog of NCBI NO: 10177364 NR Description: amino acid permease-like protein; proline
  misc_feature (9)..(449): Homolog of NCBI NO: 30409136 NR Description: histidine amino acid transporter [Oryza sativa
MGGEERSGDGEKRGEEVVDAGSLFVLKSKGTWWHCGFHLTTSIVAPALLSLPYAFKFLGWAAGISCLVGGAAVTFYSYTLLSLTLEHHASLGNRYLRFRDMAHHILSPKWGRYYVGPIQMAVCYGVVIANALLGGQCLKAMYLVVQPNGEMKLFEFVIIFGCLLLVLAQFPSFHSLRYINSLSLLLCLLYSASAAAASIYIGKEPNAPEKDYTIVGDPETRVFGIFNAMAIIATTYGNGIIPEIQATISAPVKGKMMKGLCMCYLVVIMTFFTVAITGYWAFGKKANGLIFTNFLNAETNHYFVPTWFIFLVNLFTVLQLSAVAVVYLQPINDILESVISDPTKKEFSIRNVIPRLVVRSLFVVMATIVAAMLPFFGDVNSLLGAFGFIPLDFVLPVVFFNFTFKPSKKSFIFWINTVIAVVFSCLGVIAMVAAVRQIIIDANTYKLFADV

SEQ ID NO: 71004 - protein, 351 aa, Arabidopsis thaliana
  peptide (1)..(351): Ceres Seq. ID no. 3034712
  misc_feature (1)..(351): Homolog of NCBI NO: 6579208 NR Description: T23G18.9 [Arabidopsis thaliana]
  misc_feature (20)..(351): Homolog of NCBI NO: 30680565 NR Description: amino acid transporter family [Arabidopsis
  misc_feature (1)..(351): Homolog of NCBI NO: 34908432 NR Description: OJ1402_H07.15 [Oryza sativa (japonica
  misc_feature (1)..(349): Homolog of NCBI NO: 18422139 NR Description: amino acid permease-like protein; proline protein; protein id: At5g41800.1, supported by cDNA: 20725., by cDNA: gi_20466437 [Arabidopsis thaliana]
  misc_feature (1)..(349): Homolog of NCBI NO: 21554158 NR Description: amino acid permease-like protein [Arabidopsis
  misc_feature (10)..(350): Homolog of NCBI NO: 34912776 NR Description: P0407B12.25 [Oryza sativa (japonica
  misc_feature (1)..(349): Homolog of NCBI NO: 10177364 NR Description: amino acid permease-like protein; proline
  misc_feature (1)..(349): Homolog of NCBI NO: 30409136 NR Description: histidine amino acid transporter [Oryza sativa
  misc_feature (1)..(351): Homolog of NCBI NO: 37534336 NR Description: putative proline transporter 1 [Oryza sativa
  misc_feature (1)..(349): Homolog of NCBI NO: 18395471 NR Description: putative lysine/histidine-specific permease; id: At1g24400.1, supported by cDNA: gi_9293859 [Arabidopsis
MAHHILSPKWGRYYVGPIQMAVCYGVVIANALLGGQCLKAMYLVVQPNGEMKLFEFVIIFGCLLLVLAQFPSFHSLRYINSLSLLLCLLYSASAAAASIYIGKEPNAPEKDYTIVGDPETRVFGIFNAMAIIATTYGNGIIPEIQATISAPVKGKMMKGLCMCYLVVIMTFFTVAITGYWAFGKKANGLIFTNFLNAETNHYFVPTWFIFLVNLFTVLQLSAVAVVYLQPINDILESVISDPTKKEFSIRNVIPRLVVRSLFVVMATIVAAMLPFFGDVNSLLGAFGFIPLDFVLPVVFFNFTFKPSKKSFIFWINTVIAVVFSCLGVIAMVAAVRQIIIDANTYKLFADV

SEQ ID NO: 71005 - protein, 332 aa, Arabidopsis thaliana
  peptide (1)..(332): Ceres Seq. ID no. 3034713
  misc_feature (1)..(332): Homolog of NCBI NO: 6579208 NR Description: T23G18.9 [Arabidopsis thaliana]
  misc_feature (1)..(332): Homolog of NCBI NO: 30680565 NR Description: amino acid transporter family [Arabidopsis
  misc_feature (1)..(332): Homolog of NCBI NO: 34908432 NR Description: OJ1402_H07.15 [Oryza sativa (japonica
  misc_feature (1)..(330): Homolog of NCBI NO: 18422139 NR Description: amino acid permease-like protein; proline protein; protein id: At5g41800.1, supported by cDNA: 20725., by cDNA: gi_20466437 [Arabidopsis thaliana]
  misc_feature (1)..(330): Homolog of NCBI NO: 21554158 NR Description: amino acid permease-like protein [Arabidopsis
  misc_feature (1)..(331): Homolog of NCBI NO: 34912776 NR Description: P0407B12.25 [Oryza sativa (japonica
  misc_feature (1)..(330): Homolog of NCBI NO: 10177364 NR Description: amino acid permease-like protein; proline
  misc_feature (1)..(330): Homolog of NCBI NO: 30409136 NR Description: histidine amino acid transporter [Oryza sativa
  misc_feature (1)..(332): Homolog of NCBI NO: 37534336 NR Description: putative proline transporter 1 [Oryza sativa
  misc_feature (1)..(330): Homolog of NCBI NO: 18395471 NR Description: putative lysine/histidine-specific permease; id: At1g24400.1, supported by cDNA: gi_9293859 [Arabidopsis
MAVCYGVVIANALLGGQCLKAMYLVVQPNGEMKLFEFVIIFGCLLLVLAQFPSFHSLRYINSLSLLLCLLYSASAAAASIYIGKEPNAPEKDYTIVGDPETRVFGIFNAMAIIATTYGNGIIPEIQATISAPVKGKMMKGLCMCYLVVIMTFFTVAITGYWAFGKKANGLIFTNFLNAETNHYFVPTWFIFLVNLFTVLQLSAVAVVYLQPINDILESVISDPTKKEFSIRNVIPRLVVRSLFVVMATIVAAMLPFFGDVNSLLGAFGFIPLDFVLPVVFFNFTFKPSKKSFIFWINTVIAVVFSCLGVIAMVAAVRQIIIDANTYKLFADV

SEQ ID NO: 71006 - DNA, 2589 bp, Arabidopsis thaliana
  misc_feature (1)..(2589): Ceres Seq. ID no. 3036346
  misc_feature: MA Experiment ID: 20000355 Result: Up-regulated in Transcription
  misc_feature: MA Experiment 20000355 PARAMETER Experiment Name: At_Siliques_Sub_P Parameter: Age (day) Value: 21
  misc_feature: MA Experiment 20000355 PARAMETER Experiment Name: At_Siliques_Sub_P Parameter: Organism Value: A. thaliana
  misc_feature: MA Experiment 20000355 PARAMETER Experiment Name: At_Siliques_Sub_P Parameter: Plant Line Value: WS
  misc_feature: MA Experiment 20000355 PARAMETER Experiment Name: At_Siliques_Sub_P Parameter: Tissue Value: Less Than 5mm Siliques vs. Whole Plant
  misc_feature: MA Experiment ID: 20000440 Result: Up-regulated in Transcription
  misc_feature: MA Experiment 20000440 PARAMETER Experiment Name: At_Closed-Flower__Sub_P Parameter: Tissue Value: Closed Flower vs. Whole Plant
atgggagcgattgctggagaagagctgaagaaaatggagaagacacaggtgcatgttgcccgggaagagaagatattggttctggtgagactgagacctctgaacgagaaagagatcttggctaatgaagctgcggactgggaatgcatcaacgacaccaccgtattgtacagaaacacgttgcgtgagggctcaacttttccttctgcatactcatttgatagagtgtaccgaggtgaatgcccaaccagacaagtttacgaagatggccccaaggaagttgctctctcggtggtcaaaggaattaactctagtattttcgcgtatggtcagacgagcagtggaaagacatacaccatgtctggtataactgagtttgctgtggctgacatatttgattatatatttaagcatgaagatagggcatttgttgtgaaattttcggctatagagatctacaatgaggccatccgcgatcttctcagcccagatagtacaccactgaggctacgagatgaccctgagaaaggggccgccgttgaaaaagccacagaggaaacgctgagagattggaaccatttgaaggaacttatctcagtttgtgaagcacagcggaagattggtgaaacttcactaaatgagagaagttcaagatctcatcaaattatcaaactaacagttgaaagctctgctcgtgagttcttaggcaaggaaaactcaaccactctcatggcgagtgtgaattttattgatttggcggggagcgagcgtgcatcgcaggccttatcagctggtgcaagacttaaggagggttgtcatatcaatcgaagcttgctgactctaggaacagtgatacgcaaactcagcaacggaagacaaggacacatcaactatagagactccaaactcacacgcattcttcagccgtgcttggggggcaatgccagaaccgccatagtctgcacgctgagtccagcgaggagtcatgtggagcagactagaaacactctcttgtttgcttgctgtgccaaggaagtcaccacgaaagcacagatcaatgttgttatgtcagacaaggctttggtgaagcaactacagcgtgagctagccaggctcgagagcgagctgagaaacccagcacctgcaacctcaagctgcgattgtggggtgacactgagaaagaaagatcttcagatacaaaagatggagaagcagcttgcagaaatgacaaaacagcgggatattgctcaatctcggcttgaagattttatgaagatggtggaacacgatgcgtcttcgaaggctggaactccgcatttccgtaaccgtaccaacaagtgggaggatggttcagtgtcagagatatcaggcgtggttgatccagacaggaccagtttcatatcagatgggacgtcaacgcctctgtcgactgcaagagctcatgttaggtctcactctgatgatgatctggaggaggaaatgtcgcccaggcattcaggagatcaatcagaagaatactgcaaagaggtacaatgcattgagatggaagaatcgaccagagacattaataacgacagtgaagaaaggacagacgcagaaacacttttgggacacaatgcagaggcaaacggtgaaacaggtagtgctcaacacaggatcccgtcaagtgttagaagtgtcaggaggaggaagagttggagccgtggagataccatgacaggcacaagcactcctcctgatgccctggagacagactaccgtggaagaccggagggtcatggatttgcgtttcctgatttggagtttggttctggtgggaaattgttgaggaacgattcaatgacttctcgtggaagtgattcaactgaggctcacagcattggaacaccgttggtgggagaagagggaggtatcaccagcatacggtcatttgttgaagggctgaaggagatggtttcggatccggagaattcagggaaaatgaggaaggacattggtgtggatgctatggaggaagaggtgtctgggacaatgacaaactggtcggaggaattcgagagacagagagaacaaattctggggctgtggcagacatgtcatgtctcgttggtgcatagaacgtacttcttcttgctcttcacgggagatcaagcggattcgatatacatcggagtagagctaagaagactctcctttatgaaagaaagtttctctcaaggaaaccatgcctttgaaagaggacagacactcacaatagcttcaagcctgaaggcgcttcatagggagagacggatgctaagcaagcttgtcgggaagaggtttactggagaggaaaggaagagactttaccagaagtttgggattgctgtgaactcgaaacgtcggcggttgcagctagcgaaccagctctggagtaaacccaatgacataactcatgcggttgaaagcgcagccgttgtagcgaaactggttaggtttgtggagcaaggtagagctatgaaggagatgtttggtctgagcttcacgcctccgctaccgacaacgcggagatcactaaactggaggaaaagcatggccacactgttctaa

SEQ ID NO: 71007 - protein, 862 aa, Arabidopsis thaliana
  peptide (1)..(862): Ceres Seq. ID no. 3036347
  misc_feature (1)..(431): Homolog of NCBI NO: 15226512 NR Description: putative kinesin heavy chain; protein id: [Arabidopsis thaliana] >gi|25412026|pir||F84599 probable kinesin
  misc_feature (12)..(673): Homolog of NCBI NO: 15234898 NR Description: kinesin like protein; protein id: At4g38950.1
  misc_feature (1)..(460): Homolog of NCBI NO: 38344976 NR Description: OSJNBa0011L07.1 [Oryza sativa (japonica
  misc_feature (577)..(861): Homolog of NCBI NO: 38344976 NR Description: OSJNBa0011L07.1 [Oryza sativa (japonica
  misc_feature (13)..(427): Homolog of NCBI NO: 30693419 NR Description: expressed protein [Arabidopsis thaliana]
  misc_feature (658)..(861): Homolog of NCBI NO: 30693419 NR Description: expressed protein [Arabidopsis thaliana]
  misc_feature (104)..(460): Homolog of NCBI NO: 38567877 NR Description: OSJNBa0091D06.23 [Oryza sativa (japonica
  misc_feature (577)..(861): Homolog of NCBI NO: 38567877 NR Description: OSJNBa0091D06.23 [Oryza sativa (japonica
  misc_feature (1)..(87): Homolog of NCBI NO: 38567877 NR Description: OSJNBa0091D06.23 [Oryza sativa (japonica
  misc_feature (22)..(437): Homolog of NCBI NO: 30698217 NR Description: kinesin heavy chain DNA binding protein-related
MGAIAGEELKKMEKTQVHVAREEKILVLVRLRPLNEKEILANEAADWECINDTTVLYRNTLREGSTFPSAYSFDRVYRGECPTRQVYEDGPKEVALSVVKGINSSIFAYGQTSSGKTYTMSGITEFAVADIFDYIFKHEDRAFVVKFSAIEIYNEAIRDLLSPDSTPLRLRDDPEKGAAVEKATEETLRDWNHLKELISVCEAQRKIGETSLNERSSRSHQIIKLTVESSAREFLGKENSTTLMASVNFIDLAGSERASQALSAGARLKEGCHINRSLLTLGTVIRKLSNGRQGHINYRDSKLTRILQPCLGGNARTAIVCTLSPARSHVEQTRNTLLFACCAKEVTTKAQINVVMSDKALVKQLQRELARLESELRNPAPATSSCDCGVTLRKKDLQIQKMEKQLAEMTKQRDIAQSRLEDFMKMVEHDASSKAGTPHFRNRTNKWEDGSVSEISGVVDPDRTSFISDGTSTPLSTARAHVRSHSDDDLEEEMSPRHSGDQSEEYCKEVQCIEMEESTRDINNDSEERTDAETLLGHNAEANGETGSAQHRIPSSVRSVRRRKSWSRGDTMTGTSTPPDALETDYRGRPEGHGFAFPDLEFGSGGKLLRNDSMTSRGSDSTEAHSIGTPLVGEEGGITSIRSFVEGLKEMVSDPENSGKMRKDIGVDAMEEEVSGTMTNWSEEFERQREQILGLWQTCHVSLVHRTYFFLLFTGDQADSIYIGVELRRLSFMKESFSQGNHAFERGQTLTIASSLKALHRERRMLSKLVGKRFTGEERKRLYQKFGIAVNSKRRRLQLANQLWSKPNDITHAVESAAVVAKLVRFVEQGRAMKEMFGLSFTPPLPTTRRSLNWRKSMATLF

SEQ ID NO: 71008 - protein, 851 aa, Arabidopsis thaliana
  peptide (1)..(851): Ceres Seq. ID no. 3036348
  misc_feature (1)..(420): Homolog of NCBI NO: 15226512 NR Description: putative kinesin heavy chain; protein id: [Arabidopsis thaliana] >gi|25412026|pir||F84599 probable kinesin
  misc_feature (1)..(662): Homolog of NCBI NO: 15234898 NR Description: kinesin like protein; protein id: At4g38950.1
  misc_feature (1)..(449): Homolog of NCBI NO: 38344976 NR Description: OSJNBa0011L07.1 [Oryza sativa (japonica
  misc_feature (566)..(850): Homolog of NCBI NO: 38344976 NR Description: OSJNBa0011L07.1 [Oryza sativa (japonica
  misc_feature (2)..(416): Homolog of NCBI NO: 30693419 NR Description: expressed protein [Arabidopsis thaliana]
  misc_feature (647)..(850): Homolog of NCBI NO: 30693419 NR Description: expressed protein [Arabidopsis thaliana]
  misc_feature (93)..(449): Homolog of NCBI NO: 38567877 NR Description: OSJNBa0091D06.23 [Oryza sativa (japonica
  misc_feature (566)..(850): Homolog of NCBI NO: 38567877 NR Description: OSJNBa0091D06.23 [Oryza sativa (japonica
  misc_feature (1)..(76): Homolog of NCBI NO: 38567877 NR Description: OSJNBa0091D06.23 [Oryza sativa (japonica
  misc_feature (11)..(426): Homolog of NCBI NO: 30698217 NR Description: kinesin heavy chain DNA binding protein-related
MEKTQVHVAREEKILVLVRLRPLNEKEILANEAADWECINDTTVLYRNTLREGSTFPSAYSFDRVYRGECPTRQVYEDGPKEVALSVVKGINSSIFAYGQTSSGKTYTMSGITEFAVADIFDYIFKHEDRAFVVKFSAIEIYNEAIRDLLSPDSTPLRLRDDPEKGAAVEKATEETLRDWNHLKELISVCEAQRKIGETSLNERSSRSHQIIKLTVESSAREFLGKENSTTLMASVNFIDLAGSERASQALSAGARLKEGCHINRSLLTLGTVIRKLSNGRQGHINYRDSKLTRILQPCLGGNARTAIVCTLSPARSHVEQTRNTLLFACCAKEVTTKAQINVVMSDKALVKQLQRELARLESELRNPAPATSSCDCGVTLRKKDLQIQKMEKQLAEMTKQRDIAQSRLEDFMKMVEHDASSKAGTPHFRNRTNKWEDGSVSEISGVVDPDRTSFISDGTSTPLSTARAHVRSHSDDDLEEEMSPRHSGDQSEEYCKEVQCIEMEESTRDINNDSEERTDAETLLGHNAEANGETGSAQHRIPSSVRSVRRRKSWSRGDTMTGTSTPPDALETDYRGRPEGHGFAFPDLEFGSGGKLLRNDSMTSRGSDSTEAHSIGTPLVGEEGGITSIRSFVEGLKEMVSDPENSGKMRKDIGVDAMEEEVSGTMTNWSEEFERQREQILGLWQTCHVSLVHRTYFFLLFTGDQADSIYIGVELRRLSFMKESFSQGNHAFERGQTLTIASSLKALHRERRMLSKLVGKRFTGEERKRLYQKFGIAVNSKRRRLQLANQLWSKPNDITHAVESAAVVAKLVRFVEQGRAMKEMFGLSFTPPLPTTRRSLNWRKSMATLF

SEQ ID NO: 71009 - protein, 743 aa, Arabidopsis thaliana
  peptide (1)..(743): Ceres Seq. ID no. 3036349
  misc_feature (1)..(312): Homolog of NCBI NO: 15226512 NR Description: putative kinesin heavy chain; protein id: [Arabidopsis thaliana] >gi|25412026|pir||F84599 probable kinesin
  misc_feature (1)..(554): Homolog of NCBI NO: 15234898 NR Description: kinesin like protein; protein id: At4g38950.1
  misc_feature (1)..(341): Homolog of NCBI NO: 38344976 NR Description: OSJNBa0011L07.1 [Oryza sativa (japonica
  misc_feature (458)..(742): Homolog of NCBI NO: 38344976 NR Description: OSJNBa0011L07.1 [Oryza sativa (japonica
  misc_feature (1)..(308): Homolog of NCBI NO: 30693419 NR Description: expressed protein [Arabidopsis thaliana]
  misc_feature (539)..(742): Homolog of NCBI NO: 30693419 NR Description: expressed protein [Arabidopsis thaliana]
  misc_feature (1)..(341): Homolog of NCBI NO: 38567877 NR Description: OSJNBa0091D06.23 [Oryza sativa (japonica
  misc_feature (458)..(742): Homolog of NCBI NO: 38567877 NR Description: OSJNBa0091D06.23 [Oryza sativa (japonica
  misc_feature (1)..(318): Homolog of NCBI NO: 30698217 NR Description: kinesin heavy chain DNA binding protein-related
  misc_feature (538)..(742): Homolog of NCBI NO: 30698217 NR Description: kinesin heavy chain DNA binding protein-related
MSGITEFAVADIFDYIFKHEDRAFVVKFSAIEIYNEAIRDLLSPDSTPLRLRDDPEKGAAVEKATEETLRDWNHLKELISVCEAQRKIGETSLNERSSRSHQIIKLTVESSAREFLGKENSTTLMASVNFIDLAGSERASQALSAGARLKEGCHINRSLLTLGTVIRKLSNGRQGHINYRDSKLTRILQPCLGGNARTAIVCTLSPARSHVEQTRNTLLFACCAKEVTTKAQINVVMSDKALVKQLQRELARLESELRNPAPATSSCDCGVTLRKKDLQIQKMEKQLAEMTKQRDIAQSRLEDFMKMVEHDASSKAGTPHFRNRTNKWEDGSVSEISGVVDPDRTSFISDGTSTPLSTARAHVRSHSDDDLEEEMSPRHSGDQSEEYCKEVQCIEMEESTRDINNDSEERTDAETLLGHNAEANGETGSAQHRIPSSVRSVRRRKSWSRGDTMTGTSTPPDALETDYRGRPEGHGFAFPDLEFGSGGKLLRNDSMTSRGSDSTEAHSIGTPLVGEEGGITSIRSFVEGLKEMVSDPENSGKMRKDIGVDAMEEEVSGTMTNWSEEFERQREQILGLWQTCHVSLVHRTYFFLLFTGDQADSIYIGVELRRLSFMKESFSQGNHAFERGQTLTIASSLKALHRERRMLSKLVGKRFTGEERKRLYQKFGIAVNSKRRRLQLANQLWSKPNDITHAVESAAVVAKLVRFVEQGRAMKEMFGLSFTPPLPTTRRSLNWRKSMATLF

SEQ ID NO: 71010 - DNA, 1476 bp, Arabidopsis thaliana
  misc_feature (1)..(1476): Ceres Seq. ID no. 3036983
  misc_feature: MA Experiment ID: 20000179 Result: Down-regulated in Transcription
  misc_feature: MA Experiment 20000179 PARAMETER Experiment Name: At_Germinating_Seeds_P Parameter: Age (hr) Value: 6 vs. 0
  misc_feature: MA Experiment 20000179 PARAMETER Experiment Name: At_Germinating_Seeds_P Parameter: Tissue Value: Germinating Seeds
  misc_feature: MA Experiment ID: 20000180 Result: Down-regulated in Transcription
  misc_feature: MA Experiment 20000180 PARAMETER Experiment Name: At_Germinating_Seeds_P Parameter: Age (hr) Value: 24 vs. 0
  misc_feature: MA Experiment 20000180 PARAMETER Experiment Name: At_Germinating_Seeds_P Parameter: Tissue Value: Germinating Seeds
  misc_feature: MA Experiment ID: 20000182 Result: Up-regulated in Transcription
  misc_feature: MA Experiment 20000182 PARAMETER Experiment Name: At_2mM_SA_P Parameter: Age (day) Value: 14
  misc_feature: MA Experiment 20000182 PARAMETER Experiment Name: At_2mM_SA_P Parameter: Organism Value: A. thaliana
  misc_feature: MA Experiment 20000182 PARAMETER Experiment Name: At_2mM_SA_P Parameter: Plant Line Value: WS
  misc_feature: MA Experiment 20000182 PARAMETER Experiment Name: At_2mM_SA_P Parameter: Timepoint (hr) Value: 6
  misc_feature: MA Experiment 20000182 PARAMETER Experiment Name: At_2mM_SA_P Parameter: Tissue Value: Aerial
  misc_feature: MA Experiment 20000182 PARAMETER Experiment Name: At_2mM_SA_P Parameter: Treatment Value: 2mM SA vs. No Treatment
  misc_feature: MA Experiment ID: 20000234 Result: Down-regulated in Transcription
  misc_feature: MA Experiment 20000234 PARAMETER Experiment Name: At_Siliques_P Parameter: Age (day) Value: 21
  misc_feature: MA Experiment 20000234 PARAMETER Experiment Name: At_Siliques_P Parameter: Organism Value: A. thaliana
  misc_feature: MA Experiment 20000234 PARAMETER Experiment Name: At_Siliques_P Parameter: Plant Line Value: WS
  misc_feature: MA Experiment 20000234 PARAMETER Experiment Name: At_Siliques_P Parameter: Tissue Value: Less Than 5mm Siliques vs. Whole Plant
  misc_feature: MA Experiment ID: 20000235 Result: Down-regulated in Transcription
  misc_feature: MA Experiment 20000235 PARAMETER Experiment Name: At_Siliques_P Parameter: Age (day) Value: 21
  misc_feature: MA Experiment 20000235 PARAMETER Experiment Name: At_Siliques_P Parameter: Organism Value: A. thaliana
  misc_feature: MA Experiment 20000235 PARAMETER Experiment Name: At_Siliques_P Parameter: Plant Line Value: WS
  misc_feature: MA Experiment 20000235 PARAMETER Experiment Name: At_Siliques_P Parameter: Tissue Value: 5-10mm Siliques vs. Whole Plant
  misc_feature: MA Experiment ID: 20000265 Result: Down-regulated in Transcription
  misc_feature: MA Experiment 20000265 PARAMETER Experiment Name: At_Open_Flower_P Parameter: Age (day) Value: 21
  misc_feature: MA Experiment 20000265 PARAMETER Experiment Name: At_Open_Flower_P Parameter: Plant Line Value: WS
  misc_feature: MA Experiment 20000265 PARAMETER Experiment Name: At_Open_Flower_P Parameter: Tissue Value: Closed Flower vs. Whole Plant
  misc_feature: MA Experiment ID: 20000286 Result: Down-regulated in Transcription
  misc_feature: MA Experiment 20000286 PARAMETER Experiment Name: At_Open_Flower_P Parameter: Age (day) Value: 21
  misc_feature: MA Experiment 20000286 PARAMETER Experiment Name: At_Open_Flower_P Parameter: Plant Line Value: WS
  misc_feature: MA Experiment 20000286 PARAMETER Experiment Name: At_Open_Flower_P Parameter: Tissue Value: Half Open vs. Whole Plant
  misc_feature: MA Experiment ID: 20000438 Result: Up-regulated in Transcription
  misc_feature: MA Experiment 20000438 PARAMETER Experiment Name: At_Shoots__P Parameter: Age (day) Value: 14
  misc_feature: MA Experiment 20000438 PARAMETER Experiment Name: At_Shoots__P Parameter: Tissue Value: Shoots vs. Whole Plant
  misc_feature: MA Experiment ID: 20000439 Result: Up-regulated in Transcription
  misc_feature: MA Experiment 20000439 PARAMETER Experiment Name: At_Roots__P Parameter: Age (day) Value: 14 vs. 21
  misc_feature: MA Experiment 20000439 PARAMETER Experiment Name: At_Roots__P Parameter: Organism Value: A. thaliana
  misc_feature: MA Experiment 20000439 PARAMETER Experiment Name: At_Roots__P Parameter: Tissue Value: Roots vs. Whole Plant
  misc_feature: MA Experiment ID: 20000441 Result: Up-regulated in Transcription
  misc_feature: MA Experiment 20000441 PARAMETER Experiment Name: At_1uM_BR-BRZ__P Parameter: Tissue Value: Shoot Apices
  misc_feature: MA Experiment 20000441 PARAMETER Experiment Name: At_1uM_BR-BRZ__P Parameter: Treatment Value: 1uM BR vs. No Treatment
  misc_feature: MA Experiment ID: 20000443 Result: Up-regulated in Transcription
  misc_feature: MA Experiment 20000443 PARAMETER Experiment Name: At_1uM_BR-BRZ__P Parameter: Tissue Value: Shoot Apices
  misc_feature: MA Experiment 20000443 PARAMETER Experiment Name: At_1uM_BR-BRZ__P Parameter: Treatment Value: 1uM BRZ vs. No Treatment
  misc_feature: MA Experiment ID: 20000496 Result: Down-regulated in Transcription
  misc_feature: MA Experiment 20000496 PARAMETER Experiment Name: At_Guard_Cells_P Parameter: Harvest Date Value: 7/19/2002
  misc_feature: MA Experiment 20000496 PARAMETER Experiment Name: At_Guard_Cells_P Parameter: Organism Value: Canola
  misc_feature: MA Experiment 20000496 PARAMETER Experiment Name: At_Guard_Cells_P Parameter: Tissue Value: Guard Cells vs. Leaves
  misc_feature: MA Experiment ID: 20000709 Result: Up-regulated in Transcription
  misc_feature: MA Experiment 20000709 PARAMETER Experiment Name: At_15mM_NH4NO3_L-to-H_P Parameter: Age (hr) Value: 14
  misc_feature: MA Experiment 20000709 PARAMETER Experiment Name: At_15mM_NH4NO3_L-to-H_P Parameter: Organism Value: A. thaliana
  misc_feature: MA Experiment 20000709 PARAMETER Experiment Name: At_15mM_NH4NO3_L-to-H_P Parameter: Plant Line Value: WS
  misc_feature: MA Experiment 20000709 PARAMETER Experiment Name: At_15mM_NH4NO3_L-to-H_P Parameter: Timepoint (hr) Value: 4
  misc_feature: MA Experiment 20000709 PARAMETER Experiment Name: At_15mM_NH4NO3_L-to-H_P Parameter: Tissue Value: Aerial
  misc_feature: MA Experiment 20000709 PARAMETER Experiment Name: At_15mM_NH4NO3_L-to-H_P Parameter: Treatment Value: 15mM NH4NO3 vs. 30mM Mannitol
  misc_feature: MA Experiment ID: 20001247 Result: Up-regulated in Transcription
  misc_feature: MA Experiment 20001247 PARAMETER Experiment Name: At_Far-red-induction_P Parameter: Age (day) Value: 7
  misc_feature: MA Experiment 20001247 PARAMETER Experiment Name: At_Far-red-induction_P Parameter: Light Value: Far-red vs. White
  misc_feature: MA Experiment 20001247 PARAMETER Experiment Name: At_Far-red-induction_P Parameter: Organism Value: A. thaliana
  misc_feature: MA Experiment 20001247 PARAMETER Experiment Name: At_Far-red-induction_P Parameter: Plant Line Value: Columbia
  misc_feature: MA Experiment 20001247 PARAMETER Experiment Name: At_Far-red-induction_P Parameter: Timepoint (hr) Value: 1
  misc_feature: MA Experiment 20001247 PARAMETER Experiment Name: At_Far-red-induction_P Parameter: Tissue Value: Whole Plant
  misc_feature: MA Experiment ID: 20001906 Result: Up-regulated in Transcription
  misc_feature: MA Experiment 20001906 PARAMETER Experiment Name: At_Drought_Reproduction_P Parameter: Age (day) Value: 35
  misc_feature: MA Experiment 20001906 PARAMETER Experiment Name: At_Drought_Reproduction_P Parameter: Organism Value: A. thaliana
  misc_feature: MA Experiment 20001906 PARAMETER Experiment Name: At_Drought_Reproduction_P Parameter: Plant Line Value: WS
  misc_feature: MA Experiment 20001906 PARAMETER Experiment Name: At_Drought_Reproduction_P Parameter: Timepoint (day) Value: 5
  misc_feature: MA Experiment 20001906 PARAMETER Experiment Name: At_Drought_Reproduction_P Parameter: Tissue Value: Siliques
  misc_feature: MA Experiment 20001906 PARAMETER Experiment Name: At_Drought_Reproduction_P Parameter: Treatment Value: Drought vs. No Drought
atggccggaagaggaggagagctcacggaggctctggtgaaaaagaccggcagagaagaagaggatgagttggggatgaaggagaaggtttggattgaatcaaagaaactgtgggttgtggcggcgccagcgatcttcacaagatactctacgttcggagtttcaatggtaactcaagctttcattggccatcttggcccaaccgagttggccgcttactctatcaccttcaccattctcctccgtttcagtaatggtatcttgttaggtatggccggtgcactaggaacattatgtggtcaagcctacggagccaaacaataccagatgctcgggatctacctccaaaggtcatggatcgtcctcacaggtggtaccatttgcctcatgcccgtcttcatctttgcgggccctatcctcttagctttaggtcaagaggaacgcattgttcgtgtggctcgggtcttagccctatgggtcataggcatcaacttctccttcgtgccctccttcacttgccaaatgtttctccaagctcagagcaagaacaagattatttcctacgtgactgctgtctccttagggctccatgtcttcttctcgtggctcctagtggctcatttcaattttgggatcactggtgcgatgacctctatgctaattgcgttctggttgcctatcattgtgcagctcttgtatgtaacatgtggtggatgtaaggatacatggagaggattctctatgttggccttcaaagatttgtggcccgtcttaaaactatctttgtcttccggtggaatgctttgcttggagttatggtacaactcggtattggtattgctcactggaaatttgaaaaacgcagaggtggctcttgatgcactagcaatctgcatcagcataaatgcactggagatgatgatagcacttgggtttttggcagcagtaagtgtaagagtgtccaacgagctcggtagtggaaaccccaaaggagccaagtttgcaacattgatagcggttttcacgtcactctctataggaatagttctattcttcgtttttttgtttttgaggggaagaatttcctacattttcactacaagtgaagctgtcgcggccgaagttgctgatctttctccacttttagcattttccatcctcttgaacagtgttcaacctgttctctctggagtggcaatcggagcgggatggcaaggatatgtggcttacgttaaccttgcttgctattaccttgtcggaattcctattggtgttatccttggttatgttgttggtttgcaagtgaaaggtgtatggataggaatgctttttggaatattcgttcagacttgtgtgctcaccgtcatgactctcagaacagattgggatcaacaggtatctacgtcgttgagaaatataaaccggtgggttgtaccagaatctagagatgcaaatcaaatttcatcagaggaataa

SEQ ID NO: 71011 - protein, 491 aa, Arabidopsis thaliana
  peptide (1)..(491): Ceres Seq. ID no. 3036984
  misc_feature (1)..(491): Homolog of NCBI NO: 15223394 NR Description: unknown protein; protein id: At1g33100.1
  misc_feature (1)..(491): Homolog of NCBI NO: 15223391 NR Description: hypothetical protein; protein id: At1g33090.1
  misc_feature (1)..(491): Homolog of NCBI NO: 15223402 NR Description: unknown protein; protein id: At1g33110.1, by cDNA: gi_17065359 [Arabidopsis thaliana] Unknown protein [Arabidopsis thaliana]
  misc_feature (1)..(491): Homolog of NCBI NO: 22329916 NR Description: hypothetical protein; protein id: At1g33080.1, by cDNA: gi_19423993 [Arabidopsis thaliana] unknown protein [Arabidopsis thaliana]
  misc_feature (1)..(436): Homolog of NCBI NO: 6910584 NR Description: CDS [Arabidopsis thaliana]
  misc_feature (142)..(470): Homolog of NCBI NO: 25518156 NR Description: T9L6.1 protein - Arabidopsis thaliana
  misc_feature (1)..(87): Homolog of NCBI NO: 25518156 NR Description: T9L6.1 protein - Arabidopsis thaliana
  misc_feature (1)..(321): Homolog of NCBI NO: 6910588 NR Description: CDS [Arabidopsis thaliana]
  misc_feature (326)..(436): Homolog of NCBI NO: 6910588 NR Description: CDS [Arabidopsis thaliana]
  misc_feature (5)..(476): Homolog of NCBI NO: 15238439 NR Description: putative protein; protein id: At5g65380.1, by cDNA: gi_14030730 [Arabidopsis thaliana] emb|CAB89401.1~gene_id:MNA5.11~strong similarity to unknown
MAGRGGELTEALVKKTGREEEDELGMKEKVWIESKKLWVVAAPAIFTRYSTFGVSMVTQAFIGHLGPTELAAYSITFTILLRFSNGILLGMAGALGTLCGQAYGAKQYQMLGIYLQRSWIVLTGGTICLMPVFIFAGPILLALGQEERIVRVARVLALWVIGINFSFVPSFTCQMFLQAQSKNKIISYVTAVSLGLHVFFSWLLVAHFNFGITGAMTSMLIAFWLPIIVQLLYVTCGGCKDTWRGFSMLAFKDLWPVLKLSLSSGGMLCLELWYNSVLVLLTGNLKNAEVALDALAICISINALEMMIALGFLAAVSVRVSNELGSGNPKGAKFATLIAVFTSLSIGIVLFFVFLFLRGRISYIFTTSEAVAAEVADLSPLLAFSILLNSVQPVLSGVAIGAGWQGYVAYVNLACYYLVGIPIGVILGYVVGLQVKGVWIGMLFGIFVQTCVLTVMTLRTDWDQQVSTSLRNINRWVVPESRDANQISSEE

SEQ ID NO: 71012 - protein, 466 aa, Arabidopsis thaliana
  peptide (1)..(466): Ceres Seq. ID no. 3036985
  misc_feature (1)..(466): Homolog of NCBI NO: 15223394 NR Description: unknown protein; protein id: At1g33100.1
  misc_feature (1)..(466): Homolog of NCBI NO: 15223391 NR Description: hypothetical protein; protein id: At1g33090.1
  misc_feature (1)..(466): Homolog of NCBI NO: 15223402 NR Description: unknown protein; protein id: At1g33110.1, by cDNA: gi_17065359 [Arabidopsis thaliana] Unknown protein [Arabidopsis thaliana]
  misc_feature (1)..(466): Homolog of NCBI NO: 22329916 NR Description: hypothetical protein; protein id: At1g33080.1, by cDNA: gi_19423993 [Arabidopsis thaliana] unknown protein [Arabidopsis thaliana]
  misc_feature (1)..(411): Homolog of NCBI NO: 6910584 NR Description: CDS [Arabidopsis thaliana]
  misc_feature (117)..(445): Homolog of NCBI NO: 25518156 NR Description: T9L6.1 protein - Arabidopsis thaliana
  misc_feature (1)..(62): Homolog of NCBI NO: 25518156 NR Description: T9L6.1 protein - Arabidopsis thaliana
  misc_feature (1)..(296): Homolog of NCBI NO: 6910588 NR Description: CDS [Arabidopsis thaliana]
  misc_feature (301)..(411): Homolog of NCBI NO: 6910588 NR Description: CDS [Arabidopsis thaliana]
  misc_feature (1)..(451): Homolog of NCBI NO: 15238439 NR Description: putative protein; protein id: At5g65380.1, by cDNA: gi_14030730 [Arabidopsis thaliana] emb|CAB89401.1~gene_id:MNA5.11~strong similarity to unknown
MKEKVWIESKKLWVVAAPAIFTRYSTFGVSMVTQAFIGHLGPTELAAYSITFTILLRFSNGILLGMAGALGTLCGQAYGAKQYQMLGIYLQRSWIVLTGGTICLMPVFIFAGPILLALGQEERIVRVARVLALWVIGINFSFVPSFTCQMFLQAQSKNKIISYVTAVSLGLHVFFSWLLVAHFNFGITGAMTSMLIAFWLPIIVQLLYVTCGGCKDTWRGFSMLAFKDLWPVLKLSLSSGGMLCLELWYNSVLVLLTGNLKNAEVALDALAICISINALEMMIALGFLAAVSVRVSNELGSGNPKGAKFATLIAVFTSLSIGIVLFFVFLFLRGRISYIFTTSEAVAAEVADLSPLLAFSILLNSVQPVLSGVAIGAGWQGYVAYVNLACYYLVGIPIGVILGYVVGLQVKGVWIGMLFGIFVQTCVLTVMTLRTDWDQQVSTSLRNINRWVVPESRDANQISSEE

SEQ ID NO: 71013 - protein, 436 aa, Arabidopsis thaliana
  peptide (1)..(436): Ceres Seq. ID no. 3036986
  misc_feature (1)..(436): Homolog of NCBI NO: 15223394 NR Description: unknown protein; protein id: At1g33100.1
  misc_feature (1)..(436): Homolog of NCBI NO: 15223391 NR Description: hypothetical protein; protein id: At1g33090.1
  misc_feature (1)..(436): Homolog of NCBI NO: 15223402 NR Description: unknown protein; protein id: At1g33110.1, by cDNA: gi_17065359 [Arabidopsis thaliana] Unknown protein [Arabidopsis thaliana]
  misc_feature (1)..(436): Homolog of NCBI NO: 22329916 NR Description: hypothetical protein; protein id: At1g33080.1, by cDNA: gi_19423993 [Arabidopsis thaliana] unknown protein [Arabidopsis thaliana]
  misc_feature (1)..(381): Homolog of NCBI NO: 6910584 NR Description: CDS [Arabidopsis thaliana]
  misc_feature (87)..(415): Homolog of NCBI NO: 25518156 NR Description: T9L6.1 protein - Arabidopsis thaliana
  misc_feature (1)..(32): Homolog of NCBI NO: 25518156 NR Description: T9L6.1 protein - Arabidopsis thaliana
  misc_feature (1)..(266): Homolog of NCBI NO: 6910588 NR Description: CDS [Arabidopsis thaliana]
  misc_feature (271)..(381): Homolog of NCBI NO: 6910588 NR Description: CDS [Arabidopsis thaliana]
  misc_feature (1)..(421): Homolog of NCBI NO: 15238439 NR Description: putative protein; protein id: At5g65380.1, by cDNA: gi_14030730 [Arabidopsis thaliana] emb|CAB89401.1~gene_id:MNA5.11~strong similarity to unknown
MVTQAFIGHLGPTELAAYSITFTILLRFSNGILLGMAGALGTLCGQAYGAKQYQMLGIYLQRSWIVLTGGTICLMPVFIFAGPILLALGQEERIVRVARVLALWVIGINFSFVPSFTCQMFLQAQSKNKIISYVTAVSLGLHVFFSWLLVAHFNFGITGAMTSMLIAFWLPIIVQLLYVTCGGCKDTWRGFSMLAFKDLWPVLKLSLSSGGMLCLELWYNSVLVLLTGNLKNAEVALDALAICISINALEMMIALGFLAAVSVRVSNELGSGNPKGAKFATLIAVFTSLSIGIVLFFVFLFLRGRISYIFTTSEAVAAEVADLSPLLAFSILLNSVQPVLSGVAIGAGWQGYVAYVNLACYYLVGIPIGVILGYVVGLQVKGVWIGMLFGIFVQTCVLTVMTLRTDWDQQVSTSLRNINRWVVPESRDANQISSEE

SEQ ID NO: 71014 - DNA, 1485 bp, Arabidopsis thaliana
  misc_feature (1)..(1485): Ceres Seq. ID no. 3036987
  misc_feature: MA Experiment ID: 20000179 Result: Down-regulated in Transcription
  misc_feature: MA Experiment 20000179 PARAMETER Experiment Name: At_Germinating_Seeds_P Parameter: Age (hr) Value: 6 vs. 0
  misc_feature: MA Experiment 20000179 PARAMETER Experiment Name: At_Germinating_Seeds_P Parameter: Tissue Value: Germinating Seeds
  misc_feature: MA Experiment ID: 20000180 Result: Down-regulated in Transcription
  misc_feature: MA Experiment 20000180 PARAMETER Experiment Name: At_Germinating_Seeds_P Parameter: Age (hr) Value: 24 vs. 0
  misc_feature: MA Experiment 20000180 PARAMETER Experiment Name: At_Germinating_Seeds_P Parameter: Tissue Value: Germinating Seeds
  misc_feature: MA Experiment ID: 20000182 Result: Up-regulated in Transcription
  misc_feature: MA Experiment 20000182 PARAMETER Experiment Name: At_2mM_SA_P Parameter: Age (day) Value: 14
  misc_feature: MA Experiment 20000182 PARAMETER Experiment Name: At_2mM_SA_P Parameter: Organism Value: A. thaliana
  misc_feature: MA Experiment 20000182 PARAMETER Experiment Name: At_2mM_SA_P Parameter: Plant Line Value: WS
  misc_feature: MA Experiment 20000182 PARAMETER Experiment Name: At_2mM_SA_P Parameter: Timepoint (hr) Value: 6
  misc_feature: MA Experiment 20000182 PARAMETER Experiment Name: At_2mM_SA_P Parameter: Tissue Value: Aerial
  misc_feature: MA Experiment 20000182 PARAMETER Experiment Name: At_2mM_SA_P Parameter: Treatment Value: 2mM SA vs. No Treatment
  misc_feature: MA Experiment ID: 20000234 Result: Down-regulated in Transcription
  misc_feature: MA Experiment 20000234 PARAMETER Experiment Name: At_Siliques_P Parameter: Age (day) Value: 21
  misc_feature: MA Experiment 20000234 PARAMETER Experiment Name: At_Siliques_P Parameter: Organism Value: A. thaliana
  misc_feature: MA Experiment 20000234 PARAMETER Experiment Name: At_Siliques_P Parameter: Plant Line Value: WS
  misc_feature: MA Experiment 20000234 PARAMETER Experiment Name: At_Siliques_P Parameter: Tissue Value: Less Than 5mm Siliques vs. Whole Plant
  misc_feature: MA Experiment ID: 20000235 Result: Down-regulated in Transcription
  misc_feature: MA Experiment 20000235 PARAMETER Experiment Name: At_Siliques_P Parameter: Age (day) Value: 21
  misc_feature: MA Experiment 20000235 PARAMETER Experiment Name: At_Siliques_P Parameter: Organism Value: A. thaliana
  misc_feature: MA Experiment 20000235 PARAMETER Experiment Name: At_Siliques_P Parameter: Plant Line Value: WS
  misc_feature: MA Experiment 20000235 PARAMETER Experiment Name: At_Siliques_P Parameter: Tissue Value: 5-10mm Siliques vs. Whole Plant
  misc_feature: MA Experiment ID: 20000265 Result: Down-regulated in Transcription
  misc_feature: MA Experiment 20000265 PARAMETER Experiment Name: At_Open_Flower_P Parameter: Age (day) Value: 21
  misc_feature: MA Experiment 20000265 PARAMETER Experiment Name: At_Open_Flower_P Parameter: Plant Line Value: WS
  misc_feature: MA Experiment 20000265 PARAMETER Experiment Name: At_Open_Flower_P Parameter: Tissue Value: Closed Flower vs. Whole Plant
  misc_feature: MA Experiment ID: 20000286 Result: Down-regulated in Transcription
  misc_feature: MA Experiment 20000286 PARAMETER Experiment Name: At_Open_Flower_P Parameter: Age (day) Value: 21
  misc_feature: MA Experiment 20000286 PARAMETER Experiment Name: At_Open_Flower_P Parameter: Plant Line Value: WS
  misc_feature: MA Experiment 20000286 PARAMETER Experiment Name: At_Open_Flower_P Parameter: Tissue Value: Half Open vs. Whole Plant
  misc_feature: MA Experiment ID: 20000438 Result: Up-regulated in Transcription
  misc_feature: MA Experiment 20000438 PARAMETER Experiment Name: At_Shoots__P Parameter: Age (day) Value: 14
  misc_feature: MA Experiment 20000438 PARAMETER Experiment Name: At_Shoots__P Parameter: Tissue Value: Shoots vs. Whole Plant
  misc_feature: MA Experiment ID: 20000439 Result: Up-regulated in Transcription
  misc_feature: MA Experiment 20000439 PARAMETER Experiment Name: At_Roots__P Parameter: Age (day) Value: 14 vs. 21
  misc_feature: MA Experiment 20000439 PARAMETER Experiment Name: At_Roots__P Parameter: Organism Value: A. thaliana
  misc_feature: MA Experiment 20000439 PARAMETER Experiment Name: At_Roots__P Parameter: Tissue Value: Roots vs. Whole Plant
  misc_feature: MA Experiment ID: 20000441 Result: Up-regulated in Transcription
  misc_feature: MA Experiment 20000441 PARAMETER Experiment Name: At_1uM_BR-BRZ__P Parameter: Tissue Value: Shoot Apices
  misc_feature: MA Experiment 20000441 PARAMETER Experiment Name: At_1uM_BR-BRZ__P Parameter: Treatment Value: 1uM BR vs. No Treatment
  misc_feature: MA Experiment ID: 20000443 Result: Up-regulated in Transcription
  misc_feature: MA Experiment 20000443 PARAMETER Experiment Name: At_1uM_BR-BRZ__P Parameter: Tissue Value: Shoot Apices
  misc_feature: MA Experiment 20000443 PARAMETER Experiment Name: At_1uM_BR-BRZ__P Parameter: Treatment Value: 1uM BRZ vs. No Treatment
  misc_feature: MA Experiment ID: 20000496 Result: Down-regulated in Transcription
  misc_feature: MA Experiment 20000496 PARAMETER Experiment Name: At_Guard_Cells_P Parameter: Harvest Date Value: 7/19/2002
  misc_feature: MA Experiment 20000496 PARAMETER Experiment Name: At_Guard_Cells_P Parameter: Organism Value: Canola
  misc_feature: MA Experiment 20000496 PARAMETER Experiment Name: At_Guard_Cells_P Parameter: Tissue Value: Guard Cells vs. Leaves
  misc_feature: MA Experiment ID: 20000709 Result: Up-regulated in Transcription
  misc_feature: MA Experiment 20000709 PARAMETER Experiment Name: At_15mM_NH4NO3_L-to-H_P Parameter: Age (hr) Value: 14
  misc_feature: MA Experiment 20000709 PARAMETER Experiment Name: At_15mM_NH4NO3_L-to-H_P Parameter: Organism Value: A. thaliana
  misc_feature: MA Experiment 20000709 PARAMETER Experiment Name: At_15mM_NH4NO3_L-to-H_P Parameter: Plant Line Value: WS
  misc_feature: MA Experiment 20000709 PARAMETER Experiment Name: At_15mM_NH4NO3_L-to-H_P Parameter: Timepoint (hr) Value: 4
  misc_feature: MA Experiment 20000709 PARAMETER Experiment Name: At_15mM_NH4NO3_L-to-H_P Parameter: Tissue Value: Aerial
  misc_feature: MA Experiment 20000709 PARAMETER Experiment Name: At_15mM_NH4NO3_L-to-H_P Parameter: Treatment Value: 15mM NH4NO3 vs. 30mM Mannitol
  misc_feature: MA Experiment ID: 20001247 Result: Up-regulated in Transcription
  misc_feature: MA Experiment 20001247 PARAMETER Experiment Name: At_Far-red-induction_P Parameter: Age (day) Value: 7
  misc_feature: MA Experiment 20001247 PARAMETER Experiment Name: At_Far-red-induction_P Parameter: Light Value: Far-red vs. White
  misc_feature: MA Experiment 20001247 PARAMETER Experiment Name: At_Far-red-induction_P Parameter: Organism Value: A. thaliana
  misc_feature: MA Experiment 20001247 PARAMETER Experiment Name: At_Far-red-induction_P Parameter: Plant Line Value: Columbia
  misc_feature: MA Experiment 20001247 PARAMETER Experiment Name: At_Far-red-induction_P Parameter: Timepoint (hr) Value: 1
  misc_feature: MA Experiment 20001247 PARAMETER Experiment Name: At_Far-red-induction_P Parameter: Tissue Value: Whole Plant
  misc_feature: MA Experiment ID: 20001906 Result: Up-regulated in Transcription
  misc_feature: MA Experiment 20001906 PARAMETER Experiment Name: At_Drought_Reproduction_P Parameter: Age (day) Value: 35
  misc_feature: MA Experiment 20001906 PARAMETER Experiment Name: At_Drought_Reproduction_P Parameter: Organism Value: A. thaliana
  misc_feature: MA Experiment 20001906 PARAMETER Experiment Name: At_Drought_Reproduction_P Parameter: Plant Line Value: WS
  misc_feature: MA Experiment 20001906 PARAMETER Experiment Name: At_Drought_Reproduction_P Parameter: Timepoint (day) Value: 5
  misc_feature: MA Experiment 20001906 PARAMETER Experiment Name: At_Drought_Reproduction_P Parameter: Tissue Value: Siliques
  misc_feature: MA Experiment 20001906 PARAMETER Experiment Name: At_Drought_Reproduction_P Parameter: Treatment Value: Drought vs. No Drought
  misc_feature: Pfam Name: MatE Pfam Description: MatE
atggccggagaaggaggagagctcacggcggctttgttgaaaaagacgactgagaacggaggagaagaaaatgatgagttagggttgaaggaaaaagtttggattgaatcaaagaagctatgggttgtggcggcgccatcgatcttcacgaagttctctacgtacggagtttcattggtaactcaaggctttgttggccatattggcccaaccgagttggccgcttactctatcaccttcaccgttctcctccgtttcagtaatggtatcttgttaggtatggccagtgcactaggaacattatgtggtcaagcctacggagccaaacaataccatatgctcgggattcacctccaaaggtcatggatcgtccttacaggttgtaccatttgcatcatgcccatcttcatcttttcaggcccgatcctcttagccttaggtcaagaggaccacattgttcgtgtggctcgggtcatagccctatggctcatagccatcaacttcaccttcgtacccgccttcacttgccaaatattcctccaatctcagagcaagaacaagatcatcgcctacgtgtctgctgtaaccttagggctccatgttttcttctcgtggctcctagtggttcatttcaatttcgggatcactggtgcaatgacctctacgctagttgcgttctggatgcctaacattgtgcagctcttgtatgtcacatccggtgggtgtaaggatacatggagaggattcactatgttggccttcaaagatttatggcccgtcttcaaactatctttgtcttccggtggaatggtttgcttggagttatggtacaactcgatattagtattgctcactgggaatttgaaaaacgcagaggtggcgattgatgcactagcaatctgcatcaacgtaaatgcactgcagatgatgatagcacttgggtttttggcagcagtaagtgtaagagtgtccaacgagctcggtaggggaaaccccgaaggcgccaaatttgcaacaatcgtagcggttttcacgtcactctctataggattagttctattcttcgtcttcttgtttctaaggggaagaatttcgtacattttcactacaagtgaagctgtggcagccgaagtcgctgatctttctccacttttagcattttccatcctcttgaacagtgttcaacccgttctctcaggagtggcagtgggagcgggatggcaaggatatgtggcttacattaaccttgcttgctattaccttctcggaattcctgttggtcttgtccttggttacgttgttggtttgcaagtcaaaggtgtatggataggaatgctttttggaatatttgttcagacttgtgtgcttaccatcatgactctcagaacagattgggatcaacaggtatctacgtcgttgaaaaatataaaccggtgggttgtaccagaatctagagatgcaaatcaaatttcatcagaggaataa

SEQ ID NO: 71015 - protein, 494 aa, Arabidopsis thaliana
  peptide (1)..(494): Ceres Seq. ID no. 3036988
  misc_feature: Pfam Name: MatE Pfam Description: MatE
  misc_feature (1)..(494): Homolog of NCBI NO: 15223391 NR Description: hypothetical protein; protein id: At1g33090.1
  misc_feature (1)..(494): Homolog of NCBI NO: 15223402 NR Description: unknown protein; protein id: At1g33110.1, by cDNA: gi_17065359 [Arabidopsis thaliana] Unknown protein [Arabidopsis thaliana]
  misc_feature (1)..(439): Homolog of NCBI NO: 6910584 NR Description: CDS [Arabidopsis thaliana]
  misc_feature (1)..(494): Homolog of NCBI NO: 15223394 NR Description: unknown protein; protein id: At1g33100.1
  misc_feature (1)..(494): Homolog of NCBI NO: 22329916 NR Description: hypothetical protein; protein id: At1g33080.1, by cDNA: gi_19423993 [Arabidopsis thaliana] unknown protein [Arabidopsis thaliana]
  misc_feature (145)..(473): Homolog of NCBI NO: 25518156 NR Description: T9L6.1 protein - Arabidopsis thaliana
  misc_feature (1)..(90): Homolog of NCBI NO: 25518156 NR Description: T9L6.1 protein - Arabidopsis thaliana
  misc_feature (1)..(324): Homolog of NCBI NO: 6910588 NR Description: CDS [Arabidopsis thaliana]
  misc_feature (330)..(439): Homolog of NCBI NO: 6910588 NR Description: CDS [Arabidopsis thaliana]
  misc_feature (468)..(494): Homolog of NCBI NO: 6910588 NR Description: CDS [Arabidopsis thaliana]
MAGEGGELTAALLKKTTENGGEENDELGLKEKVWIESKKLWVVAAPSIFTKFSTYGVSLVTQGFVGHIGPTELAAYSITFTVLLRFSNGILLGMASALGTLCGQAYGAKQYHMLGIHLQRSWIVLTGCTICIMPIFIFSGPILLALGQEDHIVRVARVIALWLIAINFTFVPAFTCQIFLQSQSKNKIIAYVSAVTLGLHVFFSWLLVVHFNFGITGAMTSTLVAFWMPNIVQLLYVTSGGCKDTWRGFTMLAFKDLWPVFKLSLSSGGMVCLELWYNSILVLLTGNLKNAEVAIDALAICINVNALQMMIALGFLAAVSVRVSNELGRGNPEGAKFATIVAVFTSLSIGLVLFFVFLFLRGRISYIFTTSEAVAAEVADLSPLLAFSILLNSVQPVLSGVAVGAGWQGYVAYINLACYYLLGIPVGLVLGYVVGLQVKGVWIGMLFGIFVQTCVLTIMTLRTDWDQQVSTSLKNINRWVVPESRDANQISSEE

SEQ ID NO: 71016 - protein, 401 aa, Arabidopsis thaliana
  peptide (1)..(401): Ceres Seq. ID no. 3036989
  misc_feature: Pfam Name: MatE Pfam Description: MatE
  misc_feature (1)..(401): Homolog of NCBI NO: 22329916 NR Description: hypothetical protein; protein id: At1g33080.1, by cDNA: gi_19423993 [Arabidopsis thaliana] unknown protein [Arabidopsis thaliana]
  misc_feature (52)..(380): Homolog of NCBI NO: 25518156 NR Description: T9L6.1 protein - Arabidopsis thaliana
  misc_feature (1)..(231): Homolog of NCBI NO: 6910588 NR Description: CDS [Arabidopsis thaliana]
  misc_feature (237)..(346): Homolog of NCBI NO: 6910588 NR Description: CDS [Arabidopsis thaliana]
  misc_feature (375)..(401): Homolog of NCBI NO: 6910588 NR Description: CDS [Arabidopsis thaliana]
  misc_feature (1)..(386): Homolog of NCBI NO: 15238439 NR Description: putative protein; protein id: At5g65380.1, by cDNA: gi_14030730 [Arabidopsis thaliana] emb|CAB89401.1~gene_id:MNA5.11~strong similarity to unknown
  misc_feature (1)..(401): Homolog of NCBI NO: 15223391 NR Description: hypothetical protein; protein id: At1g33090.1
  misc_feature (1)..(401): Homolog of NCBI NO: 15223402 NR Description: unknown protein; protein id: At1g33110.1, by cDNA: gi_17065359 [Arabidopsis thaliana] Unknown protein [Arabidopsis thaliana]
  misc_feature (1)..(346): Homolog of NCBI NO: 6910584 NR Description: CDS [Arabidopsis thaliana]
  misc_feature (1)..(401): Homolog of NCBI NO: 15223394 NR Description: unknown protein; protein id: At1g33100.1
MASALGTLCGQAYGAKQYHMLGIHLQRSWIVLTGCTICIMPIFIFSGPILLALGQEDHIVRVARVIALWLIAINFTFVPAFTCQIFLQSQSKNKIIAYVSAVTLGLHVFFSWLLVVHFNFGITGAMTSTLVAFWMPNIVQLLYVTSGGCKDTWRGFTMLAFKDLWPVFKLSLSSGGMVCLELWYNSILVLLTGNLKNAEVAIDALAICINVNALQMMIALGFLAAVSVRVSNELGRGNPEGAKFATIVAVFTSLSIGLVLFFVFLFLRGRISYIFTTSEAVAAEVADLSPLLAFSILLNSVQPVLSGVAVGAGWQGYVAYINLACYYLLGIPVGLVLGYVVGLQVKGVWIGMLFGIFVQTCVLTIMTLRTDWDQQVSTSLKNINRWVVPESRDANQISSEE

SEQ ID NO: 71017 - protein, 382 aa, Arabidopsis thaliana
  peptide (1)..(382): Ceres Seq. ID no. 3036990
  misc_feature: Pfam Name: MatE Pfam Description: MatE
  misc_feature (1)..(382): Homolog of NCBI NO: 15223391 NR Description: hypothetical protein; protein id: At1g33090.1
  misc_feature (1)..(382): Homolog of NCBI NO: 15223402 NR Description: unknown protein; protein id: At1g33110.1, by cDNA: gi_17065359 [Arabidopsis thaliana] Unknown protein [Arabidopsis thaliana]
  misc_feature (1)..(327): Homolog of NCBI NO: 6910584 NR Description: CDS [Arabidopsis thaliana]
  misc_feature (1)..(382): Homolog of NCBI NO: 15223394 NR Description: unknown protein; protein id: At1g33100.1
  misc_feature (1)..(382): Homolog of NCBI NO: 22329916 NR Description: hypothetical protein; protein id: At1g33080.1, by cDNA: gi_19423993 [Arabidopsis thaliana] unknown protein [Arabidopsis thaliana]
  misc_feature (33)..(361): Homolog of NCBI NO: 25518156 NR Description: T9L6.1 protein - Arabidopsis thaliana
  misc_feature (1)..(212): Homolog of NCBI NO: 6910588 NR Description: CDS [Arabidopsis thaliana]
  misc_feature (218)..(327): Homolog of NCBI NO: 6910588 NR Description: CDS [Arabidopsis thaliana]
  misc_feature (356)..(382): Homolog of NCBI NO: 6910588 NR Description: CDS [Arabidopsis thaliana]
  misc_feature (1)..(367): Homolog of NCBI NO: 15238439 NR Description: putative protein; protein id: At5g65380.1, by cDNA: gi_14030730 [Arabidopsis thaliana] emb|CAB89401.1~gene_id:MNA5.11~strong similarity to unknown
MLGIHLQRSWIVLTGCTICIMPIFIFSGPILLALGQEDHIVRVARVIALWLIAINFTFVPAFTCQIFLQSQSKNKIIAYVSAVTLGLHVFFSWLLVVHFNFGITGAMTSTLVAFWMPNIVQLLYVTSGGCKDTWRGFTMLAFKDLWPVFKLSLSSGGMVCLELWYNSILVLLTGNLKNAEVAIDALAICINVNALQMMIALGFLAAVSVRVSNELGRGNPEGAKFATIVAVFTSLSIGLVLFFVFLFLRGRISYIFTTSEAVAAEVADLSPLLAFSILLNSVQPVLSGVAVGAGWQGYVAYINLACYYLLGIPVGLVLGYVVGLQVKGVWIGMLFGIFVQTCVLTIMTLRTDWDQQVSTSLKNINRWVVPESRDANQISSEE

SEQ ID NO: 71018 - DNA, 1548 bp, Arabidopsis thaliana
  misc_feature (1)..(1548): Ceres Seq. ID no. 3037975
  misc_feature: MA Experiment ID: 20000182 Result: Up-regulated in Transcription
  misc_feature: MA Experiment 20000182 PARAMETER Experiment Name: At_2mM_SA_P Parameter: Age (day) Value: 14
  misc_feature: MA Experiment 20000182 PARAMETER Experiment Name: At_2mM_SA_P Parameter: Organism Value: A. thaliana
  misc_feature: MA Experiment 20000182 PARAMETER Experiment Name: At_2mM_SA_P Parameter: Plant Line Value: WS
  misc_feature: MA Experiment 20000182 PARAMETER Experiment Name: At_2mM_SA_P Parameter: Timepoint (hr) Value: 6
  misc_feature: MA Experiment 20000182 PARAMETER Experiment Name: At_2mM_SA_P Parameter: Tissue Value: Aerial
  misc_feature: MA Experiment 20000182 PARAMETER Experiment Name: At_2mM_SA_P Parameter: Treatment Value: 2mM SA vs. No Treatment
  misc_feature: MA Experiment ID: 20000184 Result: Down-regulated in Transcription
  misc_feature: MA Experiment 20000184 PARAMETER Experiment Name: At_Shoots__P Parameter: Age (day) Value: 7
  misc_feature: MA Experiment 20000184 PARAMETER Experiment Name: At_Shoots__P Parameter: Tissue Value: Shoots vs. Whole Plant
  misc_feature: MA Experiment ID: 20000234 Result: Down-regulated in Transcription
  misc_feature: MA Experiment 20000234 PARAMETER Experiment Name: At_Siliques_P Parameter: Age (day) Value: 21
  misc_feature: MA Experiment 20000234 PARAMETER Experiment Name: At_Siliques_P Parameter: Organism Value: A. thaliana
  misc_feature: MA Experiment 20000234 PARAMETER Experiment Name: At_Siliques_P Parameter: Plant Line Value: WS
  misc_feature: MA Experiment 20000234 PARAMETER Experiment Name: At_Siliques_P Parameter: Tissue Value: Less Than 5mm Siliques vs. Whole Plant
  misc_feature: MA Experiment ID: 20000235 Result: Down-regulated in Transcription
  misc_feature: MA Experiment 20000235 PARAMETER Experiment Name: At_Siliques_P Parameter: Age (day) Value: 21
  misc_feature: MA Experiment 20000235 PARAMETER Experiment Name: At_Siliques_P Parameter: Organism Value: A. thaliana
  misc_feature: MA Experiment 20000235 PARAMETER Experiment Name: At_Siliques_P Parameter: Plant Line Value: WS
  misc_feature: MA Experiment 20000235 PARAMETER Experiment Name: At_Siliques_P Parameter: Tissue Value: 5-10mm Siliques vs. Whole Plant
  misc_feature: MA Experiment ID: 20000265 Result: Down-regulated in Transcription
  misc_feature: MA Experiment 20000265 PARAMETER Experiment Name: At_Open_Flower_P Parameter: Age (day) Value: 21
  misc_feature: MA Experiment 20000265 PARAMETER Experiment Name: At_Open_Flower_P Parameter: Plant Line Value: WS
  misc_feature: MA Experiment 20000265 PARAMETER Experiment Name: At_Open_Flower_P Parameter: Tissue Value: Closed Flower vs. Whole Plant
  misc_feature: MA Experiment ID: 20000437 Result: Up-regulated in Transcription
  misc_feature: MA Experiment 20000437 PARAMETER Experiment Name: At_Drought_P Parameter: Age (day) Value: 8
  misc_feature: MA Experiment 20000437 PARAMETER Experiment Name: At_Drought_P Parameter: Organism Value: A. thaliana
  misc_feature: MA Experiment 20000437 PARAMETER Experiment Name: At_Drought_P Parameter: Plant Line Value: WS
  misc_feature: MA Experiment 20000437 PARAMETER Experiment Name: At_Drought_P Parameter: Timepoint (hr) Value: 24
  misc_feature: MA Experiment 20000437 PARAMETER Experiment Name: At_Drought_P Parameter: Tissue Value: Whole Plant
  misc_feature: MA Experiment 20000437 PARAMETER Experiment Name: At_Drought_P Parameter: Treatment Value: Drought vs. No Drought
  misc_feature: MA Experiment ID: 20000438 Result: Down-regulated in Transcription
  misc_feature: MA Experiment 20000438 PARAMETER Experiment Name: At_Shoots__P Parameter: Age (day) Value: 14
  misc_feature: MA Experiment 20000438 PARAMETER Experiment Name: At_Shoots__P Parameter: Tissue Value: Shoots vs. Whole Plant
  misc_feature: MA Experiment ID: 20000460 Result: Up-regulated in Transcription
  misc_feature: MA Experiment 20000460 PARAMETER Experiment Name: At_10percent_PEG_P Parameter: Age (day) Value: 12
  misc_feature: MA Experiment 20000460 PARAMETER Experiment Name: At_10percent_PEG_P Parameter: Organism Value: A. thaliana
  misc_feature: MA Experiment 20000460 PARAMETER Experiment Name: At_10percent_PEG_P Parameter: Plant Line Value: WS
  misc_feature: MA Experiment 20000460 PARAMETER Experiment Name: At_10percent_PEG_P Parameter: Timepoint (day) Value: 12
  misc_feature: MA Experiment 20000460 PARAMETER Experiment Name: At_10percent_PEG_P Parameter: Tissue Value: Whole Plant
  misc_feature: MA Experiment 20000460 PARAMETER Experiment Name: At_10percent_PEG_P Parameter: Treatment Value: 10percent PEG vs. No Treatment
atggatggagaggttacttcttggattaggagagcaaatttctctcatactgtttgttatcgtatgattacgccgagtttagaatctatgccttttactgtaaaccaagagaagagttctggattgaaaagaatgactttgagttcaccatctgatttgaaatcacttgtaggaatttgtcagagtacgcagcagctgactggtttgagttgtggtagtgttgttggtactgaagtgcagaggaatccagttactaataagaagagatctgtttctccgttgcctcatatggctctttctgatgcttttatcgaagcaaagtctgatattaagaggttttctactccacatcctagaagagtggaaccagagaagggaatgaaggccaagtcgtcgtcccgcaaagattcttctgagaaaaaatcagttaatctacggtccctgtctcactcgggtcctattagggatcttagtacgcagaaagttaaagagaggggaaagagcaagatagataagaagtcttcaaagtctgttgactatagaggttctaaagtaagttctgcaggagtgcttgaagaatgcctcattgatgtgtctaagttgtcttatggggataggtttgctcacgggaaatatagccagatttatcatggtgaatatgaaggcaaagctgttgctctgaagattatcacagcgcctgaggatagtgacgacatattcttgggagctcgtttagaaaaagagtttatcgtggaagccactcttttatctcgactaagccatccaaatgtcgttaagtttgttggagtgaatactggaaactgtatcatcacagagtatgtacctcgagggtctttaagatcatatctgcacaagctcgagcagaaatcccttcctttggaacagctaatcgattttggtctggatattgctaaaggaatggaatatattcactcaagagagatagttcatcaggatctgaagccagaaaacgtgttgatcgacaatgactttcacttgaagattgctgactttggcatagcgtgcgaggaggagtactgtgatgttttgggggataacataggaacttataggtggatggcacctgaagttttaaaacggataccacatggacggaagtgcgatgtttatagttttggacttcttttatgggaaatggtagctggagcacttccatatgaggagatgaaatttgctgaacaaattgcctacgcagttatatacaagaaaattaggccagttataccgacggattgtccagcggccatgaaagagctgatcgagcgatgttggtcatcgcaaacagacaagagaccggaattctggcagattgtcaaagtgttggaacatttcaagaagtctctaacaagcgaaggaaaacttaatcttttacctagccagatctgtccagaactaaagaaatgtcctaaattctggattcatatattcggatcattccaccaccacagcagcggtggcggcagcagcagcaacaactcagccttacctaagcctaaattcgcttga

SEQ ID NO: 71019 - protein, 515 aa, Arabidopsis thaliana
  peptide (1)..(515): Ceres Seq. ID no. 3037976
  misc_feature (78)..(515): Homolog of NCBI NO: 15232680 NR Description: protein kinase 6-like protein; protein id: [Arabidopsis thaliana] >gi|7446378|pir||T12955 probable protein
  misc_feature (1)..(515): Homolog of NCBI NO: 18424175 NR Description: protein kinase 6 - like; protein id: At5g58950.1, by cDNA: gi_18087632, supported by cDNA: gi_20260119 [Arabidopsis
  misc_feature (1)..(515): Homolog of NCBI NO: 18087633 NR Description: AT5g58950/k19m22_150 [Arabidopsis thaliana]
  misc_feature (84)..(513): Homolog of NCBI NO: 10241603 NR Description: protein kinase (PK) [Fagus sylvatica]
  misc_feature (77)..(514): Homolog of NCBI NO: 478809 NR Description: protein kinase 6 (EC 2.7.1.-) - soybean
  misc_feature (111)..(499): Homolog of NCBI NO: 34909474 NR Description: putative protein kinase [Oryza sativa (japonica group)] >gi|14209526|dbj|BAB56022.1| putative protein kinase
  misc_feature (87)..(120): Homolog of NCBI NO: 34909474 NR Description: putative protein kinase [Oryza sativa (japonica group)] >gi|14209526|dbj|BAB56022.1| putative protein kinase
  misc_feature (27)..(487): Homolog of NCBI NO: 34903666 NR Description: putative protein kinase [Oryza sativa (japonica group)] >gi|20804523|dbj|BAB92217.1| putative protein kinase
  misc_feature (304)..(513): Homolog of NCBI NO: 2168137 NR Description: PKF1 [Fagus sylvatica]
  misc_feature (167)..(482): Homolog of NCBI NO: 7488256 NR Description: protein kinase homolog F24O1.13 - Arabidopsis
MDGEVTSWIRRANFSHTVCYRMITPSLESMPFTVNQEKSSGLKRMTLSSPSDLKSLVGICQSTQQLTGLSCGSVVGTEVQRNPVTNKKRSVSPLPHMALSDAFIEAKSDIKRFSTPHPRRVEPEKGMKAKSSSRKDSSEKKSVNLRSLSHSGPIRDLSTQKVKERGKSKIDKKSSKSVDYRGSKVSSAGVLEECLIDVSKLSYGDRFAHGKYSQIYHGEYEGKAVALKIITAPEDSDDIFLGARLEKEFIVEATLLSRLSHPNVVKFVGVNTGNCIITEYVPRGSLRSYLHKLEQKSLPLEQLIDFGLDIAKGMEYIHSREIVHQDLKPENVLIDNDFHLKIADFGIACEEEYCDVLGDNIGTYRWMAPEVLKRIPHGRKCDVYSFGLLLWEMVAGALPYEEMKFAEQIAYAVIYKKIRPVIPTDCPAAMKELIERCWSSQTDKRPEFWQIVKVLEHFKKSLTSEGKLNLLPSQICPELKKCPKFWIHIFGSFHHHSSGGGSSSNNSALPKPKFA

SEQ ID NO: 71020 - protein, 494 aa, Arabidopsis thaliana
  peptide (1)..(494): Ceres Seq. ID no. 3037977
  misc_feature (57)..(494): Homolog of NCBI NO: 15232680 NR Description: protein kinase 6-like protein; protein id: [Arabidopsis thaliana] >gi|7446378|pir||T12955 probable protein
  misc_feature (1)..(494): Homolog of NCBI NO: 18424175 NR Description: protein kinase 6 - like; protein id: At5g58950.1, by cDNA: gi_18087632, supported by cDNA: gi_20260119 [Arabidopsis
  misc_feature (1)..(494): Homolog of NCBI NO: 18087633 NR Description: AT5g58950/k19m22_150 [Arabidopsis thaliana]
  misc_feature (63)..(492): Homolog of NCBI NO: 10241603 NR Description: protein kinase (PK) [Fagus sylvatica]
  misc_feature (56)..(493): Homolog of NCBI NO: 478809 NR Description: protein kinase 6 (EC 2.7.1.-) - soybean
  misc_feature (90)..(478): Homolog of NCBI NO: 34909474 NR Description: putative protein kinase [Oryza sativa (japonica group)] >gi|14209526|dbj|BAB56022.1| putative protein kinase
  misc_feature (66)..(99): Homolog of NCBI NO: 34909474 NR Description: putative protein kinase [Oryza sativa (japonica group)] >gi|14209526|dbj|BAB56022.1| putative protein kinase
  misc_feature (6)..(466): Homolog of NCBI NO: 34903666 NR Description: putative protein kinase [Oryza sativa (japonica group)] >gi|20804523|dbj|BAB92217.1| putative protein kinase
  misc_feature (283)..(492): Homolog of NCBI NO: 2168137 NR Description: PKF1 [Fagus sylvatica]
  misc_feature (146)..(461): Homolog of NCBI NO: 7488256 NR Description: protein kinase homolog F24O1.13 - Arabidopsis
MITPSLESMPFTVNQEKSSGLKRMTLSSPSDLKSLVGICQSTQQLTGLSCGSVVGTEVQRNPVTNKKRSVSPLPHMALSDAFIEAKSDIKRFSTPHPRRVEPEKGMKAKSSSRKDSSEKKSVNLRSLSHSGPIRDLSTQKVKERGKSKIDKKSSKSVDYRGSKVSSAGVLEECLIDVSKLSYGDRFAHGKYSQIYHGEYEGKAVALKIITAPEDSDDIFLGARLEKEFIVEATLLSRLSHPNVVKFVGVNTGNCIITEYVPRGSLRSYLHKLEQKSLPLEQLIDFGLDIAKGMEYIHSREIVHQDLKPENVLIDNDFHLKIADFGIACEEEYCDVLGDNIGTYRWMAPEVLKRIPHGRKCDVYSFGLLLWEMVAGALPYEEMKFAEQIAYAVIYKKIRPVIPTDCPAAMKELIERCWSSQTDKRPEFWQIVKVLEHFKKSLTSEGKLNLLPSQICPELKKCPKFWIHIFGSFHHHSSGGGSSSNNSALPKPKFA

SEQ ID NO: 71021 - protein, 486 aa, Arabidopsis thaliana
  peptide (1)..(486): Ceres Seq. ID no. 3037978
  misc_feature (49)..(486): Homolog of NCBI NO: 15232680 NR Description: protein kinase 6-like protein; protein id: [Arabidopsis thaliana] >gi|7446378|pir||T12955 probable protein
  misc_feature (1)..(486): Homolog of NCBI NO: 18424175 NR Description: protein kinase 6 - like; protein id: At5g58950.1, by cDNA: gi_18087632, supported by cDNA: gi_20260119 [Arabidopsis
  misc_feature (1)..(486): Homolog of NCBI NO: 18087633 NR Description: AT5g58950/k19m22_150 [Arabidopsis thaliana]
  misc_feature (55)..(484): Homolog of NCBI NO: 10241603 NR Description: protein kinase (PK) [Fagus sylvatica]
  misc_feature (48)..(485): Homolog of NCBI NO: 478809 NR Description: protein kinase 6 (EC 2.7.1.-) - soybean
  misc_feature (82)..(470): Homolog of NCBI NO: 34909474 NR Description: putative protein kinase [Oryza sativa (japonica group)] >gi|14209526|dbj|BAB56022.1| putative protein kinase
  misc_feature (58)..(91): Homolog of NCBI NO: 34909474 NR Description: putative protein kinase [Oryza sativa (japonica group)] >gi|14209526|dbj|BAB56022.1| putative protein kinase
  misc_feature (1)..(458): Homolog of NCBI NO: 34903666 NR Description: putative protein kinase [Oryza sativa (japonica group)] >gi|20804523|dbj|BAB92217.1| putative protein kinase
  misc_feature (275)..(484): Homolog of NCBI NO: 2168137 NR Description: PKF1 [Fagus sylvatica]
  misc_feature (138)..(453): Homolog of NCBI NO: 7488256 NR Description: protein kinase homolog F24O1.13 - Arabidopsis
MPFTVNQEKSSGLKRMTLSSPSDLKSLVGICQSTQQLTGLSCGSVVGTEVQRNPVTNKKRSVSPLPHMALSDAFIEAKSDIKRFSTPHPRRVEPEKGMKAKSSSRKDSSEKKSVNLRSLSHSGPIRDLSTQKVKERGKSKIDKKSSKSVDYRGSKVSSAGVLEECLIDVSKLSYGDRFAHGKYSQIYHGEYEGKAVALKIITAPEDSDDIFLGARLEKEFIVEATLLSRLSHPNVVKFVGVNTGNCIITEYVPRGSLRSYLHKLEQKSLPLEQLIDFGLDIAKGMEYIHSREIVHQDLKPENVLIDNDFHLKIADFGIACEEEYCDVLGDNIGTYRWMAPEVLKRIPHGRKCDVYSFGLLLWEMVAGALPYEEMKFAEQIAYAVIYKKIRPVIPTDCPAAMKELIERCWSSQTDKRPEFWQIVKVLEHFKKSLTSEGKLNLLPSQICPELKKCPKFWIHIFGSFHHHSSGGGSSSNNSALPKPKFA

SEQ ID NO: 71022 - DNA, 1611 bp, Arabidopsis thaliana
  misc_feature (1)..(1611): Ceres Seq. ID no. 3038306
  misc_feature: MA Experiment ID: 20000314 Result: Down-regulated in Transcription
  misc_feature: MA Experiment 20000314 PARAMETER Experiment Name: At_14day_Shoots-Roots_Sub_P Parameter: Age (day) Value: 14
  misc_feature: MA Experiment 20000314 PARAMETER Experiment Name: At_14day_Shoots-Roots_Sub_P Parameter: Organism Value: A. thaliana
  misc_feature: MA Experiment 20000314 PARAMETER Experiment Name: At_14day_Shoots-Roots_Sub_P Parameter: Plant Line Value: WS
  misc_feature: MA Experiment 20000314 PARAMETER Experiment Name: At_14day_Shoots-Roots_Sub_P Parameter: Tissue Value: Roots vs. Whole Plant
  misc_feature: MA Experiment ID: 20000315 Result: Down-regulated in Transcription
  misc_feature: MA Experiment 20000315 PARAMETER Experiment Name: At_14day_Shoots-Roots_Sub_P Parameter: Age (day) Value: 14
  misc_feature: MA Experiment 20000315 PARAMETER Experiment Name: At_14day_Shoots-Roots_Sub_P Parameter: Organism Value: A. thaliana
  misc_feature: MA Experiment 20000315 PARAMETER Experiment Name: At_14day_Shoots-Roots_Sub_P Parameter: Plant Line Value: WS
  misc_feature: MA Experiment 20000315 PARAMETER Experiment Name: At_14day_Shoots-Roots_Sub_P Parameter: Tissue Value: Shoots vs. Whole Plant
  misc_feature: MA Experiment ID: 20000328 Result: Down-regulated in Transcription
  misc_feature: MA Experiment 20000328 PARAMETER Experiment Name: At_42deg_Heat_Sub_P Parameter: Age (day) Value: 14
  misc_feature: MA Experiment 20000328 PARAMETER Experiment Name: At_42deg_Heat_Sub_P Parameter: Organism Value: A. thaliana
  misc_feature: MA Experiment 20000328 PARAMETER Experiment Name: At_42deg_Heat_Sub_P Parameter: Plant Line Value: WS
  misc_feature: MA Experiment 20000328 PARAMETER Experiment Name: At_42deg_Heat_Sub_P Parameter: Temperature (deg C) Value: 42 vs. 22
  misc_feature: MA Experiment 20000328 PARAMETER Experiment Name: At_42deg_Heat_Sub_P Parameter: Timepoint (hr) Value: 6
  misc_feature: MA Experiment 20000328 PARAMETER Experiment Name: At_42deg_Heat_Sub_P Parameter: Tissue Value: Aerial
  misc_feature: MA Experiment ID: 20000347 Result: Up-regulated in Transcription
  misc_feature: MA Experiment 20000347 PARAMETER Experiment Name: At_2mM_SA_Sub_P Parameter: Age (day) Value: 14
  misc_feature: MA Experiment 20000347 PARAMETER Experiment Name: At_2mM_SA_Sub_P Parameter: Organism Value: A. thaliana
  misc_feature: MA Experiment 20000347 PARAMETER Experiment Name: At_2mM_SA_Sub_P Parameter: Plant Line Value: WS
  misc_feature: MA Experiment 20000347 PARAMETER Experiment Name: At_2mM_SA_Sub_P Parameter: Timepoint (hr) Value: 6
  misc_feature: MA Experiment 20000347 PARAMETER Experiment Name: At_2mM_SA_Sub_P Parameter: Tissue Value: Aerial
  misc_feature: MA Experiment 20000347 PARAMETER Experiment Name: At_2mM_SA_Sub_P Parameter: Treatment Value: 2mM SA vs. No Treatment
  misc_feature: MA Experiment ID: 20000440 Result: Down-regulated in Transcription
  misc_feature: MA Experiment 20000440 PARAMETER Experiment Name: At_Closed-Flower__Sub_P Parameter: Tissue Value: Closed Flower vs. Whole Plant
atgagagagaacacacaagtggctcaattcacagaagatcatcaccagagacatcaaaccccaataacttgtttaagctctaaactagcaaagatatggacattgttcaccaccaaaatcttcatcttcgtcctcttcatcatcctccttagtgcttctgtctcttggatgtatgcgtttgttttaggtgagaataaattccaagtgacatcaatattcacaagaaacaccaaaaaaagcactcccacaaaaacaacaacaactacagatatccccaagatcgccatcaagatcccattaaactgcacatcactcaacagcaacacaacacaaacatgtccttcaaattacccaaccaagttcgaaccagcgatctcttcctcggagacatgtcctgactacttcaagtggatccaccgagacttaaaggtatggcaaaagacagggatcacaagggaaacactagagagagcaagaccaaatgctcacttcaggatagtgataaagtcagggagattgtacgttcatcaatacgagaaagcatttcagacaagagatgtgttcacaatctggggaatacttcagcttctaaggatgtatcctggtcaaatccctgaccttgagcttctcttcctctgccatgatagacccgccatttggaaaagagacttgaagaaaaaacgaaaggatacgtggcctcctccgccgttgtttcactactgtggtcaccgtgatgcatacgacatagttttccctgattggagcttctggggatggcctgagctgaatataaaggagtggaataaattatctgtggcactaaaagaagggaacaaaaaggtgaaatgggaagatagagttccgtacgcttattggaaaggaaaccctcatgtttctcctataagaggagatcttatgagatgtaacttctccgacaagtatgatcctatggttcgtctctatgtccaggattggaggagtgagatagaggcagggttcagaggatcgaacctagaagatcaatgtactcatagatataagatctacatagaaggaaacgcatggtcggtgagcgaaaagtatatactttcgtgtgatagtatgactctgttggttaaaccagagtactacgactttttcttccgaagtatggtcccaatgaagcatttttggcctattagacaaaacaacaaatgtggtgacctcaaatttgcagtcgaatggggcaacaacaacaccgaaaaggcacaaatcatagggagacaaggaagtgagtacatgatgaagaacctaaagatgaagtatgtgtatgattacatgttgtatgtgttacaaggctatgggaaattgatgaagttggatgtgacagtgcctgaaaatgccacggaggtttgttcagagacgatggcttgttcgattactgatggtggacggatcaggcagtgcatggacgactcgttggttatgtctccgagtgtcaaggcggcttgtgatttgccaccttcttatggagactatgagctcaagaagtttcgtaagaaacaagaaagtgcggagagaaaggttgagcagtggaccaataagtattggaacttgagagatccaaaataa

SEQ ID NO: 71023 - protein, 536 aa, Arabidopsis thaliana
  peptide (1)..(536): Ceres Seq. ID no. 3038307
  misc_feature (199)..(531): Pfam Name: Arabidopsis thaliana protein of unknown function Pfam Description: Arabidopsis thaliana protein of unknown
  misc_feature (85)..(534): Homolog of NCBI NO: 15233074 NR Description: putative protein; protein id: At3g61290.1
  misc_feature (199)..(536): Homolog of NCBI NO: 15233072 NR Description: putative protein; protein id: At3g61280.1
  misc_feature (13)..(302): Homolog of NCBI NO: 15225901 NR Description: hypothetical protein; protein id: At2g45840.1
  misc_feature (408)..(530): Homolog of NCBI NO: 15225901 NR Description: hypothetical protein; protein id: At2g45840.1
  misc_feature (40)..(530): Homolog of NCBI NO: 15229061 NR Description: putative protein; protein id: At3g48980.1
  misc_feature (199)..(530): Homolog of NCBI NO: 30267795 NR Description: hypothetical protein [Arabidopsis thaliana]
  misc_feature (42)..(531): Homolog of NCBI NO: 15237842 NR Description: putative protein; protein id: At5g23850.1 thaliana] >gi|10176852|dbj|BAB10058.1| contains similarity to
  misc_feature (85)..(531): Homolog of NCBI NO: 7486461 NR Description: hypothetical protein At2g45830 [imported] - thaliana >gi|3386611|gb|AAC28541.1| unknown protein [Arabidopsis
  misc_feature (84)..(532): Homolog of NCBI NO: 15233070 NR Description: putative protein; protein id: At3g61270.1
  misc_feature (100)..(530): Homolog of NCBI NO: 15222413 NR Description: hypothetical protein; protein id: At1g63420.1
MRENTQVAQFTEDHHQRHQTPITCLSSKLAKIWTLFTTKIFIFVLFIILLSASVSWMYAFVLGENKFQVTSIFTRNTKKSTPTKTTTTTDIPKIAIKIPLNCTSLNSNTTQTCPSNYPTKFEPAISSSETCPDYFKWIHRDLKVWQKTGITRETLERARPNAHFRIVIKSGRLYVHQYEKAFQTRDVFTIWGILQLLRMYPGQIPDLELLFLCHDRPAIWKRDLKKKRKDTWPPPPLFHYCGHRDAYDIVFPDWSFWGWPELNIKEWNKLSVALKEGNKKVKWEDRVPYAYWKGNPHVSPIRGDLMRCNFSDKYDPMVRLYVQDWRSEIEAGFRGSNLEDQCTHRYKIYIEGNAWSVSEKYILSCDSMTLLVKPEYYDFFFRSMVPMKHFWPIRQNNKCGDLKFAVEWGNNNTEKAQIIGRQGSEYMMKNLKMKYVYDYMLYVLQGYGKLMKLDVTVPENATEVCSETMACSITDGGRIRQCMDDSLVMSPSVKAACDLPPSYGDYELKKFRKKQESAERKVEQWTNKYWNLRDPK

SEQ ID NO: 71024 - protein, 480 aa, Arabidopsis thaliana
  peptide (1)..(480): Ceres Seq. ID no. 3038308
  misc_feature (143)..(475): Pfam Name: Arabidopsis thaliana protein of unknown function Pfam Description: Arabidopsis thaliana protein of unknown
  misc_feature (29)..(478): Homolog of NCBI NO: 15233074 NR Description: putative protein; protein id: At3g61290.1
  misc_feature (143)..(480): Homolog of NCBI NO: 15233072 NR Description: putative protein; protein id: At3g61280.1
  misc_feature (1)..(246): Homolog of NCBI NO: 15225901 NR Description: hypothetical protein; protein id: At2g45840.1
  misc_feature (352)..(474): Homolog of NCBI NO: 15225901 NR Description: hypothetical protein; protein id: At2g45840.1
  misc_feature (1)..(474): Homolog of NCBI NO: 15229061 NR Description: putative protein; protein id: At3g48980.1
  misc_feature (143)..(474): Homolog of NCBI NO: 30267795 NR Description: hypothetical protein [Arabidopsis thaliana]
  misc_feature (1)..(475): Homolog of NCBI NO: 15237842 NR Description: putative protein; protein id: At5g23850.1 thaliana] >gi|10176852|dbj|BAB10058.1| contains similarity to
  misc_feature (29)..(475): Homolog of NCBI NO: 7486461 NR Description: hypothetical protein At2g45830 [imported] - thaliana >gi|3386611|gb|AAC28541.1| unknown protein [Arabidopsis
  misc_feature (28)..(476): Homolog of NCBI NO: 15233070 NR Description: putative protein; protein id: At3g61270.1
  misc_feature (44)..(474): Homolog of NCBI NO: 15222413 NR Description: hypothetical protein; protein id: At1g63420.1
MYAFVLGENKFQVTSIFTRNTKKSTPTKTTTTTDIPKIAIKIPLNCTSLNSNTTQTCPSNYPTKFEPAISSSETCPDYFKWIHRDLKVWQKTGITRETLERARPNAHFRIVIKSGRLYVHQYEKAFQTRDVFTIWGILQLLRMYPGQIPDLELLFLCHDRPAIWKRDLKKKRKDTWPPPPLFHYCGHRDAYDIVFPDWSFWGWPELNIKEWNKLSVALKEGNKKVKWEDRVPYAYWKGNPHVSPIRGDLMRCNFSDKYDPMVRLYVQDWRSEIEAGFRGSNLEDQCTHRYKIYIEGNAWSVSEKYILSCDSMTLLVKPEYYDFFFRSMVPMKHFWPIRQNNKCGDLKFAVEWGNNNTEKAQIIGRQGSEYMMKNLKMKYVYDYMLYVLQGYGKLMKLDVTVPENATEVCSETMACSITDGGRIRQCMDDSLVMSPSVKAACDLPPSYGDYELKKFRKKQESAERKVEQWTNKYWNLRDPK

SEQ ID NO: 71025 - protein, 338 aa, Arabidopsis thaliana
  peptide (1)..(338): Ceres Seq. ID no. 3038309
  misc_feature (1)..(333): Pfam Name: Arabidopsis thaliana protein of unknown function Pfam Description: Arabidopsis thaliana protein of unknown
  misc_feature (1)..(336): Homolog of NCBI NO: 15233074 NR Description: putative protein; protein id: At3g61290.1
  misc_feature (1)..(338): Homolog of NCBI NO: 15233072 NR Description: putative protein; protein id: At3g61280.1
  misc_feature (1)..(104): Homolog of NCBI NO: 15225901 NR Description: hypothetical protein; protein id: At2g45840.1
  misc_feature (210)..(332): Homolog of NCBI NO: 15225901 NR Description: hypothetical protein; protein id: At2g45840.1
  misc_feature (1)..(332): Homolog of NCBI NO: 15229061 NR Description: putative protein; protein id: At3g48980.1
  misc_feature (1)..(332): Homolog of NCBI NO: 30267795 NR Description: hypothetical protein [Arabidopsis thaliana]
  misc_feature (1)..(333): Homolog of NCBI NO: 15237842 NR Description: putative protein; protein id: At5g23850.1 thaliana] >gi|10176852|dbj|BAB10058.1| contains similarity to
  misc_feature (1)..(333): Homolog of NCBI NO: 7486461 NR Description: hypothetical protein At2g45830 [imported] - thaliana >gi|3386611|gb|AAC28541.1| unknown protein [Arabidopsis
  misc_feature (1)..(334): Homolog of NCBI NO: 15233070 NR Description: putative protein; protein id: At3g61270.1
  misc_feature (1)..(332): Homolog of NCBI NO: 15222413 NR Description: hypothetical protein; protein id: At1g63420.1
MYPGQIPDLELLFLCHDRPAIWKRDLKKKRKDTWPPPPLFHYCGHRDAYDIVFPDWSFWGWPELNIKEWNKLSVALKEGNKKVKWEDRVPYAYWKGNPHVSPIRGDLMRCNFSDKYDPMVRLYVQDWRSEIEAGFRGSNLEDQCTHRYKIYIEGNAWSVSEKYILSCDSMTLLVKPEYYDFFFRSMVPMKHFWPIRQNNKCGDLKFAVEWGNNNTEKAQIIGRQGSEYMMKNLKMKYVYDYMLYVLQGYGKLMKLDVTVPENATEVCSETMACSITDGGRIRQCMDDSLVMSPSVKAACDLPPSYGDYELKKFRKKQESAERKVEQWTNKYWNLRDPK

SEQ ID NO: 71026 - DNA, 1353 bp, Arabidopsis thaliana
  misc_feature (1)..(1353): Ceres Seq. ID no. 3038950
  misc_feature: MA Experiment ID: 20000265 Result: Up-regulated in Transcription
  misc_feature: MA Experiment 20000265 PARAMETER Experiment Name: At_Open_Flower_P Parameter: Age (day) Value: 21
  misc_feature: MA Experiment 20000265 PARAMETER Experiment Name: At_Open_Flower_P Parameter: Plant Line Value: WS
  misc_feature: MA Experiment 20000265 PARAMETER Experiment Name: At_Open_Flower_P Parameter: Tissue Value: Closed Flower vs. Whole Plant
  misc_feature: MA Experiment ID: 20000286 Result: Up-regulated in Transcription
  misc_feature: MA Experiment 20000286 PARAMETER Experiment Name: At_Open_Flower_P Parameter: Age (day) Value: 21
  misc_feature: MA Experiment 20000286 PARAMETER Experiment Name: At_Open_Flower_P Parameter: Plant Line Value: WS
  misc_feature: MA Experiment 20000286 PARAMETER Experiment Name: At_Open_Flower_P Parameter: Tissue Value: Half Open vs. Whole Plant
atgccaaaataccttgatcagaatgacgaggagaacaaaggaagatcaacggacaataacaatcaccgtcaaatggattacaacgattggttaccagtcacagcgtctagagaagccaaatggtattactccgccttccacaatgtcacggccatggttggcgccggagttcttggtctccctttcgccatgtcacaacttggctggggacctggacttgttgctataataatgtcatgggctataacgttctactcgttatggcaaatggtacagttgcacgaagccgttccagggaaacggttggaccgttaccccgagctagggcaagaagcttttggaccaaaactaggttactggatcgtcatgccgcaacagcttcttgtccaaatcgcttccgacatagtctacaacgtgacaggaggaaaatctctcaagaaatttgtcgagcttctatttccgaatctcgaacatatccgtcagacttattacatccttggattcgccgcgcttcagcttgtcctctctcaatctcctgatttcaactccatcaagatcgtctctctcctcgccgccctcatgtctttcctttactcaatgatagcttcggtggcgtcaatagcaaaaggaacggaacaccgtccttcaacttacggagtcaggggagacacggtggcctcaatggtctttgatgcatttaacggcattggaaccatagcgtttgcgtttgcaggacacagtgtggttcttgagatccaagcaactattccttcaacacctgaagtgccttccaagaaaccaatgtggaaaggagttgttgtagcttacataatcgtcatcatttgttacctttttgtggctatctccggctattgggcgtttggggctcatgttgaggatgatgttctcatttccttagagagaccagcttggcttatagcggctgctaacttcatggtttttatccatgtcataggaagttatcaggtttttgcgatgattgtgtttgacacgatcgagtcttatcttgtgaaaacactgaaattcactccttcaacaacactgcgtctagtcgcacgtagtacatatgttgcattgatttgtcttgtagcagtttgtatcccctttttcggaggtcttttagggttcttcggcggtcttgtcttctcatcaacctcgtacttcttgccttgcattatatggttgataatgaagcgaccaaaaagatttagcgcccattggtggtgttcttgggtagcaatagtcactggtatctcgatagcgattcttgcgcccattggaggaatgagacacattattctttcagcaagaacctacaagctcttctcatag

SEQ ID NO: 71027 - protein, 450 aa, Arabidopsis thaliana
  peptide (1)..(450): Ceres Seq. ID no. 3038951
  misc_feature (1)..(450): Homolog of NCBI NO: 25297692 NR Description: hypothetical protein F14O23.2 [imported] - thaliana >gi|7239491|gb|AAF43217.1|AC012654_1 Contains similarity the lysine and histidine specific transporter gene from A.
  misc_feature (1)..(421): Homolog of NCBI NO: 18409877 NR Description: amino acid permease, putative; protein id: [Arabidopsis thaliana] >gi|12323722|gb|AAG51818.1|AC016163_7
  misc_feature (23)..(450): Homolog of NCBI NO: 18395471 NR Description: putative lysine/histidine-specific permease; id: At1g24400.1, supported by cDNA: gi_9293859 [Arabidopsis
  misc_feature (18)..(450): Homolog of NCBI NO: 30409136 NR Description: histidine amino acid transporter [Oryza sativa
  misc_feature (10)..(450): Homolog of NCBI NO: 15220504 NR Description: putative amino acid permease; protein id: [Arabidopsis thaliana] >gi|11072015|gb|AAG28894.1|AC008113_10 [Arabidopsis thaliana] >gi|12324687|gb|AAG52310.1|AC011020_17
  misc_feature (23)..(450): Homolog of NCBI NO: 30693663 NR Description: lysine and histidine specific transporter, [Arabidopsis thaliana] >gi|14194151|gb|AAK56270.1|AF367281_1 [Arabidopsis thaliana] >gi|22137070|gb|AAM91380.1|
  misc_feature (23)..(450): Homolog of NCBI NO: 30693666 NR Description: lysine and histidine specific transporter,
  misc_feature (23)..(450): Homolog of NCBI NO: 12597815 NR Description: lysine and histidine specific transporter,
  misc_feature (23)..(450): Homolog of NCBI NO: 22330117 NR Description: lysine and histidine specific transporter,
  misc_feature (23)..(450): Homolog of NCBI NO: 2576361 NR Description: lysine and histidine specific transporter
MPKYLDQNDEENKGRSTDNNNHRQMDYNDWLPVTASREAKWYYSAFHNVTAMVGAGVLGLPFAMSQLGWGPGLVAIIMSWAITFYSLWQMVQLHEAVPGKRLDRYPELGQEAFGPKLGYWIVMPQQLLVQIASDIVYNVTGGKSLKKFVELLFPNLEHIRQTYYILGFAALQLVLSQSPDFNSIKIVSLLAALMSFLYSMIASVASIAKGTEHRPSTYGVRGDTVASMVFDAFNGIGTIAFAFAGHSVVLEIQATIPSTPEVPSKKPMWKGVVVAYIIVIICYLFVAISGYWAFGAHVEDDVLISLERPAWLIAAANFMVFIHVIGSYQVFAMIVFDTIESYLVKTLKFTPSTTLRLVARSTYVALICLVAVCIPFFGGLLGFFGGLVFSSTSYFLPCIIWLIMKRPKRFSAHWWCSWVAIVTGISIAILAPIGGMRHIILSARTYKLFS

SEQ ID NO: 71028 - protein, 426 aa, Arabidopsis thaliana
  peptide (1)..(426): Ceres Seq. ID no. 3038952
  misc_feature (1)..(426): Homolog of NCBI NO: 25297692 NR Description: hypothetical protein F14O23.2 [imported] - thaliana >gi|7239491|gb|AAF43217.1|AC012654_1 Contains similarity the lysine and histidine specific transporter gene from A.
  misc_feature (1)..(397): Homolog of NCBI NO: 18409877 NR Description: amino acid permease, putative; protein id: [Arabidopsis thaliana] >gi|12323722|gb|AAG51818.1|AC016163_7
  misc_feature (1)..(426): Homolog of NCBI NO: 18395471 NR Description: putative lysine/histidine-specific permease; id: At1g24400.1, supported by cDNA: gi_9293859 [Arabidopsis
  misc_feature (1)..(426): Homolog of NCBI NO: 30409136 NR Description: histidine amino acid transporter [Oryza sativa
  misc_feature (1)..(426): Homolog of NCBI NO: 15220504 NR Description: putative amino acid permease; protein id: [Arabidopsis thaliana] >gi|11072015|gb|AAG28894.1|AC008113_10 [Arabidopsis thaliana] >gi|12324687|gb|AAG52310.1|AC011020_17
  misc_feature (1)..(426): Homolog of NCBI NO: 30693663 NR Description: lysine and histidine specific transporter, [Arabidopsis thaliana] >gi|14194151|gb|AAK56270.1|AF367281_1 [Arabidopsis thaliana] >gi|22137070|gb|AAM91380.1|
  misc_feature (1)..(426): Homolog of NCBI NO: 30693666 NR Description: lysine and histidine specific transporter,
  misc_feature (1)..(426): Homolog of NCBI NO: 12597815 NR Description: lysine and histidine specific transporter,
  misc_feature (1)..(426): Homolog of NCBI NO: 22330117 NR Description: lysine and histidine specific transporter,
  misc_feature (1)..(426): Homolog of NCBI NO: 2576361 NR Description: lysine and histidine specific transporter
MDYNDWLPVTASREAKWYYSAFHNVTAMVGAGVLGLPFAMSQLGWGPGLVAIIMSWAITFYSLWQMVQLHEAVPGKRLDRYPELGQEAFGPKLGYWIVMPQQLLVQIASDIVYNVTGGKSLKKFVELLFPNLEHIRQTYYILGFAALQLVLSQSPDFNSIKIVSLLAALMSFLYSMIASVASIAKGTEHRPSTYGVRGDTVASMVFDAFNGIGTIAFAFAGHSVVLEIQATIPSTPEVPSKKPMWKGVVVAYIIVIICYLFVAISGYWAFGAHVEDDVLISLERPAWLIAAANFMVFIHVIGSYQVFAMIVFDTIESYLVKTLKFTPSTTLRLVARSTYVALICLVAVCIPFFGGLLGFFGGLVFSSTSYFLPCIIWLIMKRPKRFSAHWWCSWVAIVTGISIAILAPIGGMRHIILSARTYKLFS

SEQ ID NO: 71029 - protein, 399 aa, Arabidopsis thaliana
  peptide (1)..(399): Ceres Seq. ID no. 3038953
  misc_feature (1)..(399): Homolog of NCBI NO: 30693666 NR Description: lysine and histidine specific transporter,
  misc_feature (1)..(399): Homolog of NCBI NO: 12597815 NR Description: lysine and histidine specific transporter,
  misc_feature (1)..(399): Homolog of NCBI NO: 22330117 NR Description: lysine and histidine specific transporter,
  misc_feature (1)..(399): Homolog of NCBI NO: 2576361 NR Description: lysine and histidine specific transporter
  misc_feature (1)..(399): Homolog of NCBI NO: 25297692 NR Description: hypothetical protein F14O23.2 [imported] - thaliana >gi|7239491|gb|AAF43217.1|AC012654_1 Contains similarity the lysine and histidine specific transporter gene from A.
  misc_feature (1)..(370): Homolog of NCBI NO: 18409877 NR Description: amino acid permease, putative; protein id: [Arabidopsis thaliana] >gi|12323722|gb|AAG51818.1|AC016163_7
  misc_feature (1)..(399): Homolog of NCBI NO: 18395471 NR Description: putative lysine/histidine-specific permease; id: At1g24400.1, supported by cDNA: gi_9293859 [Arabidopsis
  misc_feature (1)..(399): Homolog of NCBI NO: 30409136 NR Description: histidine amino acid transporter [Oryza sativa
  misc_feature (1)..(399): Homolog of NCBI NO: 15220504 NR Description: putative amino acid permease; protein id: [Arabidopsis thaliana] >gi|11072015|gb|AAG28894.1|AC008113_10 [Arabidopsis thaliana] >gi|12324687|gb|AAG52310.1|AC011020_17
  misc_feature (1)..(399): Homolog of NCBI NO: 30693663 NR Description: lysine and histidine specific transporter, [Arabidopsis thaliana] >gi|14194151|gb|AAK56270.1|AF367281_1 [Arabidopsis thaliana] >gi|22137070|gb|AAM91380.1|
MVGAGVLGLPFAMSQLGWGPGLVAIIMSWAITFYSLWQMVQLHEAVPGKRLDRYPELGQEAFGPKLGYWIVMPQQLLVQIASDIVYNVTGGKSLKKFVELLFPNLEHIRQTYYILGFAALQLVLSQSPDFNSIKIVSLLAALMSFLYSMIASVASIAKGTEHRPSTYGVRGDTVASMVFDAFNGIGTIAFAFAGHSVVLEIQATIPSTPEVPSKKPMWKGVVVAYIIVIICYLFVAISGYWAFGAHVEDDVLISLERPAWLIAAANFMVFIHVIGSYQVFAMIVFDTIESYLVKTLKFTPSTTLRLVARSTYVALICLVAVCIPFFGGLLGFFGGLVFSSTSYFLPCIIWLIMKRPKRFSAHWWCSWVAIVTGISIAILAPIGGMRHIILSARTYKLFS

SEQ ID NO: 71030 - DNA, 1137 bp, Arabidopsis thaliana
  misc_feature (1)..(1137): Ceres Seq. ID no. 3039063
  misc_feature: MA Experiment ID: 20001451 Result: Down-regulated in Transcription
  misc_feature: MA Experiment 20001451 PARAMETER Experiment Name: At_Far-red-induction_P Parameter: Age (day) Value: 7
  misc_feature: MA Experiment 20001451 PARAMETER Experiment Name: At_Far-red-induction_P Parameter: Light Value: Far-red vs. White
  misc_feature: MA Experiment 20001451 PARAMETER Experiment Name: At_Far-red-induction_P Parameter: Organism Value: A. thaliana
  misc_feature: MA Experiment 20001451 PARAMETER Experiment Name: At_Far-red-induction_P Parameter: Plant Line Value: Columbia
  misc_feature: MA Experiment 20001451 PARAMETER Experiment Name: At_Far-red-induction_P Parameter: Timepoint (hr) Value: 24
  misc_feature: MA Experiment 20001451 PARAMETER Experiment Name: At_Far-red-induction_P Parameter: Tissue Value: Whole Plant
atggtgaagttcacactcgattactgtgtagaattcgatatagggcttaccggggagttctgctccggccttctgtgcggcgaatcagttcttcacgacggtgaacgaatcgaatcgtcttcctacgctttgctacaccggttttcaggtgttcctgattatcccttgtacaaggttctagctttaggtctgctgaaatcaattgattctggttctttctgtggaacctttgagaaaatttcgttggggaaggaagtaatccggttgaaggagaaagaagatgagtggagcaagctgataaatcaaaagggttctgagttagtcaatgccttgaaggatgtattttccgagcttcaagttcaagagcccttattctccctcatgaaagatggcatcaaaacagttgaagcaaggtgttttgaagaagagtatgatagaattcggagaggaggttcaatggttatgataaataaatgtctaatgtttgaagttctggaacttcaccaatatgcatccttttacgagctgttgaaagccgagagttcagagaaagtgtttcctggcactaaaacagtggaagaaggtatgcaaatgtttaggaagttatatgatacggatcaagagaatttcaatggtgttgtggcaatccatcttagtaaatcagttgctcagccttgtgttgctttggctcacatactgtctggcttgagttacactggcgtgcaaaaccttctcggtctatctcacacaactggatccatttttcatgctctgcctcctcctagatcgatgctactctcttcattcatgcttccatataagccaaagataaaaggttgtagattgagccatggagctagagcattagccaagcatgttgatcgaagtagcgatggattttggggtgttcttcagggaactgattcagataaaaatgagcgtgcaatggacataatcaatcggttcattggcaattgttgttggatgaacatacatatcgttccaccacatggtgaagtgttcgagataagagtagctcaaggctatggagcacgttggtctcgagatggaaccaaattcattggatttcttgagccttacatggaggatggtcactccatggcctggaagcattaa

SEQ ID NO: 71031 - protein, 378 aa, Arabidopsis thaliana
  peptide (1)..(378): Ceres Seq. ID no. 3039064
  misc_feature (123)..(378): Homolog of NCBI NO: 30689388 NR Description: expressed protein [Arabidopsis thaliana]
  misc_feature (123)..(359): Homolog of NCBI NO: 25408874 NR Description: hypothetical protein At2g43470 [imported] - thaliana >gi|2289012|gb|AAB64341.1| hypothetical protein
  misc_feature (1)..(145): Homolog of NCBI NO: 25408874 NR Description: hypothetical protein At2g43470 [imported] - thaliana >gi|2289012|gb|AAB64341.1| hypothetical protein
  misc_feature (1)..(145): Homolog of NCBI NO: 30689388 NR Description: expressed protein [Arabidopsis thaliana]
  misc_feature (94)..(252): Homolog of NCBI NO: 21536491 NR Description: unknown [Arabidopsis thaliana]
  misc_feature (94)..(252): Homolog of NCBI NO: 18396513 NR Description: expressed protein; protein id: At3g03320.1, by cDNA: 100279. [Arabidopsis thaliana] unknown protein [Arabidopsis thaliana]
  misc_feature (117)..(218): Homolog of NCBI NO: 14521811 NR Description: hypothetical protein [Pyrococcus abyssi]
  misc_feature (117)..(218): Homolog of NCBI NO: 14590265 NR Description: hypothetical protein [Pyrococcus horikoshii]
  misc_feature (117)..(218): Homolog of NCBI NO: 18976827 NR Description: hypothetical protein [Pyrococcus furiosus DSM >gi|18892426|gb|AAL80579.1| hypothetical protein [Pyrococcus
  misc_feature (120)..(218): Homolog of NCBI NO: 20093930 NR Description: Archaea-specific enzyme related to ProFAR (HisA) and containing an additional uncharacterized domain
MVKFTLDYCVEFDIGLTGEFCSGLLCGESVLHDGERIESSSYALLHRFSGVPDYPLYKVLALGLLKSIDSGSFCGTFEKISLGKEVIRLKEKEDEWSKLINQKGSELVNALKDVFSELQVQEPLFSLMKDGIKTVEARCFEEEYDRIRRGGSMVMINKCLMFEVLELHQYASFYELLKAESSEKVFPGTKTVEEGMQMFRKLYDTDQENFNGVVAIHLSKSVAQPCVALAHILSGLSYTGVQNLLGLSHTTGSIFHALPPPRSMLLSSFMLPYKPKIKGCRLSHGARALAKHVDRSSDGFWGVLQGTDSDKNERAMDIINRFIGNCCWMNIHIVPPHGEVFEIRVAQGYGARWSRDGTKFIGFLEPYMEDGHSMAWKH

SEQ ID NO: 71032 - protein, 251 aa, Arabidopsis thaliana
  peptide (1)..(251): Ceres Seq. ID no. 3039065
  misc_feature (1)..(251): Homolog of NCBI NO: 30689388 NR Description: expressed protein [Arabidopsis thaliana]
  misc_feature (1)..(232): Homolog of NCBI NO: 25408874 NR Description: hypothetical protein At2g43470 [imported] - thaliana >gi|2289012|gb|AAB64341.1| hypothetical protein
  misc_feature (1)..(18): Homolog of NCBI NO: 25408874 NR Description: hypothetical protein At2g43470 [imported] - thaliana >gi|2289012|gb|AAB64341.1| hypothetical protein
  misc_feature (1)..(18): Homolog of NCBI NO: 30689388 NR Description: expressed protein [Arabidopsis thaliana]
  misc_feature (1)..(125): Homolog of NCBI NO: 21536491 NR Description: unknown [Arabidopsis thaliana]
  misc_feature (1)..(125): Homolog of NCBI NO: 18396513 NR Description: expressed protein; protein id: At3g03320.1, by cDNA: 100279. [Arabidopsis thaliana] unknown protein [Arabidopsis thaliana]
  misc_feature (1)..(91): Homolog of NCBI NO: 14521811 NR Description: hypothetical protein [Pyrococcus abyssi]
  misc_feature (1)..(91): Homolog of NCBI NO: 14590265 NR Description: hypothetical protein [Pyrococcus horikoshii]
  misc_feature (1)..(91): Homolog of NCBI NO: 18976827 NR Description: hypothetical protein [Pyrococcus furiosus DSM >gi|18892426|gb|AAL80579.1| hypothetical protein [Pyrococcus
  misc_feature (1)..(91): Homolog of NCBI NO: 20093930 NR Description: Archaea-specific enzyme related to ProFAR (HisA) and containing an additional uncharacterized domain
MKDGIKTVEARCFEEEYDRIRRGGSMVMINKCLMFEVLELHQYASFYELLKAESSEKVFPGTKTVEEGMQMFRKLYDTDQENFNGVVAIHLSKSVAQPCVALAHILSGLSYTGVQNLLGLSHTTGSIFHALPPPRSMLLSSFMLPYKPKIKGCRLSHGARALAKHVDRSSDGFWGVLQGTDSDKNERAMDIINRFIGNCCWMNIHIVPPHGEVFEIRVAQGYGARWSRDGTKFIGFLEPYMEDGHSMAWKH

SEQ ID NO: 71033 - protein, 226 aa, Arabidopsis thaliana
  peptide (1)..(226): Ceres Seq. ID no. 3039066
  misc_feature (1)..(226): Homolog of NCBI NO: 30689388 NR Description: expressed protein [Arabidopsis thaliana]
  misc_feature (1)..(207): Homolog of NCBI NO: 25408874 NR Description: hypothetical protein At2g43470 [imported] - thaliana >gi|2289012|gb|AAB64341.1| hypothetical protein
  misc_feature (1)..(100): Homolog of NCBI NO: 21536491 NR Description: unknown [Arabidopsis thaliana]
  misc_feature (1)..(100): Homolog of NCBI NO: 18396513 NR Description: expressed protein; protein id: At3g03320.1, by cDNA: 100279. [Arabidopsis thaliana] unknown protein [Arabidopsis thaliana]
  misc_feature (1)..(66): Homolog of NCBI NO: 14521811 NR Description: hypothetical protein [Pyrococcus abyssi]
  misc_feature (1)..(66): Homolog of NCBI NO: 14590265 NR Description: hypothetical protein [Pyrococcus horikoshii]
  misc_feature (1)..(66): Homolog of NCBI NO: 18976827 NR Description: hypothetical protein [Pyrococcus furiosus DSM >gi|18892426|gb|AAL80579.1| hypothetical protein [Pyrococcus
  misc_feature (1)..(66): Homolog of NCBI NO: 20093930 NR Description: Archaea-specific enzyme related to ProFAR (HisA) and containing an additional uncharacterized domain
  misc_feature (1)..(64): Homolog of NCBI NO: 14590361 NR Description: hypothetical protein [Pyrococcus horikoshii]
  misc_feature (1)..(64): Homolog of NCBI NO: 18976842 NR Description: hypothetical protein [Pyrococcus furiosus DSM >gi|18892443|gb|AAL80594.1| hypothetical protein [Pyrococcus
MVMINKCLMFEVLELHQYASFYELLKAESSEKVFPGTKTVEEGMQMFRKLYDTDQENFNGVVAIHLSKSVAQPCVALAHILSGLSYTGVQNLLGLSHTTGSIFHALPPPRSMLLSSFMLPYKPKIKGCRLSHGARALAKHVDRSSDGFWGVLQGTDSDKNERAMDIINRFIGNCCWMNIHIVPPHGEVFEIRVAQGYGARWSRDGTKFIGFLEPYMEDGHSMAWKH

SEQ ID NO: 71034 - DNA, 1047 bp, Arabidopsis thaliana
  misc_feature (1)..(1047): Ceres Seq. ID no. 3039385
  misc_feature: MA Experiment ID: 20001760 Result: Up-regulated in Transcription
  misc_feature: MA Experiment 20001760 PARAMETER Experiment Name: At_50mM_NH4NO3_L-to-H_P Parameter: Timepoint (hr) Value: 2
  misc_feature: MA Experiment 20001760 PARAMETER Experiment Name: At_50mM_NH4NO3_L-to-H_P Parameter: Tissue Value: Siliques
  misc_feature: MA Experiment 20001760 PARAMETER Experiment Name: At_50mM_NH4NO3_L-to-H_P Parameter: Treatment Value: 50mM NH4NO3 vs 100mM Mannitol
atgcgcaagtggatatgttgtgcgggtaaaaaaggagtttcagattcttcaaatgagaacacaaatcaaaagaatcaaaaaccacaagatcttgcaaagcctaaggagattcttcccattatagttccttccttgtcagtggatgaggttaatgaacagactgacaattttggaccaaattctctgattggtgagggatcttatggaagggtatactatgcaactctaaatgatggaaaagcagttgctttgaagaaactcgatcttgcacctgaagatgaaacaaacaccgagtttttaagccaggtttccatggtttcaagactaaagcatgagaatctcattcaactggtcggttattgtgttgatgaaaaccttcgtgttcttgcttatgagtttgcaacaatgggatcattgcacgatattctgcatggtaggaagggagttcaagatgcactaccaggtccaacacttgactggataacaagggtgaagatagccgttgaggcagctagaggtttagaataccttcatgagaaggttcagcctcaagtaatacatagagacataagatctagcaatatacttctttttgacgactatcaagcaaaaattgctgattttaatctttcaaatcaatctcctgataatgctgctcgtttacaatctacaagagttttgggcagctttggctattactctccagaatatgctatgactggagagttgacacataagagtgatgtatatggttttggggttgtacttctagagctcttgacagggaggaaaccagttgaccatacaatgccgcgaggccaacaaagtcttgtaacttgggctacaccgaaacttagtgaagatacagtagaggagtgtgttgatccaaagctaaagggagaatattctcctaaatcagtagctaagctagcagcggtggcagcattgtgtgtgcaatatgaatctaattgtagaccaaaaatgagtacagttgtgaaagctttgcaacaacttcttatagcgacaggctcaataccgcaattctaa

SEQ ID NO: 71035 - protein, 348 aa, Arabidopsis thaliana
  peptide (1)..(348): Ceres Seq. ID no. 3039386
  misc_feature (22)..(348): Homolog of NCBI NO: 15224556 NR Description: putative protein kinase; protein id: At2g30730.1
  misc_feature (1)..(339): Homolog of NCBI NO: 15224557 NR Description: putative protein kinase; protein id: At2g30740.1
  misc_feature (1)..(346): Homolog of NCBI NO: 15222170 NR Description: protein kinase interactor, putative; protein id: supported by cDNA: gi_13877994 [Arabidopsis thaliana]
  misc_feature (1)..(346): Homolog of NCBI NO: 13877995 NR Description: putative protein kinase interactor [Arabidopsis
  misc_feature (22)..(346): Homolog of NCBI NO: 25287624 NR Description: probable protein kinase [imported] - Arabidopsis >gi|7523708|gb|AAF63147.1|AC011001_17 Putative protein kinase
  misc_feature (1)..(339): Homolog of NCBI NO: 11259776 NR Description: protein kinase-like protein - Arabidopsis thaliana
  misc_feature (1)..(339): Homolog of NCBI NO: 30694970 NR Description: serine/threonine protein kinase, putative
  misc_feature (1)..(339): Homolog of NCBI NO: 30694972 NR Description: serine/threonine protein kinase, putative
MRKWICCAGKKGVSDSSNENTNQKNQKPQDLAKPKEILPIIVPSLSVDEVNEQTDNFGPNSLIGEGSYGRVYYATLNDGKAVALKKLDLAPEDETNTEFLSQVSMVSRLKHENLIQLVGYCVDENLRVLAYEFATMGSLHDILHGRKGVQDALPGPTLDWITRVKIAVEAARGLEYLHEKVQPQVIHRDIRSSNILLFDDYQAKIADFNLSNQSPDNAARLQSTRVLGSFGYYSPEYAMTGELTHKSDVYGFGVVLLELLTGRKPVDHTMPRGQQSLVTWATPKLSEDTVEECVDPKLKGEYSPKSVAKLAAVAALCVQYESNCRPKMSTVVKALQQLLIATGSIPQF

SEQ ID NO: 71036 - protein, 244 aa, Arabidopsis thaliana; identical to SEQ ID NO: 70265
  peptide (1)..(244): Ceres Seq. ID no. 3039387
  misc_feature (1)..(244): Homolog of NCBI NO: 15224556 NR Description: putative protein kinase; protein id: At2g30730.1
  misc_feature (1)..(235): Homolog of NCBI NO: 15224557 NR Description: putative protein kinase; protein id: At2g30740.1
  misc_feature (1)..(242): Homolog of NCBI NO: 15222170 NR Description: protein kinase interactor, putative; protein id: supported by cDNA: gi_13877994 [Arabidopsis thaliana]
  misc_feature (1)..(242): Homolog of NCBI NO: 13877995 NR Description: putative protein kinase interactor [Arabidopsis
  misc_feature (1)..(242): Homolog of NCBI NO: 25287624 NR Description: probable protein kinase [imported] - Arabidopsis >gi|7523708|gb|AAF63147.1|AC011001_17 Putative protein kinase
  misc_feature (1)..(235): Homolog of NCBI NO: 11259776 NR Description: protein kinase-like protein - Arabidopsis thaliana
  misc_feature (1)..(235): Homolog of NCBI NO: 30694970 NR Description: serine/threonine protein kinase, putative
  misc_feature (1)..(235): Homolog of NCBI NO: 30694972 NR Description: serine/threonine protein kinase, putative

SEQ ID NO: 71037 - protein, 213 aa, Arabidopsis thaliana; identical to SEQ ID NO: 70266
  peptide (1)..(213): Ceres Seq. ID no. 3039388
  misc_feature (1)..(213): Homolog of NCBI NO: 15224556 NR Description: putative protein kinase; protein id: At2g30730.1
  misc_feature (1)..(204): Homolog of NCBI NO: 15224557 NR Description: putative protein kinase; protein id: At2g30740.1
  misc_feature (1)..(211): Homolog of NCBI NO: 15222170 NR Description: protein kinase interactor, putative; protein id: supported by cDNA: gi_13877994 [Arabidopsis thaliana]
  misc_feature (1)..(211): Homolog of NCBI NO: 13877995 NR Description: putative protein kinase interactor [Arabidopsis
  misc_feature (1)..(211): Homolog of NCBI NO: 25287624 NR Description: probable protein kinase [imported] - Arabidopsis >gi|7523708|gb|AAF63147.1|AC011001_17 Putative protein kinase
  misc_feature (1)..(204): Homolog of NCBI NO: 11259776 NR Description: protein kinase-like protein - Arabidopsis thaliana
  misc_feature (1)..(204): Homolog of NCBI NO: 30694970 NR Description: serine/threonine protein kinase, putative
  misc_feature (1)..(204): Homolog of NCBI NO: 30694972 NR Description: serine/threonine protein kinase, putative

SEQ ID NO: 71038 - DNA, 792 bp, Arabidopsis thaliana
  misc_feature (1)..(792): Ceres Seq. ID no. 3039434
  misc_feature: MA Experiment ID: 20000184 Result: Down-regulated in Transcription
  misc_feature: MA Experiment 20000184 PARAMETER Experiment Name: At_Shoots__P Parameter: Age (day) Value: 7
  misc_feature: MA Experiment 20000184 PARAMETER Experiment Name: At_Shoots__P Parameter: Tissue Value: Shoots vs. Whole Plant
  misc_feature: MA Experiment ID: 20000264 Result: Down-regulated in Transcription
  misc_feature: MA Experiment 20000264 PARAMETER Experiment Name: At_Open_Flower_P Parameter: Age (day) Value: 21
  misc_feature: MA Experiment 20000264 PARAMETER Experiment Name: At_Open_Flower_P Parameter: Plant Line Value: WS
  misc_feature: MA Experiment 20000264 PARAMETER Experiment Name: At_Open_Flower_P Parameter: Tissue Value: Open Flower vs. Whole Plant
  misc_feature: MA Experiment ID: 20000265 Result: Down-regulated in Transcription
  misc_feature: MA Experiment 20000265 PARAMETER Experiment Name: At_Open_Flower_P Parameter: Age (day) Value: 21
  misc_feature: MA Experiment 20000265 PARAMETER Experiment Name: At_Open_Flower_P Parameter: Plant Line Value: WS
  misc_feature: MA Experiment 20000265 PARAMETER Experiment Name: At_Open_Flower_P Parameter: Tissue Value: Closed Flower vs. Whole Plant
  misc_feature: MA Experiment ID: 20000286 Result: Down-regulated in Transcription
  misc_feature: MA Experiment 20000286 PARAMETER Experiment Name: At_Open_Flower_P Parameter: Age (day) Value: 21
  misc_feature: MA Experiment 20000286 PARAMETER Experiment Name: At_Open_Flower_P Parameter: Plant Line Value: WS
  misc_feature: MA Experiment 20000286 PARAMETER Experiment Name: At_Open_Flower_P Parameter: Tissue Value: Half Open vs. Whole Plant
  misc_feature: MA Experiment ID: 20000438 Result: Down-regulated in Transcription
  misc_feature: MA Experiment 20000438 PARAMETER Experiment Name: At_Shoots__P Parameter: Age (day) Value: 14
  misc_feature: MA Experiment 20000438 PARAMETER Experiment Name: At_Shoots__P Parameter: Tissue Value: Shoots vs. Whole Plant
  misc_feature: MA Experiment ID: 20000439 Result: Down-regulated in Transcription
  misc_feature: MA Experiment 20000439 PARAMETER Experiment Name: At_Roots__P Parameter: Age (day) Value: 14 vs. 21
  misc_feature: MA Experiment 20000439 PARAMETER Experiment Name: At_Roots__P Parameter: Organism Value: A. thaliana
  misc_feature: MA Experiment 20000439 PARAMETER Experiment Name: At_Roots__P Parameter: Tissue Value: Roots vs. Whole Plant
  misc_feature: MA Experiment ID: 20001247 Result: Up-regulated in Transcription
  misc_feature: MA Experiment 20001247 PARAMETER Experiment Name: At_Far-red-induction_P Parameter: Age (day) Value: 7
  misc_feature: MA Experiment 20001247 PARAMETER Experiment Name: At_Far-red-induction_P Parameter: Light Value: Far-red vs. White
  misc_feature: MA Experiment 20001247 PARAMETER Experiment Name: At_Far-red-induction_P Parameter: Organism Value: A. thaliana
  misc_feature: MA Experiment 20001247 PARAMETER Experiment Name: At_Far-red-induction_P Parameter: Plant Line Value: Columbia
  misc_feature: MA Experiment 20001247 PARAMETER Experiment Name: At_Far-red-induction_P Parameter: Timepoint (hr) Value: 1
  misc_feature: MA Experiment 20001247 PARAMETER Experiment Name: At_Far-red-induction_P Parameter: Tissue Value: Whole Plant
  misc_feature: MA Experiment ID: 20001451 Result: Up-regulated in Transcription
  misc_feature: MA Experiment 20001451 PARAMETER Experiment Name: At_Far-red-induction_P Parameter: Age (day) Value: 7
  misc_feature: MA Experiment 20001451 PARAMETER Experiment Name: At_Far-red-induction_P Parameter: Light Value: Far-red vs. White
  misc_feature: MA Experiment 20001451 PARAMETER Experiment Name: At_Far-red-induction_P Parameter: Organism Value: A. thaliana
  misc_feature: MA Experiment 20001451 PARAMETER Experiment Name: At_Far-red-induction_P Parameter: Plant Line Value: Columbia
  misc_feature: MA Experiment 20001451 PARAMETER Experiment Name: At_Far-red-induction_P Parameter: Timepoint (hr) Value: 24
  misc_feature: MA Experiment 20001451 PARAMETER Experiment Name: At_Far-red-induction_P Parameter: Tissue Value: Whole Plant
  misc_feature: MA Experiment ID: 20001905 Result: Down-regulated in Transcription
  misc_feature: MA Experiment 20001905 PARAMETER Experiment Name: At_Drought_Reproduction_P Parameter: Age (day) Value: 40
  misc_feature: MA Experiment 20001905 PARAMETER Experiment Name: At_Drought_Reproduction_P Parameter: Organism Value: A. thaliana
  misc_feature: MA Experiment 20001905 PARAMETER Experiment Name: At_Drought_Reproduction_P Parameter: Plant Line Value: WS
  misc_feature: MA Experiment 20001905 PARAMETER Experiment Name: At_Drought_Reproduction_P Parameter: Timepoint (day) Value: 10
  misc_feature: MA Experiment 20001905 PARAMETER Experiment Name: At_Drought_Reproduction_P Parameter: Tissue Value: Rosettes
  misc_feature: MA Experiment 20001905 PARAMETER Experiment Name: At_Drought_Reproduction_P Parameter: Treatment Value: Drought vs. No Drought
atgggttctgggaatttgattaaggcaataattagattgaagaagagtaaacaaggaactgaaaagaaaaaaactagtgctgtgaaaccaaaaaaaggttccaagaagaagggtacatcactagttactcgtagtgaggattgggctgctactcggattcagactgcttttaaagcctataaggctagaaaaagcttacggcgtctaaaaggaattgcaagagcaaagttatcaactgagaaacaatctgtgaagaaccaagctgtggtcacattgaggtatcttcactcatggagtaaaatacagtcagagataaaggctcgccgagtttgcatggtaaccgaatggcgactgaagaataaaagattagagcatcagcaaaagcttgaggcaaagcttcatgatgttgaggttgaatggaatggtgggtcagagacaaaagatgaaatcttggagaggatacttcaaagggaagaagcgacgattaagcgagaaagagccttggcatatgctttctctcatcagtggaaagctgatggtaagactcagtggttgggaagttatgagctaggaaacactaattggggttggagctggaaagagcgttggatatctgctcggccttgggaagtaagatattcagtgactcctaagaaaccaaagagctcaaagacagactcaaattcaccagcaaagagaacagtgtcattatcatcagttccagccaaaactccgtttcctggagctagaaacacagtgaaaccgcggagattgtcatttccaggtgcttga

SEQ ID NO: 71039 - protein, 263 aa, Arabidopsis thaliana
  peptide (1)..(263): Ceres Seq. ID no. 3039435
  misc_feature (47)..(67): Pfam Name: IQ calmodulin-binding motif Pfam Description: IQ calmodulin-binding motif
  misc_feature (1)..(263): Homolog of NCBI NO: 15226186 NR Description: putative SF16 protein {Helianthus annuus}; id: At2g33990.1 [Arabidopsis thaliana] >gi|25408319|pir||A84751
  misc_feature (1)..(241): Homolog of NCBI NO: 15232474 NR Description: hypothetical protein; protein id: At3g15050.1 thaliana] >gi|8777488|dbj|BAA97068.1| contains similarity to SF16
  misc_feature (46)..(212): Homolog of NCBI NO: 15225258 NR Description: putative SF16 protein {Helianthus annuus}; id: At2g26180.1 [Arabidopsis thaliana] >gi|25367166|pir||D84657
  misc_feature (46)..(253): Homolog of NCBI NO: 15233296 NR Description: unknown protein; protein id: At3g22190.1
  misc_feature (46)..(253): Homolog of NCBI NO: 11994738 NR Description: contains similarity to SF16
  misc_feature (45)..(236): Homolog of NCBI NO: 15982840 NR Description: AT5g03040/F15A17_70 [Arabidopsis thaliana]
  misc_feature (45)..(210): Homolog of NCBI NO: 18414094 NR Description: putative protein; protein id: At5g03040.1,
  misc_feature (46)..(261): Homolog of NCBI NO: 15231175 NR Description: unknown protein; protein id: At3g52290.1
  misc_feature (46)..(251): Homolog of NCBI NO: 15232741 NR Description: putative SF16 protein; protein id: At3g09710.1 thaliana] >gi|6682249|gb|AAF23301.1|AC016661_26 putative SF16
  misc_feature (46)..(258): Homolog of NCBI NO: 15225299 NR Description: putative SF16 protein {Helianthus annuus}; id: At2g26410.1 [Arabidopsis thaliana] >gi|7487891|pir||T00974
MGSGNLIKAIIRLKKSKQGTEKKKTSAVKPKKGSKKKGTSLVTRSEDWAATRIQTAFKAYKARKSLRRLKGIARAKLSTEKQSVKNQAVVTLRYLHSWSKIQSEIKARRVCMVTEWRLKNKRLEHQQKLEAKLHDVEVEWNGGSETKDEILERILQREEATIKRERALAYAFSHQWKADGKTQWLGSYELGNTNWGWSWKERWISARPWEVRYSVTPKKPKSSKTDSNSPAKRTVSLSSVPAKTPFPGARNTVKPRRLSFPGA

SEQ ID NO: 71040 - protein, 152 aa, Arabidopsis thaliana; identical to SEQ ID NO: 20480
  peptide (1)..(152): Ceres Seq. ID no. 3039436
  misc_feature (1)..(152): Homolog of NCBI NO: 15226186 NR Description: putative SF16 protein {Helianthus annuus}; id: At2g33990.1 [Arabidopsis thaliana] >gi|25408319|pir||A84751
  misc_feature (1)..(130): Homolog of NCBI NO: 15232474 NR Description: hypothetical protein; protein id: At3g15050.1 thaliana] >gi|8777488|dbj|BAA97068.1| contains similarity to SF16
  misc_feature (1)..(101): Homolog of NCBI NO: 15225258 NR Description: putative SF16 protein {Helianthus annuus}; id: At2g26180.1 [Arabidopsis thaliana] >gi|25367166|pir||D84657
  misc_feature (1)..(142): Homolog of NCBI NO: 15233296 NR Description: unknown protein; protein id: At3g22190.1
  misc_feature (1)..(142): Homolog of NCBI NO: 11994738 NR Description: contains similarity to SF16
  misc_feature (1)..(125): Homolog of NCBI NO: 15982840 NR Description: AT5g03040/F15A17_70 [Arabidopsis thaliana]
  misc_feature (1)..(99): Homolog of NCBI NO: 18414094 NR Description: putative protein; protein id: At5g03040.1,
  misc_feature (1)..(150): Homolog of NCBI NO: 15231175 NR Description: unknown protein; protein id: At3g52290.1
  misc_feature (1)..(140): Homolog of NCBI NO: 15232741 NR Description: putative SF16 protein; protein id: At3g09710.1 thaliana] >gi|6682249|gb|AAF23301.1|AC016661_26 putative SF16
  misc_feature (1)..(147): Homolog of NCBI NO: 15225299 NR Description: putative SF16 protein {Helianthus annuus}; id: At2g26410.1 [Arabidopsis thaliana] >gi|7487891|pir||T00974

SEQ ID NO: 71041 - DNA, 2757 bp, Arabidopsis thaliana
  misc_feature (1)..(2757): Ceres Seq. ID no. 3039450
  misc_feature: MA Experiment ID: 20000180 Result: Down-regulated in Transcription
  misc_feature: MA Experiment 20000180 PARAMETER Experiment Name: At_Germinating_Seeds_P Parameter: Age (hr) Value: 24 vs. 0
  misc_feature: MA Experiment 20000180 PARAMETER Experiment Name: At_Germinating_Seeds_P Parameter: Tissue Value: Germinating Seeds
atggaacaatctcttgtgaaggctttgttgaagaacacgaacaatccgagattagcatggagaatcttcaagaggatattctcttctccttcagaagaaagccatggcatttctttagatgcgactcctacaatcgctcgtatcctggttcgagccaaaatgcacgaagaaatccaagagcttcacaatcttatactctcttcttcaatccaaaagacgaaactttcgtctcttctctctgttgtatccatcttcgcgaaatcgaatcacattgataaggcgtttccgcagtttcagttagtacggtcgcggtttcctgagaacaaacctagcgtttatctgtataatttgttgcttgaaagttgcataaaggaacgacgtgtggagttcgtttcgtggttgtataaagatatggttttgtgtgggattgctccacagacttatacttttaatctcttgatacgtgctttgtgtgattcaagttgtgttgatgctgctcgagagttgttcgacgaaatgcctgagaaaggttgtaagccaaatgagtttacttttgggattttggttcgtgggtattgtaaagctggtttgactgataaagggcttgaattgttgaatgcaatggaaagttttggggttttgcctaataaagttatctataacaccattgtttcgagcttctgtagagaaggtaggaatgatgattctgaaaagatggtggagaagatgcgggaggaaggtttggtgcctgatattgtcacttttaactctaggatatcagcgctttgtaaagaaggaaaggttttggatgcgtctagaattttcagtgatatggagctagatgagtatctgggtcttcctcgtcccaatagtataacatataacttgatgttgaaaggtttctgtaaggtagggttgctggaagatgccaagaccctctttgagtcgattagagaaaatgatgatctcgctagcttgcagagttacaatatttggctgcagggtttggtcagacatgggaagtttatagaggctgaaacagtcctgaagcaaatgactgataagggaataggaccaagtatttattcttacaatatcttgatggatggattgtgtaaattgggcatgctatccgatgcaaaaactattgttggtttgatgaaaagaaatggtgtttgcccggatgctgtaacttatggctgccttcttcatggttattgcagtgttgggaaagtcgatgcagctaaaagcttgttgcaggagatgatgaggaataattgtttaccaaatgcttatacttgcaatattttgctacatagcctttggaagatggggagaatatctgaagcggaagagttgctgcgaaagatgaatgagaaaggttatggactagacactgtcacctgcaacattatcgttgacggactctgtggaagcggggaattagataaagctattgagatagttaagggaatgcgggtgcatggaagtgctgctcttggtaacttaggcaattcatatatcggactggtggatgatagcttgatcgagaacaactgtttgcctgacctgatcacgtattcaactttacttaatggtttgtgcaaagctggaaggtttgctgaagcaaaaaatttgtttgccgagatgatgggagagaaactgcaaccggactcggtcgcatataacattttcattcatcatttctgcaaacaggggaaaatatcatctgcatttcgcgttctcaaagacatggagaagaaaggttgtcataagagcctagagacttataactcactgatcctgggcttaggcataaaaaaccagatttttgaaattcatggactgatggatgagatgaaagaaaagggcatttcaccaaatatatgcacctacaatactgcaatccagtatctttgtgagggagaaaaagttgaagatgcaactaacctccttgatgaaatgatgcaaaagaacatagccccaaatgtattttccttcaaatatttgattgaagcgttctgtaaggtccctgattttgatatggcccaagaagtctttgagactgctgtaagtatctgtggacagaaagaaggcctgtacagcttgatgttcaatgagttgcttgctgcagggcaactactaaaggctacggagttgctcgaagctgttttagatagaggttttgagttggggacttttctttataaagatcttgttgagagcttatgtaagaaggatgaactagaagtagctagtggaattttgcataagatgatagacagaggatatggatttgaccctgcagcattgatgcctgtgatagatggcttaggtaagatgggaaacaagaaagaggcaaacagttttgctgataagatgatggaaatggcttcagttggtgaagtagcaaacaaagtcgatccaaatgcaagggatatacaccagaaaaagcataataagaatggtggaaacaactggcagaatatattacacagagatgacggtagtggaattgcgttaaggtctctgtcaagagttaaaaaaggatggggtcaaggggatatatcaagctttcagcctccaagagttgactacttagactactgggaggacgatgatggcgcaagcaagtttttgaggtgcagctcatcaaggatgacagctaagctggtagaaccagacaagacgacatggctggacaaatatatccttgttagaacgacgtttaaacataagagctgcctgctttcataa

SEQ ID NO: 71042 - protein, 918 aa, Arabidopsis thaliana
  peptide (1)..(918): Ceres Seq. ID no. 3039451
  misc_feature (526)..(559): Pfam Name: PPR repeat Pfam Description: PPR repeat
  misc_feature (11)..(688): Homolog of NCBI NO: 30840327 NR Description: fertility restorer homologue [Raphanus sativus]
  misc_feature (11)..(688): Homolog of NCBI NO: 30840221 NR Description: fertility restorer [Raphanus sativus]
  misc_feature (6)..(673): Homolog of NCBI NO: 15232008 NR Description: hypothetical protein; protein id: At3g09060.1 thaliana] >gi|5923671|gb|AAD56322.1|AC009326_9 hypothetical
  misc_feature (145)..(690): Homolog of NCBI NO: 15237662 NR Description: putative protein; protein id: At5g64320.1
  misc_feature (44)..(745): Homolog of NCBI NO: 15221621 NR Description: unknown protein; protein id: At1g62910.1
  misc_feature (138)..(660): Homolog of NCBI NO: 15221610 NR Description: hypothetical protein; protein id: At1g62860.1
  misc_feature (112)..(688): Homolog of NCBI NO: 32452381 NR Description: fertility restorer homologue A [Raphanus sativus]
  misc_feature (112)..(688): Homolog of NCBI NO: 32527604 NR Description: pentatricopeptide repeat-containing protein
  misc_feature (79)..(688): Homolog of NCBI NO: 32452379 NR Description: fertility restorer homologue C [Raphanus sativus]
  misc_feature (58)..(749): Homolog of NCBI NO: 34394343 NR Description: putative fertility restorer homologue [Oryza
MEQSLVKALLKNTNNPRLAWRIFKRIFSSPSEESHGISLDATPTIARILVRAKMHEEIQELHNLILSSSIQKTKLSSLLSVVSIFAKSNHIDKAFPQFQLVRSRFPENKPSVYLYNLLLESCIKERRVEFVSWLYKDMVLCGIAPQTYTFNLLIRALCDSSCVDAARELFDEMPEKGCKPNEFTFGILVRGYCKAGLTDKGLELLNAMESFGVLPNKVIYNTIVSSFCREGRNDDSEKMVEKMREEGLVPDIVTFNSRISALCKEGKVLDASRIFSDMELDEYLGLPRPNSITYNLMLKGFCKVGLLEDAKTLFESIRENDDLASLQSYNIWLQGLVRHGKFIEAETVLKQMTDKGIGPSIYSYNILMDGLCKLGMLSDAKTIVGLMKRNGVCPDAVTYGCLLHGYCSVGKVDAAKSLLQEMMRNNCLPNAYTCNILLHSLWKMGRISEAEELLRKMNEKGYGLDTVTCNIIVDGLCGSGELDKAIEIVKGMRVHGSAALGNLGNSYIGLVDDSLIENNCLPDLITYSTLLNGLCKAGRFAEAKNLFAEMMGEKLQPDSVAYNIFIHHFCKQGKISSAFRVLKDMEKKGCHKSLETYNSLILGLGIKNQIFEIHGLMDEMKEKGISPNICTYNTAIQYLCEGEKVEDATNLLDEMMQKNIAPNVFSFKYLIEAFCKVPDFDMAQEVFETAVSICGQKEGLYSLMFNELLAAGQLLKATELLEAVLDRGFELGTFLYKDLVESLCKKDELEVASGILHKMIDRGYGFDPAALMPVIDGLGKMGNKKEANSFADKMMEMASVGEVANKVDPNARDIHQKKHNKNGGNNWQNILHRDDGSGIALRSLSRVKKGWGQGDISSFQPPRVDYLDYWEDDDGASKFLRCSSSRMTAKLVEPDKTTWLDKYILVRTTFKHKSCLLS

SEQ ID NO: 71043 - protein, 865 aa, Arabidopsis thaliana
  peptide (1)..(865): Ceres Seq. ID no. 3039452
  misc_feature (473)..(506): Pfam Name: PPR repeat Pfam Description: PPR repeat
  misc_feature (1)..(635): Homolog of NCBI NO: 30840327 NR Description: fertility restorer homologue [Raphanus sativus]
  misc_feature (1)..(635): Homolog of NCBI NO: 30840221 NR Description: fertility restorer [Raphanus sativus]
  misc_feature (1)..(620): Homolog of NCBI NO: 15232008 NR Description: hypothetical protein; protein id: At3g09060.1 thaliana] >gi|5923671|gb|AAD56322.1|AC009326_9 hypothetical
  misc_feature (92)..(637): Homolog of NCBI NO: 15237662 NR Description: putative protein; protein id: At5g64320.1
  misc_feature (1)..(692): Homolog of NCBI NO: 15221621 NR Description: unknown protein; protein id: At1g62910.1
  misc_feature (85)..(607): Homolog of NCBI NO: 15221610 NR Description: hypothetical protein; protein id: At1g62860.1
  misc_feature (59)..(635): Homolog of NCBI NO: 32452381 NR Description: fertility restorer homologue A [Raphanus sativus]
  misc_feature (59)..(635): Homolog of NCBI NO: 32527604 NR Description: pentatricopeptide repeat-containing protein
  misc_feature (26)..(635): Homolog of NCBI NO: 32452379 NR Description: fertility restorer homologue C [Raphanus sativus]
  misc_feature (5)..(696): Homolog of NCBI NO: 34394343 NR Description: putative fertility restorer homologue [Oryza
MHEEIQELHNLILSSSIQKTKLSSLLSVVSIFAKSNHIDKAFPQFQLVRSRFPENKPSVYLYNLLLESCIKERRVEFVSWLYKDMVLCGIAPQTYTFNLLIRALCDSSCVDAARELFDEMPEKGCKPNEFTFGILVRGYCKAGLTDKGLELLNAMESFGVLPNKVIYNTIVSSFCREGRNDDSEKMVEKMREEGLVPDIVTFNSRISALCKEGKVLDASRIFSDMELDEYLGLPRPNSITYNLMLKGFCKVGLLEDAKTLFESIRENDDLASLQSYNIWLQGLVRHGKFIEAETVLKQMTDKGIGPSIYSYNILMDGLCKLGMLSDAKTIVGLMKRNGVCPDAVTYGCLLHGYCSVGKVDAAKSLLQEMMRNNCLPNAYTCNILLHSLWKMGRISEAEELLRKMNEKGYGLDTVTCNIIVDGLCGSGELDKAIEIVKGMRVHGSAALGNLGNSYIGLVDDSLIENNCLPDLITYSTLLNGLCKAGRFAEAKNLFAEMMGEKLQPDSVAYNIFIHHFCKQGKISSAFRVLKDMEKKGCHKSLETYNSLILGLGIKNQIFEIHGLMDEMKEKGISPNICTYNTAIQYLCEGEKVEDATNLLDEMMQKNIAPNVFSFKYLIEAFCKVPDFDMAQEVFETAVSICGQKEGLYSLMFNELLAAGQLLKATELLEAVLDRGFELGTFLYKDLVESLCKKDELEVASGILHKMIDRGYGFDPAALMPVIDGLGKMGNKKEANSFADKMMEMASVGEVANKVDPNARDIHQKKHNKNGGNNWQNILHRDDGSGIALRSLSRVKKGWGQGDISSFQPPRVDYLDYWEDDDGASKFLRCSSSRMTAKLVEPDKTTWLDKYILVRTTFKHKSCLLS

SEQ ID NO: 71044 - protein, 781 aa, Arabidopsis thaliana
  peptide (1)..(781): Ceres Seq. ID no. 3039453
  misc_feature (389)..(422): Pfam Name: PPR repeat Pfam Description: PPR repeat
  misc_feature (1)..(551): Homolog of NCBI NO: 30840327 NR Description: fertility restorer homologue [Raphanus sativus]
  misc_feature (1)..(551): Homolog of NCBI NO: 30840221 NR Description: fertility restorer [Raphanus sativus]
  misc_feature (1)..(536): Homolog of NCBI NO: 15232008 NR Description: hypothetical protein; protein id: At3g09060.1 thaliana] >gi|5923671|gb|AAD56322.1|AC009326_9 hypothetical
  misc_feature (8)..(553): Homolog of NCBI NO: 15237662 NR Description: putative protein; protein id: At5g64320.1
  misc_feature (1)..(608): Homolog of NCBI NO: 15221621 NR Description: unknown protein; protein id: At1g62910.1
  misc_feature (1)..(523): Homolog of NCBI NO: 15221610 NR Description: hypothetical protein; protein id: At1g62860.1
  misc_feature (1)..(551): Homolog of NCBI NO: 32452381 NR Description: fertility restorer homologue A [Raphanus sativus]
  misc_feature (1)..(551): Homolog of NCBI NO: 32527604 NR Description: pentatricopeptide repeat-containing protein
  misc_feature (1)..(551): Homolog of NCBI NO: 32452379 NR Description: fertility restorer homologue C [Raphanus sativus]
  misc_feature (1)..(612): Homolog of NCBI NO: 34394343 NR Description: putative fertility restorer homologue [Oryza
MVLCGIAPQTYTFNLLIRALCDSSCVDAARELFDEMPEKGCKPNEFTFGILVRGYCKAGLTDKGLELLNAMESFGVLPNKVIYNTIVSSFCREGRNDDSEKMVEKMREEGLVPDIVTFNSRISALCKEGKVLDASRIFSDMELDEYLGLPRPNSITYNLMLKGFCKVGLLEDAKTLFESIRENDDLASLQSYNIWLQGLVRHGKFIEAETVLKQMTDKGIGPSIYSYNILMDGLCKLGMLSDAKTIVGLMKRNGVCPDAVTYGCLLHGYCSVGKVDAAKSLLQEMMRNNCLPNAYTCNILLHSLWKMGRISEAEELLRKMNEKGYGLDTVTCNIIVDGLCGSGELDKAIEIVKGMRVHGSAALGNLGNSYIGLVDDSLIENNCLPDLITYSTLLNGLCKAGRFAEAKNLFAEMMGEKLQPDSVAYNIFIHHFCKQGKISSAFRVLKDMEKKGCHKSLETYNSLILGLGIKNQIFEIHGLMDEMKEKGISPNICTYNTAIQYLCEGEKVEDATNLLDEMMQKNIAPNVFSFKYLIEAFCKVPDFDMAQEVFETAVSICGQKEGLYSLMFNELLAAGQLLKATELLEAVLDRGFELGTFLYKDLVESLCKKDELEVASGILHKMIDRGYGFDPAALMPVIDGLGKMGNKKEANSFADKMMEMASVGEVANKVDPNARDIHQKKHNKNGGNNWQNILHRDDGSGIALRSLSRVKKGWGQGDISSFQPPRVDYLDYWEDDDGASKFLRCSSSRMTAKLVEPDKTTWLDKYILVRTTFKHKSCLLS

SEQ ID NO: 71045 - DNA, 2727 bp, Arabidopsis thaliana
  misc_feature (1)..(2727): Ceres Seq. ID no. 3039481
  misc_feature: MA Experiment ID: 20000355 Result: Up-regulated in Transcription
  misc_feature: MA Experiment 20000355 PARAMETER Experiment Name: At_Siliques_Sub_P Parameter: Age (day) Value: 21
  misc_feature: MA Experiment 20000355 PARAMETER Experiment Name: At_Siliques_Sub_P Parameter: Organism Value: A. thaliana
  misc_feature: MA Experiment 20000355 PARAMETER Experiment Name: At_Siliques_Sub_P Parameter: Plant Line Value: WS
  misc_feature: MA Experiment 20000355 PARAMETER Experiment Name: At_Siliques_Sub_P Parameter: Tissue Value: Less Than 5mm Siliques vs. Whole Plant
  misc_feature: MA Experiment ID: 20000440 Result: Up-regulated in Transcription
  misc_feature: MA Experiment 20000440 PARAMETER Experiment Name: At_Closed-Flower__Sub_P Parameter: Tissue Value: Closed Flower vs. Whole Plant
atggatttcagaaattccttcaaatctcatagctcatacaaacaaattcgaagccccggagatcaaagcgagccaagccctgaacatctgccaattctccacgatcaccatcctgatcattccggcatggtggtcgatgaccagaaacccgacagcactcgttctagcctcgacgatggtcgtaacgcgcctgtagaacgtgatgccagttacaaattctggcaagacaacactactggaacgtcaacggatcacacggcggtgagaacaagtgataaagatccaatcgctattagtcgaaaaggcgatagattaagcggtagtttcgatttcgtgcacgggaagctaccggttgatgaatctccaacgaaaatggtcgctggagagcctgtgaatcggcaatggagaggtagaaataatgaagagatcacacttgatgttgatcaagaaaatgatgatgtaagtcaccaaacaatgcctacgcctacatcaacggctcgaacctcgtttgatgcgtctagagaaatgcgagtctcttttaacgttcgtagagcgggtggtgcgtttgtcgctggttcggttccttcttcgtcttcccattcgtcttcttcttcgtccgcgacaatgcggacgaatcaggatcagccgcaactgcaggaggaagaggttgtgagatgtacttcgaacatgtcgtttcagaggaaatcagagcttatatctagagtgaagacaaggtctaggcttcaagatccgccacgtgaggaagaaacgccttactcgggttggagatcgggtcagttgaaatccgggttacttgcggatattgatgaagaggatgatccattagcggaagaagatgtaccagatgagtataaaagagggaagcttgacgccattacattgctccagtggcttagcttagtcgctattatagctgcattagcgtgtagtttgtcgattcagtcttggaagaaagttagagtttggaatcttcatctatggaaatgggaagtgttcttgttggttcttatatgtgggaggttggtttcgggttggggaatccgaatcgttgtcttcttcatcgagagaaacttccttttgcggaagcgggttctttacttcgtttacggtgtgcgtagagctgttcagaactgtctatggctaggcctagtccttctcgcttggcacttcttgttcgacaagaaagtacagagggagacaaggagcaggtttcttccttacgtaaccaagatcttggtgtgtttcttgctaagtactatcttgtggttgatcaagacactagtggttaaagttctggcctcttcgttccacgtcagtacttactttgatcggattcaagaagcgctctttaaccagtacgtgatcgagacgttatcgggtcctcccatgattgaaatgagcaggattgaggaagaggaagagcgggcgcaagacgagatattcaagatgcagaacgcaggtgctaatttaccaccagatctttgcgcggctgcgtttccaccgggaaaaagcgggagagtaatgaatccgaaactctccccgataatcccgaaatcaacaactgataatggaattagcatggaacatcttcacaggatgaatcataagaacatctctgcttggaacatgaagagactaatgaagattgtgagaaatgtttctctgaccacactggacgaacagatgctagaaagcacatacgaagatgaatccacccgccagatacgaagcgaaaaagaggctaaagcagctgcaaggaagattttcaagaacgttgagcaacgtggcgcaaagtacatttacctagaggatttgatgagatttttgcgggaagacgaggcgatgaagaccatgggcctcttcgaaggtgcaccggagaataaaaggatcagcaaatcagccttaaagaactggctggtcaatgctttcagagagcgacgagctcttgccctgacactcaacgacaccaagacagcagtgaacaagctccatcacatgattaatattgtcactgccatagtcattgttgtcatttggcttgtccttcttgaaattgcttcctccaaggtacttctctttgtaagttcacaagttgtactcttggccttcatctttgggaacactgtcaagaccgtcttcgagtccatcatcttcttattcatcgtacacccttacgatgttggtgatcggtgtgagattgacagtgtacagttggtggtggaggagatgaacatactcactaccgtgttcttacgatacgacaatctgaagattatgtatccgaatagtcttttgtggcagaaatcaatcaacaattactaccgcagtccggatatgggagatgcaatcgagttctgtgtccacattactactcctcttgaaaaaatctccgtgatcaaacagagaatatcgaactacatcgacaacaagccggagtattggtacccacaagccaaaatcattgtaaaagatttggaagatttgcacatagtaagactagcaatatggccatgtcacaggattaatcaccaagacatggctgaaagatggacaagaagagccgtcttagtcgaagaagtgattaagatactcctcgagctcgacattcaacaccggttttatccgctcgatatcaatgtccgaacaatgcctaccgttgtctctagcagagttccacctggctggtcacaaaaccaacctgcctga

SEQ ID NO: 71046 - protein, 908 aa, Arabidopsis thaliana
  peptide (1)..(908): Ceres Seq. ID no. 3039482
  misc_feature (671)..(879): Pfam Name: Mechanosensitive ion channel Pfam Description: Mechanosensitive ion channel
  misc_feature (828)..(908): Homolog of NCBI NO: 25411771 NR Description: hypothetical protein At2g17010 [imported] -
  misc_feature (529)..(605): Homolog of NCBI NO: 25411771 NR Description: hypothetical protein At2g17010 [imported] -
  misc_feature (529)..(605): Homolog of NCBI NO: 30679840 NR Description: expressed protein [Arabidopsis thaliana]
  misc_feature (1)..(450): Homolog of NCBI NO: 25411771 NR Description: hypothetical protein At2g17010 [imported] -
  misc_feature (64)..(905): Homolog of NCBI NO: 15227342 NR Description: hypothetical protein; protein id: At2g17000.1
  misc_feature (1)..(83): Homolog of NCBI NO: 15227342 NR Description: hypothetical protein; protein id: At2g17000.1
  misc_feature (610)..(837): Homolog of NCBI NO: 25411771 NR Description: hypothetical protein At2g17010 [imported] -
  misc_feature (175)..(903): Homolog of NCBI NO: 15218429 NR Description: hypothetical protein; protein id: At1g78610.1
  misc_feature (55)..(906): Homolog of NCBI NO: 11994592 NR Description: gb|AAD30575.1~gene_id:T21E2.7~strong similarity
  misc_feature (55)..(683): Homolog of NCBI NO: 15231928 NR Description: hypothetical protein; protein id: At3g14810.1
MDFRNSFKSHSSYKQIRSPGDQSEPSPEHLPILHDHHPDHSGMVVDDQKPDSTRSSLDDGRNAPVERDASYKFWQDNTTGTSTDHTAVRTSDKDPIAISRKGDRLSGSFDFVHGKLPVDESPTKMVAGEPVNRQWRGRNNEEITLDVDQENDDVSHQTMPTPTSTARTSFDASREMRVSFNVRRAGGAFVAGSVPSSSSHSSSSSSATMRTNQDQPQLQEEEVVRCTSNMSFQRKSELISRVKTRSRLQDPPREEETPYSGWRSGQLKSGLLADIDEEDDPLAEEDVPDEYKRGKLDAITLLQWLSLVAIIAALACSLSIQSWKKVRVWNLHLWKWEVFLLVLICGRLVSGWGIRIVVFFIERNFLLRKRVLYFVYGVRRAVQNCLWLGLVLLAWHFLFDKKVQRETRSRFLPYVTKILVCFLLSTILWLIKTLVVKVLASSFHVSTYFDRIQEALFNQYVIETLSGPPMIEMSRIEEEEERAQDEIFKMQNAGANLPPDLCAAAFPPGKSGRVMNPKLSPIIPKSTTDNGISMEHLHRMNHKNISAWNMKRLMKIVRNVSLTTLDEQMLESTYEDESTRQIRSEKEAKAAARKIFKNVEQRGAKYIYLEDLMRFLREDEAMKTMGLFEGAPENKRISKSALKNWLVNAFRERRALALTLNDTKTAVNKLHHMINIVTAIVIVVIWLVLLEIASSKVLLFVSSQVVLLAFIFGNTVKTVFESIIFLFIVHPYDVGDRCEIDSVQLVVEEMNILTTVFLRYDNLKIMYPNSLLWQKSINNYYRSPDMGDAIEFCVHITTPLEKISVIKQRISNYIDNKPEYWYPQAKIIVKDLEDLHIVRLAIWPCHRINHQDMAERWTRRAVLVEEVIKILLELDIQHRFYPLDINVRTMPTVVSSRVPPGWSQNQPA

SEQ ID NO: 71047 - protein, 866 aa, Arabidopsis thaliana
  peptide (1)..(866): Ceres Seq. ID no. 3039483
  misc_feature (629)..(837): Pfam Name: Mechanosensitive ion channel Pfam Description: Mechanosensitive ion channel
  misc_feature (1)..(408): Homolog of NCBI NO: 25411771 NR Description: hypothetical protein At2g17010 [imported] -
  misc_feature (568)..(795): Homolog of NCBI NO: 25411771 NR Description: hypothetical protein At2g17010 [imported] -
  misc_feature (22)..(863): Homolog of NCBI NO: 15227342 NR Description: hypothetical protein; protein id: At2g17000.1
  misc_feature (1)..(41): Homolog of NCBI NO: 15227342 NR Description: hypothetical protein; protein id: At2g17000.1
  misc_feature (786)..(866): Homolog of NCBI NO: 25411771 NR Description: hypothetical protein At2g17010 [imported] -
  misc_feature (487)..(563): Homolog of NCBI NO: 25411771 NR Description: hypothetical protein At2g17010 [imported] -
  misc_feature (487)..(563): Homolog of NCBI NO: 30679840 NR Description: expressed protein [Arabidopsis thaliana]
  misc_feature (133)..(861): Homolog of NCBI NO: 15218429 NR Description: hypothetical protein; protein id: At1g78610.1
  misc_feature (13)..(864): Homolog of NCBI NO: 11994592 NR Description: gb|AAD30575.1~gene_id:T21E2.7~strong similarity
  misc_feature (13)..(641): Homolog of NCBI NO: 15231928 NR Description: hypothetical protein; protein id: At3g14810.1
MVVDDQKPDSTRSSLDDGRNAPVERDASYKFWQDNTTGTSTDHTAVRTSDKDPIAISRKGDRLSGSFDFVHGKLPVDESPTKMVAGEPVNRQWRGRNNEEITLDVDQENDDVSHQTMPTPTSTARTSFDASREMRVSFNVRRAGGAFVAGSVPSSSSHSSSSSSATMRTNQDQPQLQEEEVVRCTSNMSFQRKSELISRVKTRSRLQDPPREEETPYSGWRSGQLKSGLLADIDEEDDPLAEEDVPDEYKRGKLDAITLLQWLSLVAIIAALACSLSIQSWKKVRVWNLHLWKWEVFLLVLICGRLVSGWGIRIVVFFIERNFLLRKRVLYFVYGVRRAVQNCLWLGLVLLAWHFLFDKKVQRETRSRFLPYVTKILVCFLLSTILWLIKTLVVKVLASSFHVSTYFDRIQEALFNQYVIETLSGPPMIEMSRIEEEEERAQDEIFKMQNAGANLPPDLCAAAFPPGKSGRVMNPKLSPIIPKSTTDNGISMEHLHRMNHKNISAWNMKRLMKIVRNVSLTTLDEQMLESTYEDESTRQIRSEKEAKAAARKIFKNVEQRGAKYIYLEDLMRFLREDEAMKTMGLFEGAPENKRISKSALKNWLVNAFRERRALALTLNDTKTAVNKLHHMINIVTAIVIVVIWLVLLEIASSKVLLFVSSQVVLLAFIFGNTVKTVFESIIFLFIVHPYDVGDRCEIDSVQLVVEEMNILTTVFLRYDNLKIMYPNSLLWQKSINNYYRSPDMGDAIEFCVHITTPLEKISVIKQRISNYIDNKPEYWYPQAKIIVKDLEDLHIVRLAIWPCHRINHQDMAERWTRRAVLVEEVIKILLELDIQHRFYPLDINVRTMPTVVSSRVPPGWSQNQPA

SEQ ID NO: 71048 - protein, 784 aa, Arabidopsis thaliana
  peptide (1)..(784): Ceres Seq. ID no. 3039484
  misc_feature (547)..(755): Pfam Name: Mechanosensitive ion channel Pfam Description: Mechanosensitive ion channel
  misc_feature (1)..(326): Homolog of NCBI NO: 25411771 NR Description: hypothetical protein At2g17010 [imported] -
  misc_feature (486)..(713): Homolog of NCBI NO: 25411771 NR Description: hypothetical protein At2g17010 [imported] -
  misc_feature (1)..(781): Homolog of NCBI NO: 15227342 NR Description: hypothetical protein; protein id: At2g17000.1
  misc_feature (704)..(784): Homolog of NCBI NO: 25411771 NR Description: hypothetical protein At2g17010 [imported] -
  misc_feature (405)..(481): Homolog of NCBI NO: 25411771 NR Description: hypothetical protein At2g17010 [imported] -
  misc_feature (405)..(481): Homolog of NCBI NO: 30679840 NR Description: expressed protein [Arabidopsis thaliana]
  misc_feature (51)..(779): Homolog of NCBI NO: 15218429 NR Description: hypothetical protein; protein id: At1g78610.1
  misc_feature (1)..(782): Homolog of NCBI NO: 11994592 NR Description: gb|AAD30575.1~gene_id:T21E2.7~strong similarity
  misc_feature (1)..(559): Homolog of NCBI NO: 15231928 NR Description: hypothetical protein; protein id: At3g14810.1
  misc_feature (581)..(782): Homolog of NCBI NO: 15231928 NR Description: hypothetical protein; protein id: At3g14810.1
MVAGEPVNRQWRGRNNEEITLDVDQENDDVSHQTMPTPTSTARTSFDASREMRVSFNVRRAGGAFVAGSVPSSSSHSSSSSSATMRTNQDQPQLQEEEVVRCTSNMSFQRKSELISRVKTRSRLQDPPREEETPYSGWRSGQLKSGLLADIDEEDDPLAEEDVPDEYKRGKLDAITLLQWLSLVAIIAALACSLSIQSWKKVRVWNLHLWKWEVFLLVLICGRLVSGWGIRIVVFFIERNFLLRKRVLYFVYGVRRAVQNCLWLGLVLLAWHFLFDKKVQRETRSRFLPYVTKILVCFLLSTILWLIKTLVVKVLASSFHVSTYFDRIQEALFNQYVIETLSGPPMIEMSRIEEEEERAQDEIFKMQNAGANLPPDLCAAAFPPGKSGRVMNPKLSPIIPKSTTDNGISMEHLHRMNHKNISAWNMKRLMKIVRNVSLTTLDEQMLESTYEDESTRQIRSEKEAKAAARKIFKNVEQRGAKYIYLEDLMRFLREDEAMKTMGLFEGAPENKRISKSALKNWLVNAFRERRALALTLNDTKTAVNKLHHMINIVTAIVIVVIWLVLLEIASSKVLLFVSSQVVLLAFIFGNTVKTVFESIIFLFIVHPYDVGDRCEIDSVQLVVEEMNILTTVFLRYDNLKIMYPNSLLWQKSINNYYRSPDMGDAIEFCVHITTPLEKISVIKQRISNYIDNKPEYWYPQAKIIVKDLEDLHIVRLAIWPCHRINHQDMAERWTRRAVLVEEVIKILLELDIQHRFYPLDINVRTMPTVVSSRVPPGWSQNQPA

SEQ ID NO: 71049 - DNA, 1074 bp, Arabidopsis thaliana
  misc_feature (1)..(1074): Ceres Seq. ID no. 3039612
  misc_feature: MA Experiment ID: 20000180 Result: Down-regulated in Transcription
  misc_feature: MA Experiment 20000180 PARAMETER Experiment Name: At_Germinating_Seeds_P Parameter: Age (hr) Value: 24 vs. 0
  misc_feature: MA Experiment 20000180 PARAMETER Experiment Name: At_Germinating_Seeds_P Parameter: Tissue Value: Germinating Seeds
atggaggaaacaaaaatgagtttgcttgatgattcttttacaagtgcaatgacacttaccaattcaggtgtgcctcaagtccctgatcgctacgttcttcctccttcgcaaaggccagctcttggttcaagcttaggcaccagcgagactacacttcctgtcattgatctctctcttttgcaccaacctttccttcgatccctcgcaatccacgagattagcatggcctgcaaggagtttggtttctttcaggttataaaccatggaataccatcatcagtggttaacgatgccttagatgcagcaacacagttcttcgacttacctgtggaagagaagatgcttctggtgtctgcaaacgttcatgagccagtcaggtatggcacaagccttaaccattcaacagacagagttcactactggagagatttcatcaagcattactctcatccactctcaaagtggatcgatatgtggccatcaaatcctccatgctacaaggataaagtgggcaagtatgcagaggcaacacatttgctacacaagcagttaatagaagctatctcagaaagcctgggactggagaaaaattacttacaagaagagatagaagaaggctcacaagtcatggcagtgaattgttatccagcatgcccggaacctgaaatggccttgggaatgccaccacactcagacttcagctcactgaccatcttacttcagagtagcaagggactccagataatggactgcaacaaaaactgggtttgtgtgccgtatatagaaggagctttgatagttcagctgggagatcaggtagaggtgatgagcaacggcatatacaagagcgtcattcatcgtgtaacagtgaacaaagaagtcaaaaggctatcttttgcaagtcttcacagtctacctctgcacaagaaaataagtccagcaccaaaactcgtcaacccaaacaatgcaccagcctatggagagtttagtttcaacgattttctgaactacatctcaagcaacgattttatacaagaaagattcattgacacaataaagaaaagcagttcctaa

SEQ ID NO: 71050 - protein, 357 aa, Arabidopsis thaliana
  peptide (1)..(357): Ceres Seq. ID no. 3039613
  misc_feature (206)..(305): Pfam Name: 2OG-Fe(II) oxygenase superfamily Pfam Description: 2OG-Fe(II) oxygenase superfamily
  misc_feature (1)..(357): Homolog of NCBI NO: 30689834 NR Description: flavonol synthase family [Arabidopsis thaliana]
  misc_feature (6)..(357): Homolog of NCBI NO: 7433240 NR Description: probable flavonol synthase [imported] - thaliana >gi|20197022|gb|AAM14878.1| putative flavonol synthase
  misc_feature (167)..(356): Homolog of NCBI NO: 15232291 NR Description: SRG1 - like protein; protein id: At3g60290.1
  misc_feature (1)..(126): Homolog of NCBI NO: 15232291 NR Description: SRG1 - like protein; protein id: At3g60290.1
  misc_feature (85)..(353): Homolog of NCBI NO: 15240797 NR Description: putative protein; protein id: At5g07480.1
  misc_feature (52)..(353): Homolog of NCBI NO: 32488371 NR Description: OSJNBa0043A12.1 [Oryza sativa (japonica
  misc_feature (80)..(353): Homolog of NCBI NO: 15228020 NR Description: putative giberellin beta-hydroxylase; protein id: [Arabidopsis thaliana] >gi|25285698|pir||E84783 probable
  misc_feature (36)..(353): Homolog of NCBI NO: 32488372 NR Description: OSJNBa0043A12.2 [Oryza sativa (japonica
  misc_feature (27)..(353): Homolog of NCBI NO: 37536444 NR Description: unknown protein [Oryza sativa (japonica
  misc_feature (27)..(353): Homolog of NCBI NO: 38345872 NR Description: OSJNBa0064M23.14 [Oryza sativa (japonica
MEETKMSLLDDSFTSAMTLTNSGVPQVPDRYVLPPSQRPALGSSLGTSETTLPVIDLSLLHQPFLRSLAIHEISMACKEFGFFQVINHGIPSSVVNDALDAATQFFDLPVEEKMLLVSANVHEPVRYGTSLNHSTDRVHYWRDFIKHYSHPLSKWIDMWPSNPPCYKDKVGKYAEATHLLHKQLIEAISESLGLEKNYLQEEIEEGSQVMAVNCYPACPEPEMALGMPPHSDFSSLTILLQSSKGLQIMDCNKNWVCVPYIEGALIVQLGDQVEVMSNGIYKSVIHRVTVNKEVKRLSFASLHSLPLHKKISPAPKLVNPNNAPAYGEFSFNDFLNYISSNDFIQERFIDTIKKSSS

SEQ ID NO: 71051 - protein, 352 aa, Arabidopsis thaliana
  peptide (1)..(352): Ceres Seq. ID no. 3039614
  misc_feature (201)..(300): Pfam Name: 2OG-Fe(II) oxygenase superfamily Pfam Description: 2OG-Fe(II) oxygenase superfamily
  misc_feature (1)..(352): Homolog of NCBI NO: 30689834 NR Description: flavonol synthase family [Arabidopsis thaliana]
  misc_feature (1)..(352): Homolog of NCBI NO: 7433240 NR Description: probable flavonol synthase [imported] - thaliana >gi|20197022|gb|AAM14878.1| putative flavonol synthase
  misc_feature (162)..(351): Homolog of NCBI NO: 15232291 NR Description: SRG1 - like protein; protein id: At3g60290.1
  misc_feature (1)..(121): Homolog of NCBI NO: 15232291 NR Description: SRG1 - like protein; protein id: At3g60290.1
  misc_feature (80)..(348): Homolog of NCBI NO: 15240797 NR Description: putative protein; protein id: At5g07480.1
  misc_feature (47)..(348): Homolog of NCBI NO: 32488371 NR Description: OSJNBa0043A12.1 [Oryza sativa (japonica
  misc_feature (75)..(348): Homolog of NCBI NO: 15228020 NR Description: putative giberellin beta-hydroxylase; protein id: [Arabidopsis thaliana] >gi|25285698|pir||E84783 probable
  misc_feature (31)..(348): Homolog of NCBI NO: 32488372 NR Description: OSJNBa0043A12.2 [Oryza sativa (japonica
  misc_feature (22)..(348): Homolog of NCBI NO: 37536444 NR Description: unknown protein [Oryza sativa (japonica
  misc_feature (22)..(348): Homolog of NCBI NO: 38345872 NR Description: OSJNBa0064M23.14 [Oryza sativa (japonica
MSLLDDSFTSAMTLTNSGVPQVPDRYVLPPSQRPALGSSLGTSETTLPVIDLSLLHQPFLRSLAIHEISMACKEFGFFQVINHGIPSSVVNDALDAATQFFDLPVEEKMLLVSANVHEPVRYGTSLNHSTDRVHYWRDFIKHYSHPLSKWIDMWPSNPPCYKDKVGKYAEATHLLHKQLIEAISESLGLEKNYLQEEIEEGSQVMAVNCYPACPEPEMALGMPPHSDFSSLTILLQSSKGLQIMDCNKNWVCVPYIEGALIVQLGDQVEVMSNGIYKSVIHRVTVNKEVKRLSFASLHSLPLHKKISPAPKLVNPNNAPAYGEFSFNDFLNYISSNDFIQERFIDTIKKSSS

SEQ ID NO: 71052 - protein, 341 aa, Arabidopsis thaliana
  peptide (1)..(341): Ceres Seq. ID no. 3039615
  misc_feature (190)..(289): Pfam Name: 2OG-Fe(II) oxygenase superfamily Pfam Description: 2OG-Fe(II) oxygenase superfamily
  misc_feature (1)..(341): Homolog of NCBI NO: 30689834 NR Description: flavonol synthase family [Arabidopsis thaliana]
  misc_feature (1)..(341): Homolog of NCBI NO: 7433240 NR Description: probable flavonol synthase [imported] - thaliana >gi|20197022|gb|AAM14878.1| putative flavonol synthase
  misc_feature (151)..(340): Homolog of NCBI NO: 15232291 NR Description: SRG1 - like protein; protein id: At3g60290.1
  misc_feature (1)..(110): Homolog of NCBI NO: 15232291 NR Description: SRG1 - like protein; protein id: At3g60290.1
  misc_feature (69)..(337): Homolog of NCBI NO: 15240797 NR Description: putative protein; protein id: At5g07480.1
  misc_feature (36)..(337): Homolog of NCBI NO: 32488371 NR Description: OSJNBa0043A12.1 [Oryza sativa (japonica
  misc_feature (64)..(337): Homolog of NCBI NO: 15228020 NR Description: putative giberellin beta-hydroxylase; protein id: [Arabidopsis thaliana] >gi|25285698|pir||E84783 probable
  misc_feature (20)..(337): Homolog of NCBI NO: 32488372 NR Description: OSJNBa0043A12.2 [Oryza sativa (japonica
  misc_feature (11)..(337): Homolog of NCBI NO: 37536444 NR Description: unknown protein [Oryza sativa (japonica
  misc_feature (11)..(337): Homolog of NCBI NO: 38345872 NR Description: OSJNBa0064M23.14 [Oryza sativa (japonica
MTLTNSGVPQVPDRYVLPPSQRPALGSSLGTSETTLPVIDLSLLHQPFLRSLAIHEISMACKEFGFFQVINHGIPSSVVNDALDAATQFFDLPVEEKMLLVSANVHEPVRYGTSLNHSTDRVHYWRDFIKHYSHPLSKWIDMWPSNPPCYKDKVGKYAEATHLLHKQLIEAISESLGLEKNYLQEEIEEGSQVMAVNCYPACPEPEMALGMPPHSDFSSLTILLQSSKGLQIMDCNKNWVCVPYIEGALIVQLGDQVEVMSNGIYKSVIHRVTVNKEVKRLSFASLHSLPLHKKISPAPKLVNPNNAPAYGEFSFNDFLNYISSNDFIQERFIDTIKKSSS

SEQ ID NO: 71053 - DNA, 495 bp, Arabidopsis thaliana
  misc_feature (1)..(495): Ceres Seq. ID no. 3039824
  misc_feature: MA Experiment ID: 20000314 Result: Down-regulated in Transcription
  misc_feature: MA Experiment 20000314 PARAMETER Experiment Name: At_14day_Shoots-Roots_Sub_P Parameter: Age (day) Value: 14
  misc_feature: MA Experiment 20000314 PARAMETER Experiment Name: At_14day_Shoots-Roots_Sub_P Parameter: Organism Value: A. thaliana
  misc_feature: MA Experiment 20000314 PARAMETER Experiment Name: At_14day_Shoots-Roots_Sub_P Parameter: Plant Line Value: WS
  misc_feature: MA Experiment 20000314 PARAMETER Experiment Name: At_14day_Shoots-Roots_Sub_P Parameter: Tissue Value: Roots vs. Whole Plant
  misc_feature: MA Experiment ID: 20000328 Result: Down-regulated in Transcription
  misc_feature: MA Experiment 20000328 PARAMETER Experiment Name: At_42deg_Heat_Sub_P Parameter: Age (day) Value: 14
  misc_feature: MA Experiment 20000328 PARAMETER Experiment Name: At_42deg_Heat_Sub_P Parameter: Organism Value: A. thaliana
  misc_feature: MA Experiment 20000328 PARAMETER Experiment Name: At_42deg_Heat_Sub_P Parameter: Plant Line Value: WS
  misc_feature: MA Experiment 20000328 PARAMETER Experiment Name: At_42deg_Heat_Sub_P Parameter: Temperature (deg C) Value: 42 vs. 22
  misc_feature: MA Experiment 20000328 PARAMETER Experiment Name: At_42deg_Heat_Sub_P Parameter: Timepoint (hr) Value: 6
  misc_feature: MA Experiment 20000328 PARAMETER Experiment Name: At_42deg_Heat_Sub_P Parameter: Tissue Value: Aerial
  misc_feature: MA Experiment ID: 20000349 Result: Down-regulated in Transcription
  misc_feature: MA Experiment 20000349 PARAMETER Experiment Name: At_100uM_ABA_Sub_P Parameter: Age (day) Value: 14
  misc_feature: MA Experiment 20000349 PARAMETER Experiment Name: At_100uM_ABA_Sub_P Parameter: Organism Value: A. thaliana
  misc_feature: MA Experiment 20000349 PARAMETER Experiment Name: At_100uM_ABA_Sub_P Parameter: Plant Line Value: WS
  misc_feature: MA Experiment 20000349 PARAMETER Experiment Name: At_100uM_ABA_Sub_P Parameter: Timepoint (hr) Value: 6
  misc_feature: MA Experiment 20000349 PARAMETER Experiment Name: At_100uM_ABA_Sub_P Parameter: Tissue Value: Aerial
  misc_feature: MA Experiment 20000349 PARAMETER Experiment Name: At_100uM_ABA_Sub_P Parameter: Treatment Value: 100uM ABA vs. No Treatment
  misc_feature: MA Experiment ID: 20000355 Result: Down-regulated in Transcription
  misc_feature: MA Experiment 20000355 PARAMETER Experiment Name: At_Siliques_Sub_P Parameter: Age (day) Value: 21
  misc_feature: MA Experiment 20000355 PARAMETER Experiment Name: At_Siliques_Sub_P Parameter: Organism Value: A. thaliana
  misc_feature: MA Experiment 20000355 PARAMETER Experiment Name: At_Siliques_Sub_P Parameter: Plant Line Value: WS
  misc_feature: MA Experiment 20000355 PARAMETER Experiment Name: At_Siliques_Sub_P Parameter: Tissue Value: Less Than 5mm Siliques vs. Whole Plant
atggctaactctgtgatggcaaccgaacagctctgctacatcccttgcaacttttgcaacataattcttgcggtgaatgtcccatgcagcagcctgttcgacatcgtgaccgtccgatgcggtcactgcaccaatctgtggtctgtaaacatggcagctgctcttcagtcgctttcacgccctaatttccaggcaacaaactatgcagtaccagagtatggatcctcctcaagaagccacacaaaaatcccttcaagaatttcaactcgtaccataactgagcaacggattgtaaaccgtcctccggagaagcggcagcgagtaccttctgcgtacaatcaattcataaaagaggaaattcagaggattaaggcgaataatccagacataagccacagagaagcattcagcactgctgccaagaattgggcacactttcctcatattcactttggtctaatgctggagagtaacaagcaagctaagatagcctaa

SEQ ID NO: 71054 - protein, 164 aa, Arabidopsis thaliana
  peptide (1)..(164): Ceres Seq. ID no. 3039825
  misc_feature (2)..(153): Pfam Name: YABBY protein Pfam Description: YABBY protein
  misc_feature (1)..(164): Homolog of NCBI NO: 30683176 NR Description: expressed protein [Arabidopsis thaliana] expressed protein [Arabidopsis thaliana] unknown protein [Arabidopsis thaliana]
  misc_feature (2)..(160): Homolog of NCBI NO: 11280864 NR Description: hypothetical protein 2 [imported] - rice
  misc_feature (7)..(162): Homolog of NCBI NO: 4928751 NR Description: YABBY2 [Arabidopsis thaliana]
  misc_feature (98)..(154): Homolog of NCBI NO: 32330677 NR Description: yabby15 protein [Zea mays]
  misc_feature (8)..(61): Homolog of NCBI NO: 32330677 NR Description: yabby15 protein [Zea mays]
  misc_feature (51)..(154): Homolog of NCBI NO: 37535908 NR Description: hypothetical protein [Oryza sativa (japonica group)] >gi|22267600|gb|AAM94935.1| putative transcription factor
  misc_feature (9)..(55): Homolog of NCBI NO: 37535908 NR Description: hypothetical protein [Oryza sativa (japonica group)] >gi|22267600|gb|AAM94935.1| putative transcription factor
  misc_feature (2)..(71): Homolog of NCBI NO: 32330681 NR Description: yabby10 protein [Zea mays]
  misc_feature (98)..(154): Homolog of NCBI NO: 32330681 NR Description: yabby10 protein [Zea mays]
  misc_feature (99)..(163): Homolog of NCBI NO: 18411242 NR Description: putative YABBY3 axial regulator; protein id: supported by cDNA: gi_14335013, supported by cDNA: gi_4928752 thaliana] >gi|4928753|gb|AAD33717.1|AF136540_1 YABBY3
MANSVMATEQLCYIPCNFCNIILAVNVPCSSLFDIVTVRCGHCTNLWSVNMAAALQSLSRPNFQATNYAVPEYGSSSRSHTKIPSRISTRTITEQRIVNRPPEKRQRVPSAYNQFIKEEIQRIKANNPDISHREAFSTAAKNWAHFPHIHFGLMLESNKQAKIA

SEQ ID NO: 71055 - protein, 159 aa, Arabidopsis thaliana
  peptide (1)..(159): Ceres Seq. ID no. 3039826
  misc_feature (1)..(148): Pfam Name: YABBY protein Pfam Description: YABBY protein
  misc_feature (1)..(159): Homolog of NCBI NO: 30683176 NR Description: expressed protein [Arabidopsis thaliana] expressed protein [Arabidopsis thaliana] unknown protein [Arabidopsis thaliana]
  misc_feature (1)..(155): Homolog of NCBI NO: 11280864 NR Description: hypothetical protein 2 [imported] - rice
  misc_feature (2)..(157): Homolog of NCBI NO: 4928751 NR Description: YABBY2 [Arabidopsis thaliana]
  misc_feature (93)..(149): Homolog of NCBI NO: 32330677 NR Description: yabby15 protein [Zea mays]
  misc_feature (3)..(56): Homolog of NCBI NO: 32330677 NR Description: yabby15 protein [Zea mays]
  misc_feature (46)..(149): Homolog of NCBI NO: 37535908 NR Description: hypothetical protein [Oryza sativa (japonica group)] >gi|22267600|gb|AAM94935.1| putative transcription factor
  misc_feature (4)..(50): Homolog of NCBI NO: 37535908 NR Description: hypothetical protein [Oryza sativa (japonica group)] >gi|22267600|gb|AAM94935.1| putative transcription factor
  misc_feature (1)..(66): Homolog of NCBI NO: 32330681 NR Description: yabby10 protein [Zea mays]
  misc_feature (93)..(149): Homolog of NCBI NO: 32330681 NR Description: yabby10 protein [Zea mays]
  misc_feature (94)..(158): Homolog of NCBI NO: 18411242 NR Description: putative YABBY3 axial regulator; protein id: supported by cDNA: gi_14335013, supported by cDNA: gi_4928752 thaliana] >gi|4928753|gb|AAD33717.1|AF136540_1 YABBY3
MATEQLCYIPCNFCNIILAVNVPCSSLFDIVTVRCGHCTNLWSVNMAAALQSLSRPNFQATNYAVPEYGSSSRSHTKIPSRISTRTITEQRIVNRPPEKRQRVPSAYNQFIKEEIQRIKANNPDISHREAFSTAAKNWAHFPHIHFGLMLESNKQAKIA

SEQ ID NO: 71056 - protein, 114 aa, Arabidopsis thaliana
  peptide (1)..(114): Ceres Seq. ID no. 3039827
  misc_feature (1)..(103): Pfam Name: YABBY protein Pfam Description: YABBY protein
  misc_feature (1)..(114): Homolog of NCBI NO: 30683176 NR Description: expressed protein [Arabidopsis thaliana] expressed protein [Arabidopsis thaliana] unknown protein [Arabidopsis thaliana]
  misc_feature (1)..(110): Homolog of NCBI NO: 11280864 NR Description: hypothetical protein 2 [imported] - rice
  misc_feature (1)..(112): Homolog of NCBI NO: 4928751 NR Description: YABBY2 [Arabidopsis thaliana]
  misc_feature (48)..(104): Homolog of NCBI NO: 32330677 NR Description: yabby15 protein [Zea mays]
  misc_feature (1)..(11): Homolog of NCBI NO: 32330677 NR Description: yabby15 protein [Zea mays]
  misc_feature (1)..(104): Homolog of NCBI NO: 37535908 NR Description: hypothetical protein [Oryza sativa (japonica group)] >gi|22267600|gb|AAM94935.1| putative transcription factor
  misc_feature (1)..(21): Homolog of NCBI NO: 32330681 NR Description: yabby10 protein [Zea mays]
  misc_feature (48)..(104): Homolog of NCBI NO: 32330681 NR Description: yabby10 protein [Zea mays]
  misc_feature (49)..(113): Homolog of NCBI NO: 18411242 NR Description: putative YABBY3 axial regulator; protein id: supported by cDNA: gi_14335013, supported by cDNA: gi_4928752 thaliana] >gi|4928753|gb|AAD33717.1|AF136540_1 YABBY3
  misc_feature (1)..(12): Homolog of NCBI NO: 18411242 NR Description: putative YABBY3 axial regulator; protein id: supported by cDNA: gi_14335013, supported by cDNA: gi_4928752 thaliana] >gi|4928753|gb|AAD33717.1|AF136540_1 YABBY3
MAAALQSLSRPNFQATNYAVPEYGSSSRSHTKIPSRISTRTITEQRIVNRPPEKRQRVPSAYNQFIKEEIQRIKANNPDISHREAFSTAAKNWAHFPHIHFGLMLESNKQAKIA

SEQ ID NO: 71057 - DNA, 1584 bp, Arabidopsis thaliana
  misc_feature (1)..(1584): Ceres Seq. ID no. 3040245
  misc_feature: MA Experiment ID: 20000227 Result: Up-regulated in Transcription
  misc_feature: MA Experiment 20000227 PARAMETER Experiment Name: At_Root-Tips-vs-Tops_P Parameter: Tissue Value: Root Tips vs. Root Tops
atggcgtcttttctccgagtcatcgttctgtcatgggcttttaccgttgcgtggtttaccctctggatgttgatgctatacttgacgaacgagatgaagctaaagttcacagacgcagctgcgattgtaaatgtgtttgctggtgtatcagctattggtcatcttggcatgcaatttcttgttgatgcatttattggtcacttttggatgctctgtctctctactttagcattcagtttcggtttcgggttcttggcaatatcagcgtcaccaatactttcaggcaatggacaaaagggcctgttctacgtagcgctaacggttatatccgttggtatatttggacggtctatctctttgggagtatttacagaagaccaactagaagacggtaggaacaagggaaaccccgccaagctcgttagctttgtcattggaaatgtggggaattttgtgttcttgttacttgctgctattgcaatgcctcagataagtccgtggtttgttaggttcacgatcccctcgggctgtgaggtattagcaatgctgatttttatttccggtgcgtgttcatacaaacgggttaaaccaggtgggagccctttgacaacggttttccgggtctttatggcttctgcttccaaaatgtcttgtgcatactcgaacaactcaagccagctctatgaaaaagctgagtgtgatcaagatattaagccccacacaagcagcttaaggtatctagatagagctgcaatgatactccaaacagagtctttggaacaacagaggaaaaacagatggaagctttgtcgggtgacagaagtggagcaaacgaaaagcgtcatacgcacggttcctttgtttgcgacatctctcatttcggggattgtcttctctcttggtaatactttcttccttgaacaagcaaaccatatggactccaagttcggatcatggaaccttcctctcccactcctcttactctttagtgaagctgcaaggctaggatcccgagaactatgtgtcatggctgcaaaacgccatgccattgacttccctgaatcacctaaacaaaccaaaacgccttatggtataccagtctccatcatcctatcgatattttgctgctccatcgctgcacatgttgagtctaggaggctcaaagtagttagtactcaaggtttactacatgaaactgtccccatgagtgtattctggctgctcccacagtacattctactcggttcaatcacaggaatctacgaaaacagctttgcgctttacctagaagaaacggtgcctgaagagttgagccaatacatggttctattaaacgtgggagtgtgcggggtcgggatcatgagcaacattgctcttgttagtttggtgggcagtgtaagcggaggcaaatggtttcaagacacaataaacaagagccgggtggataactattattgggttataacagtgttttgcatgttcaatctcttgttatatttcattgtaacctataggtacacagtgtgtaacaagaaagatggtgcaacacaagaaaatgatcgaaggataatcgcttctgtgtag

SEQ ID NO: 71058 - protein, 527 aa, Arabidopsis thaliana
  peptide (1)..(527): Ceres Seq. ID no. 3040246
  misc_feature (68)..(453): Pfam Name: POT family Pfam Description: POT family
  misc_feature (9)..(527): Homolog of NCBI NO: 15224443 NR Description: putative peptide/amino acid transporter; protein At2g38100.1 [Arabidopsis thaliana] >gi|3335358|gb|AAC27159.1|
  misc_feature (9)..(527): Homolog of NCBI NO: 25455895 NR Description: peptide transport protein homolog At2g38100 -
  misc_feature (7)..(521): Homolog of NCBI NO: 34897398 NR Description: putative peptide transport protein [Oryza sativa
  misc_feature (5)..(521): Homolog of NCBI NO: 11358594 NR Description: oligopeptide transporter-like protein -
  misc_feature (51)..(517): Homolog of NCBI NO: 34394155 NR Description: putative peptide transport protein [Oryza sativa
  misc_feature (51)..(506): Homolog of NCBI NO: 15232435 NR Description: peptide transport - like protein; protein id: supported by cDNA: 117581., supported by cDNA: gi_13430485,
  misc_feature (88)..(512): Homolog of NCBI NO: 9581819 NR Description: putative low-affinity nitrate transporter
  misc_feature (88)..(512): Homolog of NCBI NO: 28273096 NR Description: nitrate transporter [Nicotiana tabacum]
  misc_feature (88)..(512): Homolog of NCBI NO: 28273100 NR Description: nitrate transporter [Nicotiana tabacum]
  misc_feature (24)..(507): Homolog of NCBI NO: 34907736 NR Description: putative peptide transport protein [Oryza sativa
MASFLRVIVLSWAFTVAWFTLWMLMLYLTNEMKLKFTDAAAIVNVFAGVSAIGHLGMQFLVDAFIGHFWMLCLSTLAFSFGFGFLAISASPILSGNGQKGLFYVALTVISVGIFGRSISLGVFTEDQLEDGRNKGNPAKLVSFVIGNVGNFVFLLLAAIAMPQISPWFVRFTIPSGCEVLAMLIFISGACSYKRVKPGGSPLTTVFRVFMASASKMSCAYSNNSSQLYEKAECDQDIKPHTSSLRYLDRAAMILQTESLEQQRKNRWKLCRVTEVEQTKSVIRTVPLFATSLISGIVFSLGNTFFLEQANHMDSKFGSWNLPLPLLLLFSEAARLGSRELCVMAAKRHAIDFPESPKQTKTPYGIPVSIILSIFCCSIAAHVESRRLKVVSTQGLLHETVPMSVFWLLPQYILLGSITGIYENSFALYLEETVPEELSQYMVLLNVGVCGVGIMSNIALVSLVGSVSGGKWFQDTINKSRVDNYYWVITVFCMFNLLLYFIVTYRYTVCNKKDGATQENDRRIIASV

SEQ ID NO: 71059 - protein, 505 aa, Arabidopsis thaliana; identical to SEQ ID NO: 70420
  peptide (1)..(505): Ceres Seq. ID no. 3040247
  misc_feature (46)..(431): Pfam Name: POT family Pfam Description: POT family
  misc_feature (1)..(505): Homolog of NCBI NO: 15224443 NR Description: putative peptide/amino acid transporter; protein At2g38100.1 [Arabidopsis thaliana] >gi|3335358|gb|AAC27159.1|
  misc_feature (1)..(505): Homolog of NCBI NO: 25455895 NR Description: peptide transport protein homolog At2g38100 -
  misc_feature (1)..(499): Homolog of NCBI NO: 34897398 NR Description: putative peptide transport protein [Oryza sativa
  misc_feature (1)..(499): Homolog of NCBI NO: 11358594 NR Description: oligopeptide transporter-like protein -
  misc_feature (29)..(495): Homolog of NCBI NO: 34394155 NR Description: putative peptide transport protein [Oryza sativa
  misc_feature (29)..(484): Homolog of NCBI NO: 15232435 NR Description: peptide transport - like protein; protein id: supported by cDNA: 117581., supported by cDNA: gi_13430485,
  misc_feature (66)..(490): Homolog of NCBI NO: 9581819 NR Description: putative low-affinity nitrate transporter
  misc_feature (66)..(490): Homolog of NCBI NO: 28273096 NR Description: nitrate transporter [Nicotiana tabacum]
  misc_feature (66)..(490): Homolog of NCBI NO: 28273100 NR Description: nitrate transporter [Nicotiana tabacum]
  misc_feature (2)..(485): Homolog of NCBI NO: 34907736 NR Description: putative peptide transport protein [Oryza sativa

SEQ ID NO: 71060 - protein, 503 aa, Arabidopsis thaliana; identical to SEQ ID NO: 70421
  peptide (1)..(503): Ceres Seq. ID no. 3040248
  misc_feature (44)..(429): Pfam Name: POT family Pfam Description: POT family
  misc_feature (1)..(503): Homolog of NCBI NO: 15224443 NR Description: putative peptide/amino acid transporter; protein At2g38100.1 [Arabidopsis thaliana] >gi|3335358|gb|AAC27159.1|
  misc_feature (1)..(503): Homolog of NCBI NO: 25455895 NR Description: peptide transport protein homolog At2g38100 -
  misc_feature (1)..(497): Homolog of NCBI NO: 34897398 NR Description: putative peptide transport protein [Oryza sativa
  misc_feature (1)..(497): Homolog of NCBI NO: 11358594 NR Description: oligopeptide transporter-like protein -
  misc_feature (27)..(493): Homolog of NCBI NO: 34394155 NR Description: putative peptide transport protein [Oryza sativa
  misc_feature (27)..(482): Homolog of NCBI NO: 15232435 NR Description: peptide transport - like protein; protein id: supported by cDNA: 117581., supported by cDNA: gi_13430485,
  misc_feature (64)..(488): Homolog of NCBI NO: 9581819 NR Description: putative low-affinity nitrate transporter
  misc_feature (64)..(488): Homolog of NCBI NO: 28273096 NR Description: nitrate transporter [Nicotiana tabacum]
  misc_feature (64)..(488): Homolog of NCBI NO: 28273100 NR Description: nitrate transporter [Nicotiana tabacum]
  misc_feature (1)..(483): Homolog of NCBI NO: 34907736 NR Description: putative peptide transport protein [Oryza sativa

SEQ ID NO: 71061 - DNA, 1032 bp, Arabidopsis thaliana
  misc_feature (1)..(1032): Ceres Seq. ID no. 3041857
  misc_feature: MA Experiment ID: 20000306 Result: Up-regulated in Transcription
  misc_feature: MA Experiment 20000306 PARAMETER Experiment Name: At_Germinating_Seeds_Sub_P Parameter: Age (hr) Value: 6 vs. 0
  misc_feature: MA Experiment 20000306 PARAMETER Experiment Name: At_Germinating_Seeds_Sub_P Parameter: Organism Value: A. thaliana
  misc_feature: MA Experiment 20000306 PARAMETER Experiment Name: At_Germinating_Seeds_Sub_P Parameter: Plant Line Value: WS
  misc_feature: MA Experiment 20000306 PARAMETER Experiment Name: At_Germinating_Seeds_Sub_P Parameter: Tissue Value: Germinating Seeds
  misc_feature: MA Experiment ID: 20000307 Result: Up-regulated in Transcription
  misc_feature: MA Experiment 20000307 PARAMETER Experiment Name: At_Germinating_Seeds_Sub_P Parameter: Age (hr) Value: 24 vs. 0
  misc_feature: MA Experiment 20000307 PARAMETER Experiment Name: At_Germinating_Seeds_Sub_P Parameter: Organism Value: A. thaliana
  misc_feature: MA Experiment 20000307 PARAMETER Experiment Name: At_Germinating_Seeds_Sub_P Parameter: Plant Line Value: WS
  misc_feature: MA Experiment 20000307 PARAMETER Experiment Name: At_Germinating_Seeds_Sub_P Parameter: Tissue Value: Germinating Seeds
atggtgattcaaacgaatctctcatatcgtttcttcatcttaattgtgtttttatttaccctagcgaatccaaaatcagattcagatctcaaaaacgaactagtctccctccgatcaaccgccgaatcaggcgtgatctccttcaacaacgacgacgtttccaaattcataacctccgtatccactcctagaccttactcactcatcatcttcttcgacgccgttcatctccacggcaatagccagctacgtcttccagagttccgccgcgaattcagactcgtctccgccactttcatcaccaacaacaacaatgaatctaacggcacaaagctcttcttctgcgagatcgaatcaactcactccgaggcttctttccgccgcttcgccgtcgagtcactaccacacatttccctcgttagccccacgacagagaatttaacagaatcagatcaaatggacggtggagatttcactggattagccgaatcaatggcagagttcgtcgaacgtcaaacaaaactcaccgtttgttcaatccaacgaccaccactcatatcaaagacacaaatcggaatcatcgttgctataatcataatctcgactccgattctcatcaagaagattctaaaaggagaaacacttctccatgaccatagaatctggttagttggcgcggttttcgtctacttcttcagcgtctcggggacaatgcataacatcattagagaaatgccaatgtatatcaaagattatgaagattcaagtaagtttgttttctttatagaagaatcagagatgcagcttggagcagaaggtttctttgtagggtttttgtatactgttgttggattgcttttggcgtttgttactaatgtagttgtacgagtcaagaaactcgatgagcaaaggatggctatgcttttggctctgtctatatcgttttgggctgtgaggaaagttgtttacttggataattggaagactggttatgaaatttacccatattggccatcgagttggcggggatga

SEQ ID NO: 71062 - protein, 343 aa, Arabidopsis thaliana
  peptide (1)..(343): Ceres Seq. ID no. 3041858
  misc_feature (17)..(317): Pfam Name: OST3 / OST6 family Pfam Description: OST3 / OST6 family
  misc_feature (13)..(342): Homolog of NCBI NO: 14091860 NR Description: Putative protein with similarity to putative
  misc_feature (1)..(343): Homolog of NCBI NO: 15220421 NR Description: hypothetical protein; protein id: At1g11560.1
  misc_feature (1)..(317): Homolog of NCBI NO: 25402667 NR Description: protein T23J18.22 [imported] - Arabidopsis >gi|6554189|gb|AAF16635.1|AC011661_13 T23J18.22 [Arabidopsis
  misc_feature (1)..(342): Homolog of NCBI NO: 15220609 NR Description: hypothetical protein; protein id: At1g61790.1
MVIQTNLSYRFFILIVFLFTLANPKSDSDLKNELVSLRSTAESGVISFNNDDVSKFITSVSTPRPYSLIIFFDAVHLHGNSQLRLPEFRREFRLVSATFITNNNNESNGTKLFFCEIESTHSEASFRRFAVESLPHISLVSPTTENLTESDQMDGGDFTGLAESMAEFVERQTKLTVCSIQRPPLISKTQIGIIVAIIIISTPILIKKILKGETLLHDHRIWLVGAVFVYFFSVSGTMHNIIREMPMYIKDYEDSSKFVFFIEESEMQLGAEGFFVGFLYTVVGLLLAFVTNVVVRVKKLDEQRMAMLLALSISFWAVRKVVYLDNWKTGYEIYPYWPSSWRG

SEQ ID NO: 71063 - protein, 191 aa, Arabidopsis thaliana
  peptide (1)..(191): Ceres Seq. ID no. 3041859
  misc_feature (1)..(165): Pfam Name: OST3 / OST6 family Pfam Description: OST3 / OST6 family
  misc_feature (1)..(191): Homolog of NCBI NO: 15220421 NR Description: hypothetical protein; protein id: At1g11560.1
  misc_feature (1)..(165): Homolog of NCBI NO: 25402667 NR Description: protein T23J18.22 [imported] - Arabidopsis >gi|6554189|gb|AAF16635.1|AC011661_13 T23J18.22 [Arabidopsis
  misc_feature (1)..(190): Homolog of NCBI NO: 15220609 NR Description: hypothetical protein; protein id: At1g61790.1
  misc_feature (1)..(190): Homolog of NCBI NO: 14091860 NR Description: Putative protein with similarity to putative
MDGGDFTGLAESMAEFVERQTKLTVCSIQRPPLISKTQIGIIVAIIIISTPILIKKILKGETLLHDHRIWLVGAVFVYFFSVSGTMHNIIREMPMYIKDYEDSSKFVFFIEESEMQLGAEGFFVGFLYTVVGLLLAFVTNVVVRVKKLDEQRMAMLLALSISFWAVRKVVYLDNWKTGYEIYPYWPSSWRG

SEQ ID NO: 71064 - protein, 179 aa, Arabidopsis thaliana
  peptide (1)..(179): Ceres Seq. ID no. 3041860
  misc_feature (1)..(153): Pfam Name: OST3 / OST6 family Pfam Description: OST3 / OST6 family
  misc_feature (1)..(179): Homolog of NCBI NO: 15220421 NR Description: hypothetical protein; protein id: At1g11560.1
  misc_feature (1)..(153): Homolog of NCBI NO: 25402667 NR Description: protein T23J18.22 [imported] - Arabidopsis >gi|6554189|gb|AAF16635.1|AC011661_13 T23J18.22 [Arabidopsis
  misc_feature (1)..(178): Homolog of NCBI NO: 15220609 NR Description: hypothetical protein; protein id: At1g61790.1
  misc_feature (1)..(178): Homolog of NCBI NO: 14091860 NR Description: Putative protein with similarity to putative
MAEFVERQTKLTVCSIQRPPLISKTQIGIIVAIIIISTPILIKKILKGETLLHDHRIWLVGAVFVYFFSVSGTMHNIIREMPMYIKDYEDSSKFVFFIEESEMQLGAEGFFVGFLYTVVGLLLAFVTNVVVRVKKLDEQRMAMLLALSISFWAVRKVVYLDNWKTGYEIYPYWPSSWRG

SEQ ID NO: 71065 - DNA, 1086 bp, Arabidopsis thaliana
  misc_feature (1)..(1086): Ceres Seq. ID no. 3042231
  misc_feature: MA Experiment ID: 108474 Result: Down-regulated in Transcription
  misc_feature: MA Experiment 108474 PARAMETER Experiment Name: At_Drought_Flowers_cDNA_P Parameter: Timepoint (hr) Value: null
  misc_feature: MA Experiment 108474 PARAMETER Experiment Name: At_Drought_Flowers_cDNA_P Parameter: Treatment Value: Drought vs. No Drought
  misc_feature: MA Experiment ID: 20000440 Result: Up-regulated in Transcription
  misc_feature: MA Experiment 20000440 PARAMETER Experiment Name: At_Closed-Flower__Sub_P Parameter: Tissue Value: Closed Flower vs. Whole Plant
atgggatacacaaatgtgtccattttattaggcctgttgatggtctttgttacaccgatggtgttcgcagatgatgtgacaccaatcccagagggcaaaccccaagtggcgcagtggttcaatgccaacgttggtccattggctcaacgtaaaggcttagatcctgctcttgtagctgctgaggctgctccacgtatcatcaacgtgaatccaaagggtggtgaattcaaaacactaacggacgcaataaagagcgttcctgcagggaacacaaagcgggtgatcataaagatggctcctggtgaatacaaagagaaggtcactatcgacaggaacaaacccttcattacattgatgggacaacccaatgccatgcctgttatcacctatgacggtaccgccgccaagtatggaaccgttgatagcgcctctctcattatcttatccgactatttcatggccgttaacatcgtcgttaagaacactgcgccggcaccagatggtaaaactaagggagcacaagctttatccatgagaatctccggaaattttgctgctttctacaactgcaaattctacggtttccaagacacaatctgtgacgatacaggaaaccatttcttcaaggattgttacgttgaaggaacattcgatttcatcttcggaagtggaacctctatgtacttgggaacacaattgcacgtggttggagacggtattagagtgatagcagcgcatgcaggaaagagcgcagaagagaagagtggatactctttcgtgcactgcaaggtgactggaaccggtggaggaatttatttgggaagagcatggatgagccaccctaaggttgtttatgcctacaccgagatgaccagcgttgtcaaccccaccggatggcaagaaaacaagactcccgcacatgacaaaaccgtgttctacggagagtacaagtgttcaggaccaggatcacacaaagccaagagagtaccattcacacaagacattgacgacaaagaagctaaccgtttcctatccctcggctacatccaaggatccaagtggcttctcccaccacccgctttgtaa

SEQ ID NO: 71066 - protein, 361 aa, Arabidopsis thaliana
  peptide (1)..(361): Ceres Seq. ID no. 3042232
  misc_feature (74)..(352): Pfam Name: Pectinesterase Pfam Description: Pectinesterase
  misc_feature (1)..(361): Homolog of NCBI NO: 30697951 NR Description: pectinesterase family [Arabidopsis thaliana]
  misc_feature (1)..(361): Homolog of NCBI NO: 18415486 NR Description: pectinesterase family; protein id: At5g07410.1,
  misc_feature (20)..(361): Homolog of NCBI NO: 11358603 NR Description: pectin methyl-esterase-like protein - Arabidopsis
  misc_feature (20)..(361): Homolog of NCBI NO: 21593398 NR Description: pectin methyl-esterase-like protein [Arabidopsis
  misc_feature (20)..(361): Homolog of NCBI NO: 25404855 NR Description: probable pectin methylesterase T17F3.3 [imported] Arabidopsis thaliana >gi|12325236|gb|AAG52566.1|AC010675_14
  misc_feature (1)..(360): Homolog of NCBI NO: 9758483 NR Description: pectin methylesterase-like protein [Arabidopsis
  misc_feature (68)..(360): Homolog of NCBI NO: 15240325 NR Description: pectinesterase family; protein id: At5g61680.1
  misc_feature (1)..(44): Homolog of NCBI NO: 15240325 NR Description: pectinesterase family; protein id: At5g61680.1
  misc_feature (1)..(360): Homolog of NCBI NO: 15240781 NR Description: pectinesterase family; protein id: At5g07420.1,
  misc_feature (1)..(359): Homolog of NCBI NO: 15240792 NR Description: pectinesterase family; protein id: At5g07430.1
MGYTNVSILLGLLMVFVTPMVFADDVTPIPEGKPQVAQWFNANVGPLAQRKGLDPALVAAEAAPRIINVNPKGGEFKTLTDAIKSVPAGNTKRVIIKMAPGEYKEKVTIDRNKPFITLMGQPNAMPVITYDGTAAKYGTVDSASLIILSDYFMAVNIVVKNTAPAPDGKTKGAQALSMRISGNFAAFYNCKFYGFQDTICDDTGNHFFKDCYVEGTFDFIFGSGTSMYLGTQLHVVGDGIRVIAAHAGKSAEEKSGYSFVHCKVTGTGGGIYLGRAWMSHPKVVYAYTEMTSVVNPTGWQENKTPAHDKTVFYGEYKCSGPGSHKAKRVPFTQDIDDKEANRFLSLGYIQGSKWLLPPPAL

SEQ ID NO: 71067 - protein, 348 aa, Arabidopsis thaliana
  peptide (1)..(348): Ceres Seq. ID no. 3042233
  misc_feature (61)..(339): Pfam Name: Pectinesterase Pfam Description: Pectinesterase
  misc_feature (1)..(348): Homolog of NCBI NO: 30697951 NR Description: pectinesterase family [Arabidopsis thaliana]
  misc_feature (1)..(348): Homolog of NCBI NO: 18415486 NR Description: pectinesterase family; protein id: At5g07410.1,
  misc_feature (7)..(348): Homolog of NCBI NO: 11358603 NR Description: pectin methyl-esterase-like protein - Arabidopsis
  misc_feature (7)..(348): Homolog of NCBI NO: 21593398 NR Description: pectin methyl-esterase-like protein [Arabidopsis
  misc_feature (7)..(348): Homolog of NCBI NO: 25404855 NR Description: probable pectin methylesterase T17F3.3 [imported] Arabidopsis thaliana >gi|12325236|gb|AAG52566.1|AC010675_14
  misc_feature (1)..(347): Homolog of NCBI NO: 9758483 NR Description: pectin methylesterase-like protein [Arabidopsis
  misc_feature (55)..(347): Homolog of NCBI NO: 15240325 NR Description: pectinesterase family; protein id: At5g61680.1
  misc_feature (1)..(31): Homolog of NCBI NO: 15240325 NR Description: pectinesterase family; protein id: At5g61680.1
  misc_feature (1)..(347): Homolog of NCBI NO: 15240781 NR Description: pectinesterase family; protein id: At5g07420.1,
  misc_feature (1)..(346): Homolog of NCBI NO: 15240792 NR Description: pectinesterase family; protein id: At5g07430.1
MVFVTPMVFADDVTPIPEGKPQVAQWFNANVGPLAQRKGLDPALVAAEAAPRIINVNPKGGEFKTLTDAIKSVPAGNTKRVIIKMAPGEYKEKVTIDRNKPFITLMGQPNAMPVITYDGTAAKYGTVDSASLIILSDYFMAVNIVVKNTAPAPDGKTKGAQALSMRISGNFAAFYNCKFYGFQDTICDDTGNHFFKDCYVEGTFDFIFGSGTSMYLGTQLHVVGDGIRVIAAHAGKSAEEKSGYSFVHCKVTGTGGGIYLGRAWMSHPKVVYAYTEMTSVVNPTGWQENKTPAHDKTVFYGEYKCSGPGSHKAKRVPFTQDIDDKEANRFLSLGYIQGSKWLLPPPAL

SEQ ID NO: 71068 - protein, 342 aa, Arabidopsis thaliana; identical to SEQ ID NO: 49968
  peptide (1)..(342): Ceres Seq. ID no. 3042234
  misc_feature (55)..(333): Pfam Name: Pectinesterase Pfam Description: Pectinesterase
  misc_feature (1)..(342): Homolog of NCBI NO: 30697951 NR Description: pectinesterase family [Arabidopsis thaliana]
  misc_feature (1)..(342): Homolog of NCBI NO: 18415486 NR Description: pectinesterase family; protein id: At5g07410.1,
  misc_feature (1)..(342): Homolog of NCBI NO: 11358603 NR Description: pectin methyl-esterase-like protein - Arabidopsis
  misc_feature (1)..(342): Homolog of NCBI NO: 21593398 NR Description: pectin methyl-esterase-like protein [Arabidopsis
  misc_feature (1)..(342): Homolog of NCBI NO: 25404855 NR Description: probable pectin methylesterase T17F3.3 [imported] Arabidopsis thaliana >gi|12325236|gb|AAG52566.1|AC010675_14
  misc_feature (1)..(341): Homolog of NCBI NO: 9758483 NR Description: pectin methylesterase-like protein [Arabidopsis
  misc_feature (49)..(341): Homolog of NCBI NO: 15240325 NR Description: pectinesterase family; protein id: At5g61680.1
  misc_feature (1)..(25): Homolog of NCBI NO: 15240325 NR Description: pectinesterase family; protein id: At5g61680.1
  misc_feature (1)..(341): Homolog of NCBI NO: 15240781 NR Description: pectinesterase family; protein id: At5g07420.1,
  misc_feature (1)..(340): Homolog of NCBI NO: 15240792 NR Description: pectinesterase family; protein id: At5g07430.1

SEQ ID NO: 71069 - DNA, 783 bp, Arabidopsis thaliana
  misc_feature (1)..(783): Ceres Seq. ID no. 3042591
  misc_feature: MA Experiment ID: 108461 Result: Up-regulated in Transcription
  misc_feature: MA Experiment 108461 PARAMETER Experiment Name: At_Germinating_Seeds_cDNA_P Parameter: Age (day) Value: 1 vs. 0
  misc_feature: MA Experiment 108461 PARAMETER Experiment Name: At_Germinating_Seeds_cDNA_P Parameter: Tissue Value: Germinating Seeds
  misc_feature: MA Experiment ID: 108462 Result: Up-regulated in Transcription
  misc_feature: MA Experiment 108462 PARAMETER Experiment Name: At_Germinating_Seeds_cDNA_P Parameter: Age (day) Value: 2 vs. 0
  misc_feature: MA Experiment 108462 PARAMETER Experiment Name: At_Germinating_Seeds_cDNA_P Parameter: Tissue Value: Germinating Seeds
  misc_feature: MA Experiment ID: 108463 Result: Up-regulated in Transcription
  misc_feature: MA Experiment 108463 PARAMETER Experiment Name: At_Germinating_Seeds_cDNA_P Parameter: Age (day) Value: 3 vs. 0
  misc_feature: MA Experiment 108463 PARAMETER Experiment Name: At_Germinating_Seeds_cDNA_P Parameter: Tissue Value: Germinating Seeds
  misc_feature: MA Experiment ID: 108595 Result: Down-regulated in Transcription
  misc_feature: MA Experiment 108595 PARAMETER Experiment Name: At_Ler-pi_Ovule_cDNA_P Parameter: Plant Line Value: null
  misc_feature: MA Experiment ID: 20000111 Result: Down-regulated in Transcription
  misc_feature: MA Experiment 20000111 PARAMETER Experiment Name: At_42deg_Heat_cDNA_P Parameter: Temperature (deg C) Value: 42 vs. 22
  misc_feature: MA Experiment 20000111 PARAMETER Experiment Name: At_42deg_Heat_cDNA_P Parameter: Timepoint (hr) Value: 6
  misc_feature: MA Experiment 20000111 PARAMETER Experiment Name: At_42deg_Heat_cDNA_P Parameter: Tissue Value: Aerial
  misc_feature: MA Experiment ID: 20000113 Result: Down-regulated in Transcription
  misc_feature: MA Experiment 20000113 PARAMETER Experiment Name: At_42deg_Heat_cDNA_P Parameter: Temperature (deg C) Value: 42 vs. 22
  misc_feature: MA Experiment 20000113 PARAMETER Experiment Name: At_42deg_Heat_cDNA_P Parameter: Timepoint (hr) Value: 8
  misc_feature: MA Experiment 20000113 PARAMETER Experiment Name: At_42deg_Heat_cDNA_P Parameter: Tissue Value: Aerial
  misc_feature: MA Experiment ID: 20000224 Result: Up-regulated in Transcription
  misc_feature: MA Experiment ID: 20000306 Result: Up-regulated in Transcription
  misc_feature: MA Experiment 20000306 PARAMETER Experiment Name: At_Germinating_Seeds_Sub_P Parameter: Age (hr) Value: 6 vs. 0
  misc_feature: MA Experiment 20000306 PARAMETER Experiment Name: At_Germinating_Seeds_Sub_P Parameter: Organism Value: A. thaliana
  misc_feature: MA Experiment 20000306 PARAMETER Experiment Name: At_Germinating_Seeds_Sub_P Parameter: Plant Line Value: WS
  misc_feature: MA Experiment 20000306 PARAMETER Experiment Name: At_Germinating_Seeds_Sub_P Parameter: Tissue Value: Germinating Seeds
  misc_feature: MA Experiment ID: 20000307 Result: Up-regulated in Transcription
  misc_feature: MA Experiment 20000307 PARAMETER Experiment Name: At_Germinating_Seeds_Sub_P Parameter: Age (hr) Value: 24 vs. 0
  misc_feature: MA Experiment 20000307 PARAMETER Experiment Name: At_Germinating_Seeds_Sub_P Parameter: Organism Value: A. thaliana
  misc_feature: MA Experiment 20000307 PARAMETER Experiment Name: At_Germinating_Seeds_Sub_P Parameter: Plant Line Value: WS
  misc_feature: MA Experiment 20000307 PARAMETER Experiment Name: At_Germinating_Seeds_Sub_P Parameter: Tissue Value: Germinating Seeds
  misc_feature: MA Experiment ID: 20000315 Result: Down-regulated in Transcription
  misc_feature: MA Experiment 20000315 PARAMETER Experiment Name: At_14day_Shoots-Roots_Sub_P Parameter: Age (day) Value: 14
  misc_feature: MA Experiment 20000315 PARAMETER Experiment Name: At_14day_Shoots-Roots_Sub_P Parameter: Organism Value: A. thaliana
  misc_feature: MA Experiment 20000315 PARAMETER Experiment Name: At_14day_Shoots-Roots_Sub_P Parameter: Plant Line Value: WS
  misc_feature: MA Experiment 20000315 PARAMETER Experiment Name: At_14day_Shoots-Roots_Sub_P Parameter: Tissue Value: Shoots vs. Whole Plant
  misc_feature: MA Experiment ID: 20000349 Result: Up-regulated in Transcription
  misc_feature: MA Experiment 20000349 PARAMETER Experiment Name: At_100uM_ABA_Sub_P Parameter: Age (day) Value: 14
  misc_feature: MA Experiment 20000349 PARAMETER Experiment Name: At_100uM_ABA_Sub_P Parameter: Organism Value: A. thaliana
  misc_feature: MA Experiment 20000349 PARAMETER Experiment Name: At_100uM_ABA_Sub_P Parameter: Plant Line Value: WS
  misc_feature: MA Experiment 20000349 PARAMETER Experiment Name: At_100uM_ABA_Sub_P Parameter: Timepoint (hr) Value: 6
  misc_feature: MA Experiment 20000349 PARAMETER Experiment Name: At_100uM_ABA_Sub_P Parameter: Tissue Value: Aerial
  misc_feature: MA Experiment 20000349 PARAMETER Experiment Name: At_100uM_ABA_Sub_P Parameter: Treatment Value: 100uM ABA vs. No Treatment
atggatccgtctaagggaatccaagaacagaggattgtgattccaaacagacacaacgagaagctggttggtctgcttcatgaaactggttctacagacatcgtagtcttgtgccatggctttcgatcaaacaagagtaaccaaataatgaataatgtggctgctgctatacagaaagaagggatcagcgcttttcgttttgatttctccgggaatggagagagtgaaggcagtttctattatggtaactataaccatgaagctgatgatttacattctgttgtccaatacttctctaacaagaaccgtgtggttcctataatcctcggtcacagtaagggaggtgatgttgtcctcctctacgcctccaagtatcatgatgtccgcaatgtaatcaatctctcgggacgttatgatcttaaaaagggtataagagagcgtcttggagaagattttttggaaagaattaagcaacaaggattcatcgatgttggagatggaaaatcggggtatcgtgttactgagaagagcttaatggacaggttaagcactgatattcatgaagcttgcctcaagattgacaaagagtgcagggtcttgacggttcatggatcggaggacgaggtaatacctgtggaagatgcgaaggagtttgcgaagatcataccaaaccacaagctggagattgtggaaggagctaatcatggttatactgagcaccaaagtcaattagtttcaacagttatggagttcataaagacagtcattgtgaagaacaactag

SEQ ID NO: 71070 - protein, 260 aa, Arabidopsis thaliana
  peptide (1)..(260): Ceres Seq. ID no. 3042592
  misc_feature (1)..(260): Homolog of NCBI NO: 15228202 NR Description: putative protein; protein id: At3g47590.1
  misc_feature (1)..(260): Homolog of NCBI NO: 15220578 NR Description: hypothetical protein; protein id: At1g29840.1
  misc_feature (1)..(254): Homolog of NCBI NO: 21554728 NR Description: putative esterase [Arabidopsis thaliana]
  misc_feature (1)..(260): Homolog of NCBI NO: 15232826 NR Description: putative protein; protein id: At3g47560.1, by cDNA: 262295. [Arabidopsis thaliana] >gi|11281956|pir||T45716
  misc_feature (1)..(260): Homolog of NCBI NO: 22135864 NR Description: putative protein [Arabidopsis thaliana]
  misc_feature (11)..(260): Homolog of NCBI NO: 15224799 NR Description: putative esterase; protein id: At2g19550.1
  misc_feature (8)..(252): Homolog of NCBI NO: 34913064 NR Description: P0013G02.24 [Oryza sativa (japonica
  misc_feature (7)..(253): Homolog of NCBI NO: 21595418 NR Description: putative esterase-like protein [Arabidopsis
  misc_feature (9)..(252): Homolog of NCBI NO: 34913068 NR Description: P0013G02.26 [Oryza sativa (japonica
  misc_feature (7)..(253): Homolog of NCBI NO: 18416707 NR Description: putative esterase - like protein; protein id:
MDPSKGIQEQRIVIPNRHNEKLVGLLHETGSTDIVVLCHGFRSNKSNQIMNNVAAAIQKEGISAFRFDFSGNGESEGSFYYGNYNHEADDLHSVVQYFSNKNRVVPIILGHSKGGDVVLLYASKYHDVRNVINLSGRYDLKKGIRERLGEDFLERIKQQGFIDVGDGKSGYRVTEKSLMDRLSTDIHEACLKIDKECRVLTVHGSEDEVIPVEDAKEFAKIIPNHKLEIVEGANHGYTEHQSQLVSTVMEFIKTVIVKNN

SEQ ID NO: 71071 - protein, 211 aa, Arabidopsis thaliana
  peptide (1)..(211): Ceres Seq. ID no. 3042593
  misc_feature (1)..(211): Homolog of NCBI NO: 15228202 NR Description: putative protein; protein id: At3g47590.1
  misc_feature (1)..(211): Homolog of NCBI NO: 15220578 NR Description: hypothetical protein; protein id: At1g29840.1
  misc_feature (1)..(205): Homolog of NCBI NO: 21554728 NR Description: putative esterase [Arabidopsis thaliana]
  misc_feature (1)..(211): Homolog of NCBI NO: 15232826 NR Description: putative protein; protein id: At3g47560.1, by cDNA: 262295. [Arabidopsis thaliana] >gi|11281956|pir||T45716
  misc_feature (1)..(211): Homolog of NCBI NO: 22135864 NR Description: putative protein [Arabidopsis thaliana]
  misc_feature (1)..(211): Homolog of NCBI NO: 15224799 NR Description: putative esterase; protein id: At2g19550.1
  misc_feature (1)..(203): Homolog of NCBI NO: 34913064 NR Description: P0013G02.24 [Oryza sativa (japonica
  misc_feature (1)..(204): Homolog of NCBI NO: 21595418 NR Description: putative esterase-like protein [Arabidopsis
  misc_feature (1)..(203): Homolog of NCBI NO: 34913068 NR Description: P0013G02.26 [Oryza sativa (japonica
  misc_feature (1)..(204): Homolog of NCBI NO: 18416707 NR Description: putative esterase - like protein; protein id:
MNNVAAAIQKEGISAFRFDFSGNGESEGSFYYGNYNHEADDLHSVVQYFSNKNRVVPIILGHSKGGDVVLLYASKYHDVRNVINLSGRYDLKKGIRERLGEDFLERIKQQGFIDVGDGKSGYRVTEKSLMDRLSTDIHEACLKIDKECRVLTVHGSEDEVIPVEDAKEFAKIIPNHKLEIVEGANHGYTEHQSQLVSTVMEFIKTVIVKNN

SEQ ID NO: 71072 - DNA, 2166 bp, Arabidopsis thaliana
  misc_feature (1)..(2166): Ceres Seq. ID no. 3042945
  misc_feature: MA Experiment ID: 20000307 Result: Down-regulated in Transcription
  misc_feature: MA Experiment 20000307 PARAMETER Experiment Name: At_Germinating_Seeds_Sub_P Parameter: Age (hr) Value: 24 vs. 0
  misc_feature: MA Experiment 20000307 PARAMETER Experiment Name: At_Germinating_Seeds_Sub_P Parameter: Organism Value: A. thaliana
  misc_feature: MA Experiment 20000307 PARAMETER Experiment Name: At_Germinating_Seeds_Sub_P Parameter: Plant Line Value: WS
  misc_feature: MA Experiment 20000307 PARAMETER Experiment Name: At_Germinating_Seeds_Sub_P Parameter: Tissue Value: Germinating Seeds
  misc_feature: MA Experiment ID: 20000315 Result: Down-regulated in Transcription
  misc_feature: MA Experiment 20000315 PARAMETER Experiment Name: At_14day_Shoots-Roots_Sub_P Parameter: Age (day) Value: 14
  misc_feature: MA Experiment 20000315 PARAMETER Experiment Name: At_14day_Shoots-Roots_Sub_P Parameter: Organism Value: A. thaliana
  misc_feature: MA Experiment 20000315 PARAMETER Experiment Name: At_14day_Shoots-Roots_Sub_P Parameter: Plant Line Value: WS
  misc_feature: MA Experiment 20000315 PARAMETER Experiment Name: At_14day_Shoots-Roots_Sub_P Parameter: Tissue Value: Shoots vs. Whole Plant
  misc_feature: MA Experiment ID: 20000328 Result: Down-regulated in Transcription
  misc_feature: MA Experiment 20000328 PARAMETER Experiment Name: At_42deg_Heat_Sub_P Parameter: Age (day) Value: 14
  misc_feature: MA Experiment 20000328 PARAMETER Experiment Name: At_42deg_Heat_Sub_P Parameter: Organism Value: A. thaliana
  misc_feature: MA Experiment 20000328 PARAMETER Experiment Name: At_42deg_Heat_Sub_P Parameter: Plant Line Value: WS
  misc_feature: MA Experiment 20000328 PARAMETER Experiment Name: At_42deg_Heat_Sub_P Parameter: Temperature (deg C) Value: 42 vs. 22
  misc_feature: MA Experiment 20000328 PARAMETER Experiment Name: At_42deg_Heat_Sub_P Parameter: Timepoint (hr) Value: 6
  misc_feature: MA Experiment 20000328 PARAMETER Experiment Name: At_42deg_Heat_Sub_P Parameter: Tissue Value: Aerial
atgaatcagacgccatggaagttcaaaacttttcgagaccttctactgaaatctgtagcggagagagatctcttcactgggaaatcacttcacgcgctctacgtgaaatccattgtagcttcgtccacttatctctcaaatcacttcgtgaatctctactccaaatgtggtcgcctttcctacgcacgagccgcgttctactccacggaagaacccaatgtcttctcttacaatgtaattgtcaaagcttacgcgaaagattcgaaaatccatattgcacgccagttgttcgacgaaattccccaaccagacactgtctcttacaatactcttatctcggggtacgctgatgctagagaaacttttgccgcaatggttctgtttaagagaatgagaaaattgggatttgaggttgatgggtttacgttatcagggttgatagcagcttgttgtgaccgtgttgatttgataaagcagcttcactgtttctctgtctcgggagggtttgattcgtactcgtctgtgaataacgcgtttgttacgtattatagtaaaggcgggcttttgagagaggcggtatcggtgttttatgggatggatgaattaagagatgaagtttcgtggaattcgatgattgtggcttatgggcagcacaaggaaggagcaaaggcattagctttgtataaagaaatgatctttaaaggattcaagattgatatgtttacattggcaagtgttttaaatgctctcactagcttggatcatttgatcggtggccgtcagttccacggtaagctgatcaaggctggatttcaccagaactcacatgtgggaagtggtttgattgatttttactcaaaatgcgggggttgtgatggtatgtatgatagtgagaaggtatttcaagagattctatcgccggatttggttgtttggaatacgatgatttctggatattcaatgaacgaggaactctctgaagaagctgtgaagagttttagacagatgcaacgtattggacatagacctgatgattgcagttttgtctgtgtcacaagcgcttgctcgaatctctcctctccttctcagtgcaagcagattcatggcttggcgatcaaatctcacatcccttcgaatagaatctctgtgaacaacgcgttgatttcgttgtattacaaaagcggaaacctgcaagacgcaaggtgggtatttgatagaatgccggaacttaatgcggtatctttcaattgtatgatcaaaggttatgcgcagcacgggcatggaacagaagctttgcttttataccaacggatgctggactcgggtattgcgcctaacaagataacctttgtagccgttctttctgcttgtgcgcactgtggtaaggtcgacgagggtcaggagtacttcaacaccatgaaggagacgttcaagatcgaaccagaggctgagcactattcttgtatgattgatcttttaggccgagcagggaagctagaagaggcagagagattcatagatgcaatgccttataagccaggctctgttgcttgggctgctttgctcggggcttgtaggaaacacaaaaacatggctcttgcagagagagcagctaatgagcttatggtgatgcaaccattagctgccacgccatatgtgatgctagcaaacatgtatgcagatgccaggaaatgggaagagatggcctcggtgaggaaatcaatgagggggaaaaggataaggaagaaaccgggatgtagttggatcgaagtgaagaagaaaaagcatgtattcgtcgcagaagattggtctcatccgatgatacgagaagtgaatgaatatctagaggagatgatgaagaagatgaagaaagttgggtatgtgatggataagaaatgggcaatggtaaaagaggatgaagcaggcgaaggggacgaagaaatgcggttaggacatcacagcgagaagctagcggtggcttttgggttgatgtcgactagagatggagaagaattagttgtagttaagaatttgaggatatgtggggattgtcacaatgctatcaagtttatgtctgcggttgcaggtagagagatcattgtaagagataaccttcggtttcattgcttcaaagatggcaagtgttcatgtggggattattggtga

SEQ ID NO: 71073 - protein, 721 aa, Arabidopsis thaliana
  peptide (1)..(721): Ceres Seq. ID no. 3042946
  misc_feature (484)..(518): Pfam Name: PPR repeat Pfam Description: PPR repeat
  misc_feature (78)..(721): Homolog of NCBI NO: 15234095 NR Description: putative protein; protein id: At4g33170.1
  misc_feature (15)..(147): Homolog of NCBI NO: 15234095 NR Description: putative protein; protein id: At4g33170.1
  misc_feature (71)..(721): Homolog of NCBI NO: 34915012 NR Description: P0458A05.10 [Oryza sativa (japonica
  misc_feature (78)..(721): Homolog of NCBI NO: 15232837 NR Description: hypothetical protein; protein id: At3g02010.1 thaliana] >gi|6091739|gb|AAF03451.1|AC010797_27 hypothetical [Arabidopsis thaliana] >gi|6513930|gb|AAF14834.1|AC011664_16
  misc_feature (57)..(721): Homolog of NCBI NO: 34897884 NR Description: Similar to Arabidopsis thaliana DNA chromosome 4,
  misc_feature (78)..(721): Homolog of NCBI NO: 34903762 NR Description: unnamed protein product [Oryza sativa (japonica group)] >gi|7340873|dbj|BAA92963.1| unnamed protein product
  misc_feature (73)..(721): Homolog of NCBI NO: 15220337 NR Description: hypothetical protein; protein id: At1g11290.1
  misc_feature (80)..(721): Homolog of NCBI NO: 15236324 NR Description: putative protein; protein id: At4g13650.1
  misc_feature (4)..(152): Homolog of NCBI NO: 15236324 NR Description: putative protein; protein id: At4g13650.1
  misc_feature (78)..(721): Homolog of NCBI NO: 15226200 NR Description: putative selenium-binding protein; protein id:
MNQTPWKFKTFRDLLLKSVAERDLFTGKSLHALYVKSIVASSTYLSNHFVNLYSKCGRLSYARAAFYSTEEPNVFSYNVIVKAYAKDSKIHIARQLFDEIPQPDTVSYNTLISGYADARETFAAMVLFKRMRKLGFEVDGFTLSGLIAACCDRVDLIKQLHCFSVSGGFDSYSSVNNAFVTYYSKGGLLREAVSVFYGMDELRDEVSWNSMIVAYGQHKEGAKALALYKEMIFKGFKIDMFTLASVLNALTSLDHLIGGRQFHGKLIKAGFHQNSHVGSGLIDFYSKCGGCDGMYDSEKVFQEILSPDLVVWNTMISGYSMNEELSEEAVKSFRQMQRIGHRPDDCSFVCVTSACSNLSSPSQCKQIHGLAIKSHIPSNRISVNNALISLYYKSGNLQDARWVFDRMPELNAVSFNCMIKGYAQHGHGTEALLLYQRMLDSGIAPNKITFVAVLSACAHCGKVDEGQEYFNTMKETFKIEPEAEHYSCMIDLLGRAGKLEEAERFIDAMPYKPGSVAWAALLGACRKHKNMALAERAANELMVMQPLAATPYVMLANMYADARKWEEMASVRKSMRGKRIRKKPGCSWIEVKKKKHVFVAEDWSHPMIREVNEYLEEMMKKMKKVGYVMDKKWAMVKEDEAGEGDEEMRLGHHSEKLAVAFGLMSTRDGEELVVVKNLRICGDCHNAIKFMSAVAGREIIVRDNLRFHCFKDGKCSCGDYW

SEQ ID NO: 71074 - protein, 597 aa, Arabidopsis thaliana
  peptide (1)..(597): Ceres Seq. ID no. 3042947
  misc_feature (360)..(394): Pfam Name: PPR repeat Pfam Description: PPR repeat
  misc_feature (1)..(597): Homolog of NCBI NO: 15234095 NR Description: putative protein; protein id: At4g33170.1
  misc_feature (1)..(23): Homolog of NCBI NO: 15234095 NR Description: putative protein; protein id: At4g33170.1
  misc_feature (1)..(597): Homolog of NCBI NO: 34915012 NR Description: P0458A05.10 [Oryza sativa (japonica
  misc_feature (1)..(597): Homolog of NCBI NO: 15232837 NR Description: hypothetical protein; protein id: At3g02010.1 thaliana] >gi|6091739|gb|AAF03451.1|AC010797_27 hypothetical [Arabidopsis thaliana] >gi|6513930|gb|AAF14834.1|AC011664_16
  misc_feature (1)..(597): Homolog of NCBI NO: 34897884 NR Description: Similar to Arabidopsis thaliana DNA chromosome 4,
  misc_feature (1)..(597): Homolog of NCBI NO: 34903762 NR Description: unnamed protein product [Oryza sativa (japonica group)] >gi|7340873|dbj|BAA92963.1| unnamed protein product
  misc_feature (1)..(597): Homolog of NCBI NO: 15220337 NR Description: hypothetical protein; protein id: At1g11290.1
  misc_feature (1)..(597): Homolog of NCBI NO: 15236324 NR Description: putative protein; protein id: At4g13650.1
  misc_feature (1)..(28): Homolog of NCBI NO: 15236324 NR Description: putative protein; protein id: At4g13650.1
  misc_feature (1)..(597): Homolog of NCBI NO: 15226200 NR Description: putative selenium-binding protein; protein id:
MVLFKRMRKLGFEVDGFTLSGLIAACCDRVDLIKQLHCFSVSGGFDSYSSVNNAFVTYYSKGGLLREAVSVFYGMDELRDEVSWNSMIVAYGQHKEGAKALALYKEMIFKGFKIDMFTLASVLNALTSLDHLIGGRQFHGKLIKAGFHQNSHVGSGLIDFYSKCGGCDGMYDSEKVFQEILSPDLVVWNTMISGYSMNEELSEEAVKSFRQMQRIGHRPDDCSFVCVTSACSNLSSPSQCKQIHGLAIKSHIPSNRISVNNALISLYYKSGNLQDARWVFDRMPELNAVSFNCMIKGYAQHGHGTEALLLYQRMLDSGIAPNKITFVAVLSACAHCGKVDEGQEYFNTMKETFKIEPEAEHYSCMIDLLGRAGKLEEAERFIDAMPYKPGSVAWAALLGACRKHKNMALAERAANELMVMQPLAATPYVMLANMYADARKWEEMASVRKSMRGKRIRKKPGCSWIEVKKKKHVFVAEDWSHPMIREVNEYLEEMMKKMKKVGYVMDKKWAMVKEDEAGEGDEEMRLGHHSEKLAVAFGLMSTRDGEELVVVKNLRICGDCHNAIKFMSAVAGREIIVRDNLRFHCFKDGKCSCGDYW

SEQ ID NO: 71075 - protein, 591 aa, Arabidopsis thaliana
  peptide (1)..(591): Ceres Seq. ID no. 3042948
  misc_feature (354)..(388): Pfam Name: PPR repeat Pfam Description: PPR repeat
  misc_feature (1)..(591): Homolog of NCBI NO: 15234095 NR Description: putative protein; protein id: At4g33170.1
  misc_feature (1)..(17): Homolog of NCBI NO: 15234095 NR Description: putative protein; protein id: At4g33170.1
  misc_feature (1)..(591): Homolog of NCBI NO: 34915012 NR Description: P0458A05.10 [Oryza sativa (japonica
  misc_feature (1)..(591): Homolog of NCBI NO: 15232837 NR Description: hypothetical protein; protein id: At3g02010.1 thaliana] >gi|6091739|gb|AAF03451.1|AC010797_27 hypothetical [Arabidopsis thaliana] >gi|6513930|gb|AAF14834.1|AC011664_16
  misc_feature (1)..(591): Homolog of NCBI NO: 34897884 NR Description: Similar to Arabidopsis thaliana DNA chromosome 4,
  misc_feature (1)..(591): Homolog of NCBI NO: 34903762 NR Description: unnamed protein product [Oryza sativa (japonica group)] >gi|7340873|dbj|BAA92963.1| unnamed protein product
  misc_feature (1)..(591): Homolog of NCBI NO: 15220337 NR Description: hypothetical protein; protein id: At1g11290.1
  misc_feature (1)..(591): Homolog of NCBI NO: 15236324 NR Description: putative protein; protein id: At4g13650.1
  misc_feature (1)..(22): Homolog of NCBI NO: 15236324 NR Description: putative protein; protein id: At4g13650.1
  misc_feature (1)..(591): Homolog of NCBI NO: 15226200 NR Description: putative selenium-binding protein; protein id:
MRKLGFEVDGFTLSGLIAACCDRVDLIKQLHCFSVSGGFDSYSSVNNAFVTYYSKGGLLREAVSVFYGMDELRDEVSWNSMIVAYGQHKEGAKALALYKEMIFKGFKIDMFTLASVLNALTSLDHLIGGRQFHGKLIKAGFHQNSHVGSGLIDFYSKCGGCDGMYDSEKVFQEILSPDLVVWNTMISGYSMNEELSEEAVKSFRQMQRIGHRPDDCSFVCVTSACSNLSSPSQCKQIHGLAIKSHIPSNRISVNNALISLYYKSGNLQDARWVFDRMPELNAVSFNCMIKGYAQHGHGTEALLLYQRMLDSGIAPNKITFVAVLSACAHCGKVDEGQEYFNTMKETFKIEPEAEHYSCMIDLLGRAGKLEEAERFIDAMPYKPGSVAWAALLGACRKHKNMALAERAANELMVMQPLAATPYVMLANMYADARKWEEMASVRKSMRGKRIRKKPGCSWIEVKKKKHVFVAEDWSHPMIREVNEYLEEMMKKMKKVGYVMDKKWAMVKEDEAGEGDEEMRLGHHSEKLAVAFGLMSTRDGEELVVVKNLRICGDCHNAIKFMSAVAGREIIVRDNLRFHCFKDGKCSCGDYW

SEQ ID NO: 71076 - DNA, 933 bp, Arabidopsis thaliana
  misc_feature (1)..(933): Ceres Seq. ID no. 3043944
  misc_feature: MA Experiment ID: 20000185 Result: Up-regulated in Transcription
  misc_feature: MA Experiment 20000185 PARAMETER Experiment Name: At_Roots__P Parameter: Age (day) Value: 7 vs. 21
  misc_feature: MA Experiment 20000185 PARAMETER Experiment Name: At_Roots__P Parameter: Organism Value: A. thaliana
  misc_feature: MA Experiment 20000185 PARAMETER Experiment Name: At_Roots__P Parameter: Tissue Value: Roots vs. Whole Plant
  misc_feature: MA Experiment ID: 20000234 Result: Up-regulated in Transcription
  misc_feature: MA Experiment 20000234 PARAMETER Experiment Name: At_Siliques_P Parameter: Age (day) Value: 21
  misc_feature: MA Experiment 20000234 PARAMETER Experiment Name: At_Siliques_P Parameter: Organism Value: A. thaliana
  misc_feature: MA Experiment 20000234 PARAMETER Experiment Name: At_Siliques_P Parameter: Plant Line Value: WS
  misc_feature: MA Experiment 20000234 PARAMETER Experiment Name: At_Siliques_P Parameter: Tissue Value: Less Than 5mm Siliques vs. Whole Plant
  misc_feature: MA Experiment ID: 20000264 Result: Up-regulated in Transcription
  misc_feature: MA Experiment 20000264 PARAMETER Experiment Name: At_Open_Flower_P Parameter: Age (day) Value: 21
  misc_feature: MA Experiment 20000264 PARAMETER Experiment Name: At_Open_Flower_P Parameter: Plant Line Value: WS
  misc_feature: MA Experiment 20000264 PARAMETER Experiment Name: At_Open_Flower_P Parameter: Tissue Value: Open Flower vs. Whole Plant
  misc_feature: MA Experiment ID: 20000265 Result: Up-regulated in Transcription
  misc_feature: MA Experiment 20000265 PARAMETER Experiment Name: At_Open_Flower_P Parameter: Age (day) Value: 21
  misc_feature: MA Experiment 20000265 PARAMETER Experiment Name: At_Open_Flower_P Parameter: Plant Line Value: WS
  misc_feature: MA Experiment 20000265 PARAMETER Experiment Name: At_Open_Flower_P Parameter: Tissue Value: Closed Flower vs. Whole Plant
  misc_feature: MA Experiment ID: 20000439 Result: Up-regulated in Transcription
  misc_feature: MA Experiment 20000439 PARAMETER Experiment Name: At_Roots__P Parameter: Age (day) Value: 14 vs. 21
  misc_feature: MA Experiment 20000439 PARAMETER Experiment Name: At_Roots__P Parameter: Organism Value: A. thaliana
  misc_feature: MA Experiment 20000439 PARAMETER Experiment Name: At_Roots__P Parameter: Tissue Value: Roots vs. Whole Plant
  misc_feature: MA Experiment ID: 20000794 Result: Up-regulated in Transcription
  misc_feature: MA Experiment 20000794 PARAMETER Experiment Name: At_Petals_P Parameter: Age (day) Value: 23-25 days
  misc_feature: MA Experiment 20000794 PARAMETER Experiment Name: At_Petals_P Parameter: Plant Line Value: WS
  misc_feature: MA Experiment 20000794 PARAMETER Experiment Name: At_Petals_P Parameter: Tissue Value: Petals vs. Whole plant
atgtctcaaagcggcggtgacttcaacctctccgacgagattctcgccgtgattcccaccgacccttatgatcaactcgacctcgccaggaagatcacttccatggctatcgcttcaagggtttcgaatctggaatctcaagtctccggcttgagacagaagcttcttgagaaggatcggcttgttcatgaacttgaagacagagtctcttcctttgaaagactttaccatgaagctgactcgagtttgaagaatgttgtcgatgaaaatatgaaactgactcaagaacgagattcactggcaatcactgcgaagaaactcggtcgtgattatgcaaagttggaagcattcaagagacaattgatgcagtcattgaatgatgataatccatctcaaactgagactgctgatgtcagaatggttcctcgaggcaaagatgagaattcaaatggatcctactcaaacaatgaaggtttaagtgaagcgaggcaaagacagtctatgactccgcagttctctcccgcgtttacaccaagcggaacaccaaagatcttatctactgctgcttctccgagaagctactctgctgcttcatcgccaaagctattctctggagctgcatctccaacatcttcacattatgatatacgtatgtggtcttcaactagccagcaatcttcagtagcaaactctcctccacgctcgcattctgtttcagctcggcatccgcggattgatgggaaagagttctttagacaagccaggagccgtttgtcttacgaacagttcagtgcattcctggctaacatcaaggaacttaacgcccggaagcagggccgcgaggaaacattacagaaagcagaggaaatatttggaaaggaaaacaatgatctttacatatcctttaagggacttctcacaagtgggcgttga

SEQ ID NO: 71077 - protein, 310 aa, Arabidopsis thaliana
  peptide (1)..(310): Ceres Seq. ID no. 3043945
  misc_feature (1)..(239): Homolog of NCBI NO: 25404089 NR Description: hypothetical protein T6H22.12 [imported] - thaliana >gi|6056378|gb|AAF02842.1|AC009894_13 Hypothetical
  misc_feature (146)..(310): Homolog of NCBI NO: 15222835 NR Description: hypothetical protein; protein id: At1g56080.1
  misc_feature (7)..(306): Homolog of NCBI NO: 30684901 NR Description: expressed protein [Arabidopsis thaliana] ESTs gb|N38586 and gb|N38613 come from this gene. [Arabidopsis >gi|26452357|dbj|BAC43264.1| unknown protein [Arabidopsis
  misc_feature (1)..(209): Homolog of NCBI NO: 15222835 NR Description: hypothetical protein; protein id: At1g56080.1
  misc_feature (7)..(306): Homolog of NCBI NO: 38344261 NR Description: OSJNBa0008M17.14 [Oryza sativa (japonica
  misc_feature (8)..(307): Homolog of NCBI NO: 18414476 NR Description: Expressed protein; protein id: At4g15545.1, by cDNA: 307., supported by cDNA: gi_14517355, supported by cDNA: supported by cDNA: gi_16323275 [Arabidopsis thaliana] thaliana]
  misc_feature (15)..(129): Homolog of NCBI NO: 23613663 NR Description: hypothetical protein, conserved [Plasmodium
  misc_feature (230)..(307): Homolog of NCBI NO: 23613663 NR Description: hypothetical protein, conserved [Plasmodium
  misc_feature (15)..(129): Homolog of NCBI NO: 23489944 NR Description: hypothetical protein [Plasmodium yoelii yoelii]
  misc_feature (246)..(307): Homolog of NCBI NO: 23489944 NR Description: hypothetical protein [Plasmodium yoelii yoelii]
MSQSGGDFNLSDEILAVIPTDPYDQLDLARKITSMAIASRVSNLESQVSGLRQKLLEKDRLVHELEDRVSSFERLYHEADSSLKNVVDENMKLTQERDSLAITAKKLGRDYAKLEAFKRQLMQSLNDDNPSQTETADVRMVPRGKDENSNGSYSNNEGLSEARQRQSMTPQFSPAFTPSGTPKILSTAASPRSYSAASSPKLFSGAASPTSSHYDIRMWSSTSQQSSVANSPPRSHSVSARHPRIDGKEFFRQARSRLSYEQFSAFLANIKELNARKQGREETLQKAEEIFGKENNDLYISFKGLLTSGR

SEQ ID NO: 71078 - protein, 276 aa, Arabidopsis thaliana
  peptide (1)..(276): Ceres Seq. ID no. 3043946
  misc_feature (1)..(205): Homolog of NCBI NO: 25404089 NR Description: hypothetical protein T6H22.12 [imported] - thaliana >gi|6056378|gb|AAF02842.1|AC009894_13 Hypothetical
  misc_feature (112)..(276): Homolog of NCBI NO: 15222835 NR Description: hypothetical protein; protein id: At1g56080.1
  misc_feature (1)..(272): Homolog of NCBI NO: 30684901 NR Description: expressed protein [Arabidopsis thaliana] ESTs gb|N38586 and gb|N38613 come from this gene. [Arabidopsis >gi|26452357|dbj|BAC43264.1| unknown protein [Arabidopsis
  misc_feature (1)..(175): Homolog of NCBI NO: 15222835 NR Description: hypothetical protein; protein id: At1g56080.1
  misc_feature (1)..(272): Homolog of NCBI NO: 38344261 NR Description: OSJNBa0008M17.14 [Oryza sativa (japonica
  misc_feature (1)..(273): Homolog of NCBI NO: 18414476 NR Description: Expressed protein; protein id: At4g15545.1, by cDNA: 307., supported by cDNA: gi_14517355, supported by cDNA: supported by cDNA: gi_16323275 [Arabidopsis thaliana] thaliana]
  misc_feature (1)..(95): Homolog of NCBI NO: 23613663 NR Description: hypothetical protein, conserved [Plasmodium
  misc_feature (196)..(273): Homolog of NCBI NO: 23613663 NR Description: hypothetical protein, conserved [Plasmodium
  misc_feature (1)..(95): Homolog of NCBI NO: 23489944 NR Description: hypothetical protein [Plasmodium yoelii yoelii]
  misc_feature (212)..(273): Homolog of NCBI NO: 23489944 NR Description: hypothetical protein [Plasmodium yoelii yoelii]
MAIASRVSNLESQVSGLRQKLLEKDRLVHELEDRVSSFERLYHEADSSLKNVVDENMKLTQERDSLAITAKKLGRDYAKLEAFKRQLMQSLNDDNPSQTETADVRMVPRGKDENSNGSYSNNEGLSEARQRQSMTPQFSPAFTPSGTPKILSTAASPRSYSAASSPKLFSGAASPTSSHYDIRMWSSTSQQSSVANSPPRSHSVSARHPRIDGKEFFRQARSRLSYEQFSAFLANIKELNARKQGREETLQKAEEIFGKENNDLYISFKGLLTSGR

SEQ ID NO: 71079 - protein, 220 aa, Arabidopsis thaliana
  peptide (1)..(220): Ceres Seq. ID no. 3043947
  misc_feature (1)..(217): Homolog of NCBI NO: 18414476 NR Description: Expressed protein; protein id: At4g15545.1, by cDNA: 307., supported by cDNA: gi_14517355, supported by cDNA: supported by cDNA: gi_16323275 [Arabidopsis thaliana] thaliana]
  misc_feature (1)..(39): Homolog of NCBI NO: 23613663 NR Description: hypothetical protein, conserved [Plasmodium
  misc_feature (140)..(217): Homolog of NCBI NO: 23613663 NR Description: hypothetical protein, conserved [Plasmodium
  misc_feature (1)..(39): Homolog of NCBI NO: 23489944 NR Description: hypothetical protein [Plasmodium yoelii yoelii]
  misc_feature (156)..(217): Homolog of NCBI NO: 23489944 NR Description: hypothetical protein [Plasmodium yoelii yoelii]
  misc_feature (1)..(149): Homolog of NCBI NO: 25404089 NR Description: hypothetical protein T6H22.12 [imported] - thaliana >gi|6056378|gb|AAF02842.1|AC009894_13 Hypothetical
  misc_feature (56)..(220): Homolog of NCBI NO: 15222835 NR Description: hypothetical protein; protein id: At1g56080.1
  misc_feature (1)..(216): Homolog of NCBI NO: 30684901 NR Description: expressed protein [Arabidopsis thaliana] ESTs gb|N38586 and gb|N38613 come from this gene. [Arabidopsis >gi|26452357|dbj|BAC43264.1| unknown protein [Arabidopsis
  misc_feature (1)..(119): Homolog of NCBI NO: 15222835 NR Description: hypothetical protein; protein id: At1g56080.1
  misc_feature (1)..(216): Homolog of NCBI NO: 38344261 NR Description: OSJNBa0008M17.14 [Oryza sativa (japonica
MKLTQERDSLAITAKKLGRDYAKLEAFKRQLMQSLNDDNPSQTETADVRMVPRGKDENSNGSYSNNEGLSEARQRQSMTPQFSPAFTPSGTPKILSTAASPRSYSAASSPKLFSGAASPTSSHYDIRMWSSTSQQSSVANSPPRSHSVSARHPRIDGKEFFRQARSRLSYEQFSAFLANIKELNARKQGREETLQKAEEIFGKENNDLYISFKGLLTSGR

SEQ ID NO: 71080 - DNA, 1134 bp, Arabidopsis thaliana
  misc_feature (1)..(1134): Ceres Seq. ID no. 3045591
  misc_feature: MA Experiment ID: 20000173 Result: Up-regulated in Transcription
  misc_feature: MA Experiment 20000173 PARAMETER Experiment Name: At_42deg_Heat_P Parameter: Age (day) Value: 14
  misc_feature: MA Experiment 20000173 PARAMETER Experiment Name: At_42deg_Heat_P Parameter: Organism Value: A. thaliana
  misc_feature: MA Experiment 20000173 PARAMETER Experiment Name: At_42deg_Heat_P Parameter: Plant Line Value: WS
  misc_feature: MA Experiment 20000173 PARAMETER Experiment Name: At_42deg_Heat_P Parameter: Temperature (deg C) Value: 42 vs. 22
  misc_feature: MA Experiment 20000173 PARAMETER Experiment Name: At_42deg_Heat_P Parameter: Timepoint (hr) Value: 6
  misc_feature: MA Experiment 20000173 PARAMETER Experiment Name: At_42deg_Heat_P Parameter: Tissue Value: Aerial
  misc_feature: MA Experiment ID: 20000234 Result: Down-regulated in Transcription
  misc_feature: MA Experiment 20000234 PARAMETER Experiment Name: At_Siliques_P Parameter: Age (day) Value: 21
  misc_feature: MA Experiment 20000234 PARAMETER Experiment Name: At_Siliques_P Parameter: Organism Value: A. thaliana
  misc_feature: MA Experiment 20000234 PARAMETER Experiment Name: At_Siliques_P Parameter: Plant Line Value: WS
  misc_feature: MA Experiment 20000234 PARAMETER Experiment Name: At_Siliques_P Parameter: Tissue Value: Less Than 5mm Siliques vs. Whole Plant
  misc_feature: MA Experiment ID: 20000235 Result: Down-regulated in Transcription
  misc_feature: MA Experiment 20000235 PARAMETER Experiment Name: At_Siliques_P Parameter: Age (day) Value: 21
  misc_feature: MA Experiment 20000235 PARAMETER Experiment Name: At_Siliques_P Parameter: Organism Value: A. thaliana
  misc_feature: MA Experiment 20000235 PARAMETER Experiment Name: At_Siliques_P Parameter: Plant Line Value: WS
  misc_feature: MA Experiment 20000235 PARAMETER Experiment Name: At_Siliques_P Parameter: Tissue Value: 5-10mm Siliques vs. Whole Plant
  misc_feature: MA Experiment ID: 20001555 Result: Down-regulated in Transcription
  misc_feature: MA Experiment 20001555 PARAMETER Experiment Name: At_Drought_Soil_Dry_P Parameter: Age (day) Value: 24
  misc_feature: MA Experiment 20001555 PARAMETER Experiment Name: At_Drought_Soil_Dry_P Parameter: Organism Value: A. thaliana
  misc_feature: MA Experiment 20001555 PARAMETER Experiment Name: At_Drought_Soil_Dry_P Parameter: Plant Line Value: WS
  misc_feature: MA Experiment 20001555 PARAMETER Experiment Name: At_Drought_Soil_Dry_P Parameter: Post Timepoint (hr) Value: None
  misc_feature: MA Experiment 20001555 PARAMETER Experiment Name: At_Drought_Soil_Dry_P Parameter: Post-Treatment Value: None
  misc_feature: MA Experiment 20001555 PARAMETER Experiment Name: At_Drought_Soil_Dry_P Parameter: Timepoint (day) Value: 10
  misc_feature: MA Experiment 20001555 PARAMETER Experiment Name: At_Drought_Soil_Dry_P Parameter: Treatment Value: Drought vs. No Drought
  misc_feature: MA Experiment ID: 20001556 Result: Down-regulated in Transcription
  misc_feature: MA Experiment 20001556 PARAMETER Experiment Name: At_Drought_Soil_Dry_P Parameter: Age (day) Value: 26
  misc_feature: MA Experiment 20001556 PARAMETER Experiment Name: At_Drought_Soil_Dry_P Parameter: Organism Value: A. thaliana
  misc_feature: MA Experiment 20001556 PARAMETER Experiment Name: At_Drought_Soil_Dry_P Parameter: Plant Line Value: WS
  misc_feature: MA Experiment 20001556 PARAMETER Experiment Name: At_Drought_Soil_Dry_P Parameter: Post Timepoint (hr) Value: None
  misc_feature: MA Experiment 20001556 PARAMETER Experiment Name: At_Drought_Soil_Dry_P Parameter: Post-Treatment Value: None
  misc_feature: MA Experiment 20001556 PARAMETER Experiment Name: At_Drought_Soil_Dry_P Parameter: Timepoint (day) Value: 12
  misc_feature: MA Experiment 20001556 PARAMETER Experiment Name: At_Drought_Soil_Dry_P Parameter: Treatment Value: Drought vs. No Drought
  misc_feature: MA Experiment ID: 20001557 Result: Down-regulated in Transcription
  misc_feature: MA Experiment 20001557 PARAMETER Experiment Name: At_Drought_Soil_Dry_P Parameter: Age (day) Value: 27
  misc_feature: MA Experiment 20001557 PARAMETER Experiment Name: At_Drought_Soil_Dry_P Parameter: Organism Value: A. thaliana
  misc_feature: MA Experiment 20001557 PARAMETER Experiment Name: At_Drought_Soil_Dry_P Parameter: Plant Line Value: WS
  misc_feature: MA Experiment 20001557 PARAMETER Experiment Name: At_Drought_Soil_Dry_P Parameter: Post Timepoint (hr) Value: 3
  misc_feature: MA Experiment 20001557 PARAMETER Experiment Name: At_Drought_Soil_Dry_P Parameter: Post-Treatment Value: Re-Water vs. No Drought
  misc_feature: MA Experiment 20001557 PARAMETER Experiment Name: At_Drought_Soil_Dry_P Parameter: Timepoint (day) Value: 13
  misc_feature: MA Experiment 20001557 PARAMETER Experiment Name: At_Drought_Soil_Dry_P Parameter: Treatment Value: Drought vs. No Drought
  misc_feature: MA Experiment ID: 20001558 Result: Down-regulated in Transcription
  misc_feature: MA Experiment 20001558 PARAMETER Experiment Name: At_Drought_Soil_Dry_P Parameter: Age (day) Value: 27
  misc_feature: MA Experiment 20001558 PARAMETER Experiment Name: At_Drought_Soil_Dry_P Parameter: Organism Value: A. thaliana
  misc_feature: MA Experiment 20001558 PARAMETER Experiment Name: At_Drought_Soil_Dry_P Parameter: Plant Line Value: WS
  misc_feature: MA Experiment 20001558 PARAMETER Experiment Name: At_Drought_Soil_Dry_P Parameter: Post Timepoint (hr) Value: 6
  misc_feature: MA Experiment 20001558 PARAMETER Experiment Name: At_Drought_Soil_Dry_P Parameter: Post-Treatment Value: Re-Water vs. No Drought
  misc_feature: MA Experiment 20001558 PARAMETER Experiment Name: At_Drought_Soil_Dry_P Parameter: Timepoint (day) Value: 13
  misc_feature: MA Experiment 20001558 PARAMETER Experiment Name: At_Drought_Soil_Dry_P Parameter: Treatment Value: Drought vs. No Drought
atgaagagcacgaacgacgaatctccttccttgggatacgacttcgccggagttagcatcaaggacggaaaatctaagccgccggcgccggtaatatgttacgatggcttgttcggagggagagacgtgattagaatcgtgctattggtcacgaccgtgacactttcttgtctattattctacaaatctgcaaacaatccactcaatatggtgttttctccatggaagaccgattgttatgcttccaaacttacaaacgagtcttcctcaaaaacggaaccaaagaaggagccggtttcagaactagagagagtattgatgaatgcggctatggaagataacacggtgatcataacggcgttaaaccaagcatgggccgaaccaaactctacattcgatgtgtttcgagagagttttaaagtcggaatagaaacggagaggttattgaagcatgtgatcgcggtttgcttggatatcaaggcatatgatcagtgcctaaaggttcatcctcattgctatttgatcaacgccacagattcagaccaactctcaggtccgaatcggtttatgacgcctggttacttgaaacttatttggcggcgaatggatcttcttaggcaagttattggtttagggtacaacttcatattcacggatgcagatatattatggcttcgagacccatttcctcgtttttttccggatgctgattttcaaataacatgcgatgattacaatggaagaccatcggacaaaaagaatcacgtgaactccggatttacatacgtcaaggcaaacaacaaaacttcaaaattttacaaatattggattagatcgagtcggaaatttcctggaaaacacgatcaagatgtgttcaacttcataaaaaacgatcttcacgtcgagaaacttgggataaagatgaggtttttcgataccgtttactttggagggttttgtcagccgagccgagacatcaatgtggtcaacacaatgcatgctaattgttgtattggcttggacaacaaagtgaataatcttaaggcagctctcgaagattggaaacgatatgtgtcactaaacacgaccgtgtccgagactaaatggaatattccgcctaggtgtggttattaa

SEQ ID NO: 71081 - protein, 377 aa, Arabidopsis thaliana
  peptide (1)..(377): Ceres Seq. ID no. 3045592
  misc_feature (1)..(373): Homolog of NCBI NO: 15235236 NR Description: hypothetical protein common family; protein id:
  misc_feature (33)..(375): Homolog of NCBI NO: 21536907 NR Description: regulatory protein [Arabidopsis thaliana]
  misc_feature (13)..(375): Homolog of NCBI NO: 15235236 NR Description: hypothetical protein common family; protein id:
  misc_feature (45)..(375): Homolog of NCBI NO: 15223826 NR Description: hypothetical protein common family; protein id:
  misc_feature (42)..(375): Homolog of NCBI NO: 18395292 NR Description: unknown protein; protein id: At2g02060.1
  misc_feature (101)..(375): Homolog of NCBI NO: 38344278 NR Description: OSJNBa0013K16.10 [Oryza sativa (japonica
  misc_feature (84)..(375): Homolog of NCBI NO: 23306127 NR Description: Putataive InsB from Escherichia coli [Oryza
  misc_feature (84)..(375): Homolog of NCBI NO: 18414558 NR Description: hypothetical protein common family; protein id:
  misc_feature (111)..(375): Homolog of NCBI NO: 6063544 NR Description: similar to Arabidopsis thaliana chromosome 2, BAC
  misc_feature (81)..(376): Homolog of NCBI NO: 19386738 NR Description: P0678F11.28 [Oryza sativa (japonica
MKSTNDESPSLGYDFAGVSIKDGKSKPPAPVICYDGLFGGRDVIRIVLLVTTVTLSCLLFYKSANNPLNMVFSPWKTDCYASKLTNESSSKTEPKKEPVSELERVLMNAAMEDNTVIITALNQAWAEPNSTFDVFRESFKVGIETERLLKHVIAVCLDIKAYDQCLKVHPHCYLINATDSDQLSGPNRFMTPGYLKLIWRRMDLLRQVIGLGYNFIFTDADILWLRDPFPRFFPDADFQITCDDYNGRPSDKKNHVNSGFTYVKANNKTSKFYKYWIRSSRKFPGKHDQDVFNFIKNDLHVEKLGIKMRFFDTVYFGGFCQPSRDINVVNTMHANCCIGLDNKVNNLKAALEDWKRYVSLNTTVSETKWNIPPRCGY

SEQ ID NO: 71082 - protein, 308 aa, Arabidopsis thaliana
  peptide (1)..(308): Ceres Seq. ID no. 3045593
  misc_feature (1)..(304): Homolog of NCBI NO: 15235236 NR Description: hypothetical protein common family; protein id:
  misc_feature (1)..(306): Homolog of NCBI NO: 21536907 NR Description: regulatory protein [Arabidopsis thaliana]
  misc_feature (1)..(306): Homolog of NCBI NO: 15235236 NR Description: hypothetical protein common family; protein id:
  misc_feature (1)..(306): Homolog of NCBI NO: 15223826 NR Description: hypothetical protein common family; protein id:
  misc_feature (1)..(306): Homolog of NCBI NO: 18395292 NR Description: unknown protein; protein id: At2g02060.1
  misc_feature (32)..(306): Homolog of NCBI NO: 38344278 NR Description: OSJNBa0013K16.10 [Oryza sativa (japonica
  misc_feature (15)..(306): Homolog of NCBI NO: 23306127 NR Description: Putataive InsB from Escherichia coli [Oryza
  misc_feature (15)..(306): Homolog of NCBI NO: 18414558 NR Description: hypothetical protein common family; protein id:
  misc_feature (42)..(306): Homolog of NCBI NO: 6063544 NR Description: similar to Arabidopsis thaliana chromosome 2, BAC
  misc_feature (12)..(307): Homolog of NCBI NO: 19386738 NR Description: P0678F11.28 [Oryza sativa (japonica
MVFSPWKTDCYASKLTNESSSKTEPKKEPVSELERVLMNAAMEDNTVIITALNQAWAEPNSTFDVFRESFKVGIETERLLKHVIAVCLDIKAYDQCLKVHPHCYLINATDSDQLSGPNRFMTPGYLKLIWRRMDLLRQVIGLGYNFIFTDADILWLRDPFPRFFPDADFQITCDDYNGRPSDKKNHVNSGFTYVKANNKTSKFYKYWIRSSRKFPGKHDQDVFNFIKNDLHVEKLGIKMRFFDTVYFGGFCQPSRDINVVNTMHANCCIGLDNKVNNLKAALEDWKRYVSLNTTVSETKWNIPPRCGY

SEQ ID NO: 71083 - protein, 271 aa, Arabidopsis thaliana
  peptide (1)..(271): Ceres Seq. ID no. 3045594
  misc_feature (1)..(267): Homolog of NCBI NO: 15235236 NR Description: hypothetical protein common family; protein id:
  misc_feature (1)..(269): Homolog of NCBI NO: 21536907 NR Description: regulatory protein [Arabidopsis thaliana]
  misc_feature (1)..(269): Homolog of NCBI NO: 15235236 NR Description: hypothetical protein common family; protein id:
  misc_feature (1)..(269): Homolog of NCBI NO: 15223826 NR Description: hypothetical protein common family; protein id:
  misc_feature (1)..(269): Homolog of NCBI NO: 18395292 NR Description: unknown protein; protein id: At2g02060.1
  misc_feature (1)..(269): Homolog of NCBI NO: 38344278 NR Description: OSJNBa0013K16.10 [Oryza sativa (japonica
  misc_feature (1)..(269): Homolog of NCBI NO: 23306127 NR Description: Putataive InsB from Escherichia coli [Oryza
  misc_feature (1)..(269): Homolog of NCBI NO: 18414558 NR Description: hypothetical protein common family; protein id:
  misc_feature (5)..(269): Homolog of NCBI NO: 6063544 NR Description: similar to Arabidopsis thaliana chromosome 2, BAC
  misc_feature (1)..(270): Homolog of NCBI NO: 19386738 NR Description: P0678F11.28 [Oryza sativa (japonica
MNAAMEDNTVIITALNQAWAEPNSTFDVFRESFKVGIETERLLKHVIAVCLDIKAYDQCLKVHPHCYLINATDSDQLSGPNRFMTPGYLKLIWRRMDLLRQVIGLGYNFIFTDADILWLRDPFPRFFPDADFQITCDDYNGRPSDKKNHVNSGFTYVKANNKTSKFYKYWIRSSRKFPGKHDQDVFNFIKNDLHVEKLGIKMRFFDTVYFGGFCQPSRDINVVNTMHANCCIGLDNKVNNLKAALEDWKRYVSLNTTVSETKWNIPPRCGY

SEQ ID NO: 71084 - DNA, 2292 bp, Arabidopsis thaliana
  misc_feature (1)..(2292): Ceres Seq. ID no. 3047980
  misc_feature: MA Experiment ID: 20000234 Result: Up-regulated in Transcription
  misc_feature: MA Experiment 20000234 PARAMETER Experiment Name: At_Siliques_P Parameter: Age (day) Value: 21
  misc_feature: MA Experiment 20000234 PARAMETER Experiment Name: At_Siliques_P Parameter: Organism Value: A. thaliana
  misc_feature: MA Experiment 20000234 PARAMETER Experiment Name: At_Siliques_P Parameter: Plant Line Value: WS
  misc_feature: MA Experiment 20000234 PARAMETER Experiment Name: At_Siliques_P Parameter: Tissue Value: Less Than 5mm Siliques vs. Whole Plant
  misc_feature: MA Experiment ID: 20000235 Result: Up-regulated in Transcription
  misc_feature: MA Experiment 20000235 PARAMETER Experiment Name: At_Siliques_P Parameter: Age (day) Value: 21
  misc_feature: MA Experiment 20000235 PARAMETER Experiment Name: At_Siliques_P Parameter: Organism Value: A. thaliana
  misc_feature: MA Experiment 20000235 PARAMETER Experiment Name: At_Siliques_P Parameter: Plant Line Value: WS
  misc_feature: MA Experiment 20000235 PARAMETER Experiment Name: At_Siliques_P Parameter: Tissue Value: 5-10mm Siliques vs. Whole Plant
  misc_feature: MA Experiment ID: 20000264 Result: Up-regulated in Transcription
  misc_feature: MA Experiment 20000264 PARAMETER Experiment Name: At_Open_Flower_P Parameter: Age (day) Value: 21
  misc_feature: MA Experiment 20000264 PARAMETER Experiment Name: At_Open_Flower_P Parameter: Plant Line Value: WS
  misc_feature: MA Experiment 20000264 PARAMETER Experiment Name: At_Open_Flower_P Parameter: Tissue Value: Open Flower vs. Whole Plant
  misc_feature: MA Experiment ID: 20000439 Result: Up-regulated in Transcription
  misc_feature: MA Experiment 20000439 PARAMETER Experiment Name: At_Roots__P Parameter: Age (day) Value: 14 vs. 21
  misc_feature: MA Experiment 20000439 PARAMETER Experiment Name: At_Roots__P Parameter: Organism Value: A. thaliana
  misc_feature: MA Experiment 20000439 PARAMETER Experiment Name: At_Roots__P Parameter: Tissue Value: Roots vs. Whole Plant
  misc_feature: MA Experiment ID: 20000794 Result: Up-regulated in Transcription
  misc_feature: MA Experiment 20000794 PARAMETER Experiment Name: At_Petals_P Parameter: Age (day) Value: 23-25 days
  misc_feature: MA Experiment 20000794 PARAMETER Experiment Name: At_Petals_P Parameter: Plant Line Value: WS
  misc_feature: MA Experiment 20000794 PARAMETER Experiment Name: At_Petals_P Parameter: Tissue Value: Petals vs. Whole plant
atgtggctaccaaaagcaaatggggcaaagaaagaaacaggaagtggttcagtagcagttgcaatagacaaagacaaaggaagccaacatgctcttaaatggacaatcgacaatcttgcttctcgtggccaaaccatttctcttattcatgtcctctgcagatctcattcttcttcagatcttgaagaaggaacgccacaacagaaacagcaaatggagaagatagctaaagatctctttgtatccttccactgctattgttcccgtaaagagataaattgtcgagacattttgctggaagacgcagacaaagttcgagccattaccgaatatgtttcatcttctgcaattgagaacttagtcgttggatctgcatcacgtaatggcttcatgagaagattcaagacggatttgccaacaacagtgtcaaaatcagctccagatttctgcaatgtttatgtcatttcaaaaggcaaaattgcttcagtacgaaatgcatcacgtcctgctccttaccaaaattcgatgcagcaatgtgaaattgacaatcatcacccacatactcctgacaaagcaccaaagtaccatgaccatcccaattctgcaggtagtacaccatctagaccgcgcaaatcagttgaagcagataggtataggaattggaagcttgttgtgatgtctttaagatcgccgttggtgaaaaggaagccatatggggacttctatgattcagatagtgacctttcgtttatcagtccgtcttctcatcgtgactctgacatttccttcatcagctcaggaagaccaagcgttgagcggtcttcctttagccttgattttcctgaatctgcaaggacttcaagaatgtcaacgagctcagagcaaagcattggctcaaatcgtttgggaattaagttcagtgatcctgatttccttaacgaatcctctacattctctgaagagagtggtagaacatcctcctattcatctcagagcttggatgatgttgaagctgaaatgaagaggctgcgtctagagctgaaacaaaccatggatatgtatagcacagcttgtaaagaagctttaagcgctagacaacaggcaacggagctgcaaaagctgagaaccgaagaggagagacggttggaagaagcaaaaagttcagaggaagcagcaatgtcaatagtggaaaaggagagagctaaagccaaagcagcgttggaagctgctgaagctgcaaagagattagcagaagtggaatctaaaagaaggttgactgcagagatgaagacaatgaaggaatcagattcattctctcgcggatttgttcggtataggaaatacacggttgacgaaatcgaagaagctacttcaaattttgcagagtctcaaaaggtaggagaaggaggctatggtcctgtctttagaggctttcttgatcacacaagtgttgctgttaaagttctacgcccagacgcagctcaagggagatcacagtttcagaaagaggttgaagtgttaagctgcataaggcatccaaacatggtgcttcttcttggagcttgtccagaatttgggattcttgtttatgaatacatggccaaaggaagtttagaagaccggcttttcatgcgaggaaacacaccgccgattacctggcagctacgtttcagaatcgctgctgagatcgccacgggactcctcttcctccaccagaccaaacctgaaccaattgtccacagagaccttaaaccaggaaatgttctgctcgattacaactatgtgagcaagatcagtgatgtcgggctagcgagattagtccctgcagtagcggaaaacgttacacagtacagagtcacttcagctgcaggaactttctgttacattgatcctgagtaccaacaaacaggaatgttgggtgtgaagtcagatgtttattctcttggaatcatgcttttgcagatcttaaccgcaaaacagccaatgggtttggcttattacgttgaacaagcgatcgaagaagggactcttaaggatatgcttgatccagcagtaccggactggcctatagaagaagctctatctttagcaaagctttcgcttcaatgcgcggaactaagaagaaaagatagacctgacctcgggaaagagatattgcctgagctcaatcggttaagagagataggtgaagagagtttagagagtgtgttttatgcaggaaatcaaggaaagtctccaaacactagccaagtctcgattccggaatctccagctgcagaatctcaatcctag

SEQ ID NO: 71085 - protein, 763 aa, Arabidopsis thaliana
  peptide (1)..(763): Ceres Seq. ID no. 3047981
  misc_feature (14)..(144): Pfam Name: Universal stress protein family Pfam Description: Universal stress protein family
  misc_feature (1)..(752): Homolog of NCBI NO: 15219360 NR Description: protein kinase, putative; protein id: At1g16760.1
  misc_feature (236)..(752): Homolog of NCBI NO: 25518361 NR Description: hypothetical protein F17F16.3 [imported] - thaliana >gi|9954729|gb|AAG09082.1|AC026237_3 Similar to protein
  misc_feature (5)..(754): Homolog of NCBI NO: 9293976 NR Description: Ser/Thr protein kinaseroteinase) [Arabidopsis
  misc_feature (5)..(754): Homolog of NCBI NO: 30685668 NR Description: protein kinase family [Arabidopsis thaliana] putative protein kinase [Arabidopsis thaliana]
  misc_feature (2)..(749): Homolog of NCBI NO: 18092335 NR Description: serine threonine kinase [Zea mays]
  misc_feature (18)..(734): Homolog of NCBI NO: 14719286 NR Description: serine threonine kinase 1 [Zea mays]
  misc_feature (57)..(753): Homolog of NCBI NO: 15224129 NR Description: putative protein kinase; protein id: At2g24370.1
  misc_feature (1)..(440): Homolog of NCBI NO: 25518361 NR Description: hypothetical protein F17F16.3 [imported] - thaliana >gi|9954729|gb|AAG09082.1|AC026237_3 Similar to protein
  misc_feature (253)..(762): Homolog of NCBI NO: 8778472 NR Description: F1L3.25 [Arabidopsis thaliana]
  misc_feature (262)..(735): Homolog of NCBI NO: 22327904 NR Description: similar to putative protein kinase; protein id:
MWLPKANGAKKETGSGSVAVAIDKDKGSQHALKWTIDNLASRGQTISLIHVLCRSHSSSDLEEGTPQQKQQMEKIAKDLFVSFHCYCSRKEINCRDILLEDADKVRAITEYVSSSAIENLVVGSASRNGFMRRFKTDLPTTVSKSAPDFCNVYVISKGKIASVRNASRPAPYQNSMQQCEIDNHHPHTPDKAPKYHDHPNSAGSTPSRPRKSVEADRYRNWKLVVMSLRSPLVKRKPYGDFYDSDSDLSFISPSSHRDSDISFISSGRPSVERSSFSLDFPESARTSRMSTSSEQSIGSNRLGIKFSDPDFLNESSTFSEESGRTSSYSSQSLDDVEAEMKRLRLELKQTMDMYSTACKEALSARQQATELQKLRTEEERRLEEAKSSEEAAMSIVEKERAKAKAALEAAEAAKRLAEVESKRRLTAEMKTMKESDSFSRGFVRYRKYTVDEIEEATSNFAESQKVGEGGYGPVFRGFLDHTSVAVKVLRPDAAQGRSQFQKEVEVLSCIRHPNMVLLLGACPEFGILVYEYMAKGSLEDRLFMRGNTPPITWQLRFRIAAEIATGLLFLHQTKPEPIVHRDLKPGNVLLDYNYVSKISDVGLARLVPAVAENVTQYRVTSAAGTFCYIDPEYQQTGMLGVKSDVYSLGIMLLQILTAKQPMGLAYYVEQAIEEGTLKDMLDPAVPDWPIEEALSLAKLSLQCAELRRKDRPDLGKEILPELNRLREIGEESLESVFYAGNQGKSPNTSQVSIPESPAAESQS

SEQ ID NO: 71086 - protein, 692 aa, Arabidopsis thaliana
  peptide (1)..(692): Ceres Seq. ID no. 3047982
  misc_feature (1)..(73): Pfam Name: Universal stress protein family Pfam Description: Universal stress protein family
  misc_feature (1)..(681): Homolog of NCBI NO: 15219360 NR Description: protein kinase, putative; protein id: At1g16760.1
  misc_feature (165)..(681): Homolog of NCBI NO: 25518361 NR Description: hypothetical protein F17F16.3 [imported] - thaliana >gi|9954729|gb|AAG09082.1|AC026237_3 Similar to protein
  misc_feature (1)..(683): Homolog of NCBI NO: 9293976 NR Description: Ser/Thr protein kinaseroteinase) [Arabidopsis
  misc_feature (1)..(683): Homolog of NCBI NO: 30685668 NR Description: protein kinase family [Arabidopsis thaliana] putative protein kinase [Arabidopsis thaliana]
  misc_feature (1)..(678): Homolog of NCBI NO: 18092335 NR Description: serine threonine kinase [Zea mays]
  misc_feature (1)..(663): Homolog of NCBI NO: 14719286 NR Description: serine threonine kinase 1 [Zea mays]
  misc_feature (1)..(682): Homolog of NCBI NO: 15224129 NR Description: putative protein kinase; protein id: At2g24370.1
  misc_feature (1)..(369): Homolog of NCBI NO: 25518361 NR Description: hypothetical protein F17F16.3 [imported] - thaliana >gi|9954729|gb|AAG09082.1|AC026237_3 Similar to protein
  misc_feature (182)..(691): Homolog of NCBI NO: 8778472 NR Description: F1L3.25 [Arabidopsis thaliana]
  misc_feature (191)..(664): Homolog of NCBI NO: 22327904 NR Description: similar to putative protein kinase; protein id:
MEKIAKDLFVSFHCYCSRKEINCRDILLEDADKVRAITEYVSSSAIENLVVGSASRNGFMRRFKTDLPTTVSKSAPDFCNVYVISKGKIASVRNASRPAPYQNSMQQCEIDNHHPHTPDKAPKYHDHPNSAGSTPSRPRKSVEADRYRNWKLVVMSLRSPLVKRKPYGDFYDSDSDLSFISPSSHRDSDISFISSGRPSVERSSFSLDFPESARTSRMSTSSEQSIGSNRLGIKFSDPDFLNESSTFSEESGRTSSYSSQSLDDVEAEMKRLRLELKQTMDMYSTACKEALSARQQATELQKLRTEEERRLEEAKSSEEAAMSIVEKERAKAKAALEAAEAAKRLAEVESKRRLTAEMKTMKESDSFSRGFVRYRKYTVDEIEEATSNFAESQKVGEGGYGPVFRGFLDHTSVAVKVLRPDAAQGRSQFQKEVEVLSCIRHPNMVLLLGACPEFGILVYEYMAKGSLEDRLFMRGNTPPITWQLRFRIAAEIATGLLFLHQTKPEPIVHRDLKPGNVLLDYNYVSKISDVGLARLVPAVAENVTQYRVTSAAGTFCYIDPEYQQTGMLGVKSDVYSLGIMLLQILTAKQPMGLAYYVEQAIEEGTLKDMLDPAVPDWPIEEALSLAKLSLQCAELRRKDRPDLGKEILPELNRLREIGEESLESVFYAGNQGKSPNTSQVSIPESPAAESQS

SEQ ID NO: 71087 - protein, 633 aa, Arabidopsis thaliana
  peptide (1)..(633): Ceres Seq. ID no. 3047983
  misc_feature (1)..(622): Homolog of NCBI NO: 15219360 NR Description: protein kinase, putative; protein id: At1g16760.1
  misc_feature (106)..(622): Homolog of NCBI NO: 25518361 NR Description: hypothetical protein F17F16.3 [imported] - thaliana >gi|9954729|gb|AAG09082.1|AC026237_3 Similar to protein
  misc_feature (1)..(624): Homolog of NCBI NO: 9293976 NR Description: Ser/Thr protein kinaseroteinase) [Arabidopsis
  misc_feature (1)..(624): Homolog of NCBI NO: 30685668 NR Description: protein kinase family [Arabidopsis thaliana] putative protein kinase [Arabidopsis thaliana]
  misc_feature (1)..(619): Homolog of NCBI NO: 18092335 NR Description: serine threonine kinase [Zea mays]
  misc_feature (1)..(604): Homolog of NCBI NO: 14719286 NR Description: serine threonine kinase 1 [Zea mays]
  misc_feature (1)..(623): Homolog of NCBI NO: 15224129 NR Description: putative protein kinase; protein id: At2g24370.1
  misc_feature (1)..(310): Homolog of NCBI NO: 25518361 NR Description: hypothetical protein F17F16.3 [imported] - thaliana >gi|9954729|gb|AAG09082.1|AC026237_3 Similar to protein
  misc_feature (123)..(632): Homolog of NCBI NO: 8778472 NR Description: F1L3.25 [Arabidopsis thaliana]
  misc_feature (132)..(605): Homolog of NCBI NO: 22327904 NR Description: similar to putative protein kinase; protein id:
MRRFKTDLPTTVSKSAPDFCNVYVISKGKIASVRNASRPAPYQNSMQQCEIDNHHPHTPDKAPKYHDHPNSAGSTPSRPRKSVEADRYRNWKLVVMSLRSPLVKRKPYGDFYDSDSDLSFISPSSHRDSDISFISSGRPSVERSSFSLDFPESARTSRMSTSSEQSIGSNRLGIKFSDPDFLNESSTFSEESGRTSSYSSQSLDDVEAEMKRLRLELKQTMDMYSTACKEALSARQQATELQKLRTEEERRLEEAKSSEEAAMSIVEKERAKAKAALEAAEAAKRLAEVESKRRLTAEMKTMKESDSFSRGFVRYRKYTVDEIEEATSNFAESQKVGEGGYGPVFRGFLDHTSVAVKVLRPDAAQGRSQFQKEVEVLSCIRHPNMVLLLGACPEFGILVYEYMAKGSLEDRLFMRGNTPPITWQLRFRIAAEIATGLLFLHQTKPEPIVHRDLKPGNVLLDYNYVSKISDVGLARLVPAVAENVTQYRVTSAAGTFCYIDPEYQQTGMLGVKSDVYSLGIMLLQILTAKQPMGLAYYVEQAIEEGTLKDMLDPAVPDWPIEEALSLAKLSLQCAELRRKDRPDLGKEILPELNRLREIGEESLESVFYAGNQGKSPNTSQVSIPESPAAESQS

SEQ ID NO: 71088 - DNA, 1107 bp, Arabidopsis thaliana
  misc_feature (1)..(1107): Ceres Seq. ID no. 3048784
  misc_feature: MA Experiment ID: 20000184 Result: Down-regulated in Transcription
  misc_feature: MA Experiment 20000184 PARAMETER Experiment Name: At_Shoots__P Parameter: Age (day) Value: 7
  misc_feature: MA Experiment 20000184 PARAMETER Experiment Name: At_Shoots__P Parameter: Tissue Value: Shoots vs. Whole Plant
  misc_feature: MA Experiment ID: 20000234 Result: Down-regulated in Transcription
  misc_feature: MA Experiment 20000234 PARAMETER Experiment Name: At_Siliques_P Parameter: Age (day) Value: 21
  misc_feature: MA Experiment 20000234 PARAMETER Experiment Name: At_Siliques_P Parameter: Organism Value: A. thaliana
  misc_feature: MA Experiment 20000234 PARAMETER Experiment Name: At_Siliques_P Parameter: Plant Line Value: WS
  misc_feature: MA Experiment 20000234 PARAMETER Experiment Name: At_Siliques_P Parameter: Tissue Value: Less Than 5mm Siliques vs. Whole Plant
  misc_feature: MA Experiment ID: 20000235 Result: Down-regulated in Transcription
  misc_feature: MA Experiment 20000235 PARAMETER Experiment Name: At_Siliques_P Parameter: Age (day) Value: 21
  misc_feature: MA Experiment 20000235 PARAMETER Experiment Name: At_Siliques_P Parameter: Organism Value: A. thaliana
  misc_feature: MA Experiment 20000235 PARAMETER Experiment Name: At_Siliques_P Parameter: Plant Line Value: WS
  misc_feature: MA Experiment 20000235 PARAMETER Experiment Name: At_Siliques_P Parameter: Tissue Value: 5-10mm Siliques vs. Whole Plant
  misc_feature: MA Experiment ID: 20000264 Result: Down-regulated in Transcription
  misc_feature: MA Experiment 20000264 PARAMETER Experiment Name: At_Open_Flower_P Parameter: Age (day) Value: 21
  misc_feature: MA Experiment 20000264 PARAMETER Experiment Name: At_Open_Flower_P Parameter: Plant Line Value: WS
  misc_feature: MA Experiment 20000264 PARAMETER Experiment Name: At_Open_Flower_P Parameter: Tissue Value: Open Flower vs. Whole Plant
  misc_feature: MA Experiment ID: 20000265 Result: Down-regulated in Transcription
  misc_feature: MA Experiment 20000265 PARAMETER Experiment Name: At_Open_Flower_P Parameter: Age (day) Value: 21
  misc_feature: MA Experiment 20000265 PARAMETER Experiment Name: At_Open_Flower_P Parameter: Plant Line Value: WS
  misc_feature: MA Experiment 20000265 PARAMETER Experiment Name: At_Open_Flower_P Parameter: Tissue Value: Closed Flower vs. Whole Plant
  misc_feature: MA Experiment ID: 20000286 Result: Down-regulated in Transcription
  misc_feature: MA Experiment 20000286 PARAMETER Experiment Name: At_Open_Flower_P Parameter: Age (day) Value: 21
  misc_feature: MA Experiment 20000286 PARAMETER Experiment Name: At_Open_Flower_P Parameter: Plant Line Value: WS
  misc_feature: MA Experiment 20000286 PARAMETER Experiment Name: At_Open_Flower_P Parameter: Tissue Value: Half Open vs. Whole Plant
atggcggatgttaaggactcagtgattaccaagtacggaatcgtagggattggtatgatgggaagagaacatctcatcaatcttcaccatctccgtgaccaaggcctcgccgtcgtttgcatcgccgatcctcaccctccttcacagctcctggccattgaactcgctcaatcttttggatgggagcttaaggttttctcaggacacgaggagttgctcaagagtgagctgtgtgacgttattgttgtctcttctccaaatatgactcatcatcagattcttatggacattatcaattattcaaaaccgcatcatgttcttgttgagaagcctttatgcaccacagttgcagattgcaaacaggttttggaggctgcaaagaaaaggtcagatatggtggtgcaagttgggttggagtacagatacatgccgccagttgctaagctaatagaacaagtaaaaggcagagactttggtaatgtcaagatggtagcaatccgagaacatagattccctttcttggttaaggtgaacaactggaatagattcaatgtgaacactggagggaccttagtggagaaatgctgccacttctttgatctaatgaggctctttgccggtgcaaatcctgtctgtgtgatggcttctggaggcatggatgtgaaccacaaggatgaagtttatggtggaaaggtgcctgatataattgataacgcatatgttattattgagtttgacaatggatgtcgtgggatgctcgatctttgcatgtttgctgaaggaagcaaaaacgagcaagaaatttctgttactggtgacattggaaagggggaggcacttgttccagagggtatagttcgatctggcagtcgtattggaggaagagaacacgttcaaacaataaaagcagaagatgaaagaataaaatatgaagggttgcatcacgggtcaagttacttggaacacctcaccttcttatcagcaatcagaggtgaaggaatagcagctgttgatttggaagacggattgatggctgttgccatgggagttgctgcacagctctccattcaggagcgccgctatgtaaccattgacgaggtcttgtga

SEQ ID NO: 71089 - protein, 368 aa, Arabidopsis thaliana
  peptide (1)..(368): Ceres Seq. ID no. 3048785
  misc_feature (10)..(138): Pfam Name: Oxidoreductase family, NAD-binding Rossmann fold Pfam Description: Oxidoreductase family, NAD-binding Rossmann fold
  misc_feature (1)..(368): Homolog of NCBI NO: 15236047 NR Description: putative protein; protein id: At4g17370.1
  misc_feature (64)..(366): Homolog of NCBI NO: 37573125 NR Description: organic cation transporter-like protein [Oryza
  misc_feature (11)..(56): Homolog of NCBI NO: 37573125 NR Description: organic cation transporter-like protein [Oryza
  misc_feature (11)..(218): Homolog of NCBI NO: 17936479 NR Description: oxidoreductase [Agrobacterium tumefaciens str.
  misc_feature (11)..(218): Homolog of NCBI NO: 15889861 NR Description: AGR_C_4719p [Agrobacterium tumefaciens]
  misc_feature (11)..(227): Homolog of NCBI NO: 27381029 NR Description: bll5918 [Bradyrhizobium japonicum]
  misc_feature (8)..(353): Homolog of NCBI NO: 40743395 NR Description: hypothetical protein AN5425.2 [Aspergillus
  misc_feature (11)..(218): Homolog of NCBI NO: 16264562 NR Description: putative oxidoreductase protein [Sinorhizobium
  misc_feature (14)..(357): Homolog of NCBI NO: 16766065 NR Description: putative dehydrogenase [Salmonella typhimurium >gi|16421300|gb|AAL21639.1| putative dehydrogenase [Salmonella
  misc_feature (11)..(169): Homolog of NCBI NO: 16767671 NR Description: putative dehydrogenase [Salmonella typhimurium >gi|16422988|gb|AAL23245.1| putative dehydrogenase [Salmonella
MADVKDSVITKYGIVGIGMMGREHLINLHHLRDQGLAVVCIADPHPPSQLLAIELAQSFGWELKVFSGHEELLKSELCDVIVVSSPNMTHHQILMDIINYSKPHHVLVEKPLCTTVADCKQVLEAAKKRSDMVVQVGLEYRYMPPVAKLIEQVKGRDFGNVKMVAIREHRFPFLVKVNNWNRFNVNTGGTLVEKCCHFFDLMRLFAGANPVCVMASGGMDVNHKDEVYGGKVPDIIDNAYVIIEFDNGCRGMLDLCMFAEGSKNEQEISVTGDIGKGEALVPEGIVRSGSRIGGREHVQTIKAEDERIKYEGLHHGSSYLEHLTFLSAIRGEGIAAVDLEDGLMAVAMGVAAQLSIQERRYVTIDEVL

SEQ ID NO: 71090 - protein, 350 aa, Arabidopsis thaliana
  peptide (1)..(350): Ceres Seq. ID no. 3048786
  misc_feature (1)..(120): Pfam Name: Oxidoreductase family, NAD-binding Rossmann fold Pfam Description: Oxidoreductase family, NAD-binding Rossmann fold
  misc_feature (1)..(350): Homolog of NCBI NO: 15236047 NR Description: putative protein; protein id: At4g17370.1
  misc_feature (46)..(348): Homolog of NCBI NO: 37573125 NR Description: organic cation transporter-like protein [Oryza
  misc_feature (1)..(38): Homolog of NCBI NO: 37573125 NR Description: organic cation transporter-like protein [Oryza
  misc_feature (1)..(200): Homolog of NCBI NO: 17936479 NR Description: oxidoreductase [Agrobacterium tumefaciens str.
  misc_feature (1)..(200): Homolog of NCBI NO: 15889861 NR Description: AGR_C_4719p [Agrobacterium tumefaciens]
  misc_feature (1)..(209): Homolog of NCBI NO: 27381029 NR Description: bll5918 [Bradyrhizobium japonicum]
  misc_feature (1)..(335): Homolog of NCBI NO: 40743395 NR Description: hypothetical protein AN5425.2 [Aspergillus
  misc_feature (1)..(200): Homolog of NCBI NO: 16264562 NR Description: putative oxidoreductase protein [Sinorhizobium
  misc_feature (1)..(339): Homolog of NCBI NO: 16766065 NR Description: putative dehydrogenase [Salmonella typhimurium >gi|16421300|gb|AAL21639.1| putative dehydrogenase [Salmonella
  misc_feature (1)..(151): Homolog of NCBI NO: 16767671 NR Description: putative dehydrogenase [Salmonella typhimurium >gi|16422988|gb|AAL23245.1| putative dehydrogenase [Salmonella
MMGREHLINLHHLRDQGLAVVCIADPHPPSQLLAIELAQSFGWELKVFSGHEELLKSELCDVIVVSSPNMTHHQILMDIINYSKPHHVLVEKPLCTTVADCKQVLEAAKKRSDMVVQVGLEYRYMPPVAKLIEQVKGRDFGNVKMVAIREHRFPFLVKVNNWNRFNVNTGGTLVEKCCHFFDLMRLFAGANPVCVMASGGMDVNHKDEVYGGKVPDIIDNAYVIIEFDNGCRGMLDLCMFAEGSKNEQEISVTGDIGKGEALVPEGIVRSGSRIGGREHVQTIKAEDERIKYEGLHHGSSYLEHLTFLSAIRGEGIAAVDLEDGLMAVAMGVAAQLSIQERRYVTIDEVL

SEQ ID NO: 71091 - protein, 349 aa, Arabidopsis thaliana
  peptide (1)..(349): Ceres Seq. ID no. 3048787
  misc_feature (1)..(119): Pfam Name: Oxidoreductase family, NAD-binding Rossmann fold Pfam Description: Oxidoreductase family, NAD-binding Rossmann fold
  misc_feature (1)..(349): Homolog of NCBI NO: 15236047 NR Description: putative protein; protein id: At4g17370.1
  misc_feature (45)..(347): Homolog of NCBI NO: 37573125 NR Description: organic cation transporter-like protein [Oryza
  misc_feature (1)..(37): Homolog of NCBI NO: 37573125 NR Description: organic cation transporter-like protein [Oryza
  misc_feature (1)..(199): Homolog of NCBI NO: 17936479 NR Description: oxidoreductase [Agrobacterium tumefaciens str.
  misc_feature (1)..(199): Homolog of NCBI NO: 15889861 NR Description: AGR_C_4719p [Agrobacterium tumefaciens]
  misc_feature (1)..(208): Homolog of NCBI NO: 27381029 NR Description: bll5918 [Bradyrhizobium japonicum]
  misc_feature (1)..(334): Homolog of NCBI NO: 40743395 NR Description: hypothetical protein AN5425.2 [Aspergillus
  misc_feature (1)..(199): Homolog of NCBI NO: 16264562 NR Description: putative oxidoreductase protein [Sinorhizobium
  misc_feature (1)..(338): Homolog of NCBI NO: 16766065 NR Description: putative dehydrogenase [Salmonella typhimurium >gi|16421300|gb|AAL21639.1| putative dehydrogenase [Salmonella
  misc_feature (1)..(150): Homolog of NCBI NO: 16767671 NR Description: putative dehydrogenase [Salmonella typhimurium >gi|16422988|gb|AAL23245.1| putative dehydrogenase [Salmonella
MGREHLINLHHLRDQGLAVVCIADPHPPSQLLAIELAQSFGWELKVFSGHEELLKSELCDVIVVSSPNMTHHQILMDIINYSKPHHVLVEKPLCTTVADCKQVLEAAKKRSDMVVQVGLEYRYMPPVAKLIEQVKGRDFGNVKMVAIREHRFPFLVKVNNWNRFNVNTGGTLVEKCCHFFDLMRLFAGANPVCVMASGGMDVNHKDEVYGGKVPDIIDNAYVIIEFDNGCRGMLDLCMFAEGSKNEQEISVTGDIGKGEALVPEGIVRSGSRIGGREHVQTIKAEDERIKYEGLHHGSSYLEHLTFLSAIRGEGIAAVDLEDGLMAVAMGVAAQLSIQERRYVTIDEVL

SEQ ID NO: 71092 - DNA, 1344 bp, Arabidopsis thaliana
  misc_feature (1)..(1344): Ceres Seq. ID no. 3049085
  misc_feature: MA Experiment ID: 20000306 Result: Up-regulated in Transcription
  misc_feature: MA Experiment 20000306 PARAMETER Experiment Name: At_Germinating_Seeds_Sub_P Parameter: Age (hr) Value: 6 vs. 0
  misc_feature: MA Experiment 20000306 PARAMETER Experiment Name: At_Germinating_Seeds_Sub_P Parameter: Organism Value: A. thaliana
  misc_feature: MA Experiment 20000306 PARAMETER Experiment Name: At_Germinating_Seeds_Sub_P Parameter: Plant Line Value: WS
  misc_feature: MA Experiment 20000306 PARAMETER Experiment Name: At_Germinating_Seeds_Sub_P Parameter: Tissue Value: Germinating Seeds
  misc_feature: MA Experiment ID: 20000307 Result: Up-regulated in Transcription
  misc_feature: MA Experiment 20000307 PARAMETER Experiment Name: At_Germinating_Seeds_Sub_P Parameter: Age (hr) Value: 24 vs. 0
  misc_feature: MA Experiment 20000307 PARAMETER Experiment Name: At_Germinating_Seeds_Sub_P Parameter: Organism Value: A. thaliana
  misc_feature: MA Experiment 20000307 PARAMETER Experiment Name: At_Germinating_Seeds_Sub_P Parameter: Plant Line Value: WS
  misc_feature: MA Experiment 20000307 PARAMETER Experiment Name: At_Germinating_Seeds_Sub_P Parameter: Tissue Value: Germinating Seeds
  misc_feature: MA Experiment ID: 20000314 Result: Up-regulated in Transcription
  misc_feature: MA Experiment 20000314 PARAMETER Experiment Name: At_14day_Shoots-Roots_Sub_P Parameter: Age (day) Value: 14
  misc_feature: MA Experiment 20000314 PARAMETER Experiment Name: At_14day_Shoots-Roots_Sub_P Parameter: Organism Value: A. thaliana
  misc_feature: MA Experiment 20000314 PARAMETER Experiment Name: At_14day_Shoots-Roots_Sub_P Parameter: Plant Line Value: WS
  misc_feature: MA Experiment 20000314 PARAMETER Experiment Name: At_14day_Shoots-Roots_Sub_P Parameter: Tissue Value: Roots vs. Whole Plant
  misc_feature: MA Experiment ID: 20000347 Result: Up-regulated in Transcription
  misc_feature: MA Experiment 20000347 PARAMETER Experiment Name: At_2mM_SA_Sub_P Parameter: Age (day) Value: 14
  misc_feature: MA Experiment 20000347 PARAMETER Experiment Name: At_2mM_SA_Sub_P Parameter: Organism Value: A. thaliana
  misc_feature: MA Experiment 20000347 PARAMETER Experiment Name: At_2mM_SA_Sub_P Parameter: Plant Line Value: WS
  misc_feature: MA Experiment 20000347 PARAMETER Experiment Name: At_2mM_SA_Sub_P Parameter: Timepoint (hr) Value: 6
  misc_feature: MA Experiment 20000347 PARAMETER Experiment Name: At_2mM_SA_Sub_P Parameter: Tissue Value: Aerial
  misc_feature: MA Experiment 20000347 PARAMETER Experiment Name: At_2mM_SA_Sub_P Parameter: Treatment Value: 2mM SA vs. No Treatment
  misc_feature: MA Experiment ID: 20000440 Result: Down-regulated in Transcription
  misc_feature: MA Experiment 20000440 PARAMETER Experiment Name: At_Closed-Flower__Sub_P Parameter: Tissue Value: Closed Flower vs. Whole Plant
atggagaaaagagtagagaagagaaggatagtgttggttccacttccattactaggacatttcactccgatgatgcaactcggccaagcccttatcttgaagggattctcaattatagttcctcagggagaattcaatcgagtaaactcttcgcagaagttccctggttttcaatttatcaccataccagattctgaactcgaggcaaatggaccagtcgggtctctaacacagctcaacaaaattatggaggcaagcttcaaggactgtataaggcagttgttgaaacaacaaggcaatgatattgcatgtatcatctacgacgagttcatgtatttttgtggagccgtagctgaggagttgaagcttcccaatttcatcttcagtactcaaactgctacacataaagtttgctgcaatgttttaagcaaacttaatgccaagaagtacttgatcgacatggaagagcatgacgtgcaaaacaaggtagtggaaaatatgcatccattaagatacaaagacttaccaactgcaacatttggagaactagaaccttttttggagctctgtagagatgtagtcaacaaaagaacagcctctgctgttatcatcaacaccgtgacctgtctagagagctcgtctctcacaaggctgcaacaagaactccaaattccggtgtatccattaggccctcttcacattacagattcatcgacaggatttactgtgctgcaagaggataggagctgcgttgaatggctgaacaagcagaaaccaaggtctgtcatatacataagtttaggaagcatggttctcatggaaaccaaggagatgttagagatggcttggggaatgttgaatagcaaccaacctttcttatgggtcatccgacctggatctgtctcaggctccgaggggatagagtcattgccagaggaagtcagtaagatggttttagagaaaggatacattgtgaaatgggcaccacaaatagaagtactaggacatccctcagtgggaggcttttggagccactgtggatggaactcaacactcgagagcattgtggaaggagttccaatgatttgcaggccttatcaaggcgagcagatgttaaatgcaatatatctagagagtgtatggagaatagggattcaggtaggaggtgaactggaaagaggagccgtcgagagagctgtgaagaggttgattgtggataaagaaggtgcaagcatgagggagagaacccttgttttaaaagagaagctcaaagcctctattagaggtggaggctcctcatgcaatgcattagatgagcttgtcaagcacttgaagacagagtga

SEQ ID NO: 71093 - protein, 447 aa, Arabidopsis thaliana
  peptide (1)..(447): Ceres Seq. ID no. 3049086
  misc_feature (9)..(64): Pfam Name: UDP-glucoronosyl and UDP-glucosyl transferase Pfam Description: UDP-glucoronosyl and UDP-glucosyl transferase
  misc_feature (118)..(447): Homolog of NCBI NO: 15232621 NR Description: glucuronosyl transferase-like protein; protein At3g46700.1 [Arabidopsis thaliana] >gi|7487760|pir||T12980
  misc_feature (1)..(64): Homolog of NCBI NO: 15232621 NR Description: glucuronosyl transferase-like protein; protein At3g46700.1 [Arabidopsis thaliana] >gi|7487760|pir||T12980
  misc_feature (1)..(441): Homolog of NCBI NO: 15232619 NR Description: glucosyltransferase-like protein; protein id: [Arabidopsis thaliana] >gi|11258173|pir||T45605
  misc_feature (1)..(447): Homolog of NCBI NO: 15232620 NR Description: glucuronosyl transferase-like protein; protein At3g46690.1 [Arabidopsis thaliana] >gi|7433909|pir||T12981
  misc_feature (1)..(447): Homolog of NCBI NO: 26449469 NR Description: putative glucuronosyl transferase [Arabidopsis
  misc_feature (1)..(447): Homolog of NCBI NO: 15232623 NR Description: glucuronosyl transferase-like protein; protein At3g46720.1 [Arabidopsis thaliana] >gi|7433908|pir||T12978
  misc_feature (141)..(447): Homolog of NCBI NO: 15232598 NR Description: glucosyltransferase-like protein; protein id:
  misc_feature (1)..(137): Homolog of NCBI NO: 15232598 NR Description: glucosyltransferase-like protein; protein id:
  misc_feature (1)..(445): Homolog of NCBI NO: 30697251 NR Description: glycosyltransferase family [Arabidopsis thaliana]
  misc_feature (2)..(444): Homolog of NCBI NO: 15238467 NR Description: glucuronosyl transferase - like protein; protein
MEKRVEKRRIVLVPLPLLGHFTPMMQLGQALILKGFSIIVPQGEFNRVNSSQKFPGFQFITIPDSELEANGPVGSLTQLNKIMEASFKDCIRQLLKQQGNDIACIIYDEFMYFCGAVAEELKLPNFIFSTQTATHKVCCNVLSKLNAKKYLIDMEEHDVQNKVVENMHPLRYKDLPTATFGELEPFLELCRDVVNKRTASAVIINTVTCLESSSLTRLQQELQIPVYPLGPLHITDSSTGFTVLQEDRSCVEWLNKQKPRSVIYISLGSMVLMETKEMLEMAWGMLNSNQPFLWVIRPGSVSGSEGIESLPEEVSKMVLEKGYIVKWAPQIEVLGHPSVGGFWSHCGWNSTLESIVEGVPMICRPYQGEQMLNAIYLESVWRIGIQVGGELERGAVERAVKRLIVDKEGASMRERTLVLKEKLKASIRGGGSSCNALDELVKHLKTE

SEQ ID NO: 71094 - protein, 424 aa, Arabidopsis thaliana
  peptide (1)..(424): Ceres Seq. ID no. 3049087
  misc_feature (95)..(422): Pfam Name: UDP-glucoronosyl and UDP-glucosyl transferase Pfam Description: UDP-glucoronosyl and UDP-glucosyl transferase
  misc_feature (95)..(424): Homolog of NCBI NO: 15232621 NR Description: glucuronosyl transferase-like protein; protein At3g46700.1 [Arabidopsis thaliana] >gi|7487760|pir||T12980
  misc_feature (1)..(41): Homolog of NCBI NO: 15232621 NR Description: glucuronosyl transferase-like protein; protein At3g46700.1 [Arabidopsis thaliana] >gi|7487760|pir||T12980
  misc_feature (1)..(418): Homolog of NCBI NO: 15232619 NR Description: glucosyltransferase-like protein; protein id: [Arabidopsis thaliana] >gi|11258173|pir||T45605
  misc_feature (1)..(424): Homolog of NCBI NO: 15232620 NR Description: glucuronosyl transferase-like protein; protein At3g46690.1 [Arabidopsis thaliana] >gi|7433909|pir||T12981
  misc_feature (1)..(424): Homolog of NCBI NO: 26449469 NR Description: putative glucuronosyl transferase [Arabidopsis
  misc_feature (1)..(424): Homolog of NCBI NO: 15232623 NR Description: glucuronosyl transferase-like protein; protein At3g46720.1 [Arabidopsis thaliana] >gi|7433908|pir||T12978
  misc_feature (118)..(424): Homolog of NCBI NO: 15232598 NR Description: glucosyltransferase-like protein; protein id:
  misc_feature (1)..(114): Homolog of NCBI NO: 15232598 NR Description: glucosyltransferase-like protein; protein id:
  misc_feature (1)..(422): Homolog of NCBI NO: 30697251 NR Description: glycosyltransferase family [Arabidopsis thaliana]
  misc_feature (1)..(421): Homolog of NCBI NO: 15238467 NR Description: glucuronosyl transferase - like protein; protein
MMQLGQALILKGFSIIVPQGEFNRVNSSQKFPGFQFITIPDSELEANGPVGSLTQLNKIMEASFKDCIRQLLKQQGNDIACIIYDEFMYFCGAVAEELKLPNFIFSTQTATHKVCCNVLSKLNAKKYLIDMEEHDVQNKVVENMHPLRYKDLPTATFGELEPFLELCRDVVNKRTASAVIINTVTCLESSSLTRLQQELQIPVYPLGPLHITDSSTGFTVLQEDRSCVEWLNKQKPRSVIYISLGSMVLMETKEMLEMAWGMLNSNQPFLWVIRPGSVSGSEGIESLPEEVSKMVLEKGYIVKWAPQIEVLGHPSVGGFWSHCGWNSTLESIVEGVPMICRPYQGEQMLNAIYLESVWRIGIQVGGELERGAVERAVKRLIVDKEGASMRERTLVLKEKLKASIRGGGSSCNALDELVKHLKTE

SEQ ID NO: 71095 - protein, 423 aa, Arabidopsis thaliana
  peptide (1)..(423): Ceres Seq. ID no. 3049088
  misc_feature (94)..(421): Pfam Name: UDP-glucoronosyl and UDP-glucosyl transferase Pfam Description: UDP-glucoronosyl and UDP-glucosyl transferase
  misc_feature (94)..(423): Homolog of NCBI NO: 15232621 NR Description: glucuronosyl transferase-like protein; protein At3g46700.1 [Arabidopsis thaliana] >gi|7487760|pir||T12980
  misc_feature (1)..(40): Homolog of NCBI NO: 15232621 NR Description: glucuronosyl transferase-like protein; protein At3g46700.1 [Arabidopsis thaliana] >gi|7487760|pir||T12980
  misc_feature (1)..(417): Homolog of NCBI NO: 15232619 NR Description: glucosyltransferase-like protein; protein id: [Arabidopsis thaliana] >gi|11258173|pir||T45605
  misc_feature (1)..(423): Homolog of NCBI NO: 15232620 NR Description: glucuronosyl transferase-like protein; protein At3g46690.1 [Arabidopsis thaliana] >gi|7433909|pir||T12981
  misc_feature (1)..(423): Homolog of NCBI NO: 26449469 NR Description: putative glucuronosyl transferase [Arabidopsis
  misc_feature (1)..(423): Homolog of NCBI NO: 15232623 NR Description: glucuronosyl transferase-like protein; protein At3g46720.1 [Arabidopsis thaliana] >gi|7433908|pir||T12978
  misc_feature (117)..(423): Homolog of NCBI NO: 15232598 NR Description: glucosyltransferase-like protein; protein id:
  misc_feature (1)..(113): Homolog of NCBI NO: 15232598 NR Description: glucosyltransferase-like protein; protein id:
  misc_feature (1)..(421): Homolog of NCBI NO: 30697251 NR Description: glycosyltransferase family [Arabidopsis thaliana]
  misc_feature (1)..(420): Homolog of NCBI NO: 15238467 NR Description: glucuronosyl transferase - like protein; protein
MQLGQALILKGFSIIVPQGEFNRVNSSQKFPGFQFITIPDSELEANGPVGSLTQLNKIMEASFKDCIRQLLKQQGNDIACIIYDEFMYFCGAVAEELKLPNFIFSTQTATHKVCCNVLSKLNAKKYLIDMEEHDVQNKVVENMHPLRYKDLPTATFGELEPFLELCRDVVNKRTASAVIINTVTCLESSSLTRLQQELQIPVYPLGPLHITDSSTGFTVLQEDRSCVEWLNKQKPRSVIYISLGSMVLMETKEMLEMAWGMLNSNQPFLWVIRPGSVSGSEGIESLPEEVSKMVLEKGYIVKWAPQIEVLGHPSVGGFWSHCGWNSTLESIVEGVPMICRPYQGEQMLNAIYLESVWRIGIQVGGELERGAVERAVKRLIVDKEGASMRERTLVLKEKLKASIRGGGSSCNALDELVKHLKTE

SEQ ID NO: 71096 - DNA, 1161 bp, Arabidopsis thaliana
  misc_feature (1)..(1161): Ceres Seq. ID no. 3049249
  misc_feature: MA Experiment ID: 20001906 Result: Up-regulated in Transcription
  misc_feature: MA Experiment 20001906 PARAMETER Experiment Name: At_Drought_Reproduction_P Parameter: Age (day) Value: 35
  misc_feature: MA Experiment 20001906 PARAMETER Experiment Name: At_Drought_Reproduction_P Parameter: Organism Value: A. thaliana
  misc_feature: MA Experiment 20001906 PARAMETER Experiment Name: At_Drought_Reproduction_P Parameter: Plant Line Value: WS
  misc_feature: MA Experiment 20001906 PARAMETER Experiment Name: At_Drought_Reproduction_P Parameter: Timepoint (day) Value: 5
  misc_feature: MA Experiment 20001906 PARAMETER Experiment Name: At_Drought_Reproduction_P Parameter: Tissue Value: Siliques
  misc_feature: MA Experiment 20001906 PARAMETER Experiment Name: At_Drought_Reproduction_P Parameter: Treatment Value: Drought vs. No Drought
atgaagaagcaaaagattacaacctttgttaaagaactcaacttacggatgaattcgaagaaagaaccgataagtctccgatacattcacatccttggcaccgttgtcttcttctcctctgtctcctctctcgtcatcctccttgctttttaccttaaccaacgcctccaaacatcactcttcctcgtcgaagattatcacactctctcctcaaatcctctcacttctccttccctctctcctcctccttctccttctcctcgcagctctggtagtaatattgcagacgaagagctgatgtggcgagcagcgatggccccacgcagccccatgaagaatgagacccatccaaaggttgcgttcatgtttctaacgaggtggaatttgccgttgtcccctctttgggaaatgttcttcaaaggtcatgaagggttttattccatctacgttcatacctcgccggagttcactcaagagccgccggaatcttcagtattttacaagaaacggataccaagcaaggccgttgaatggggaaaatgttcgatgatggatgcagagaagcgtcttatatctcatgccctactagaaccttccaacgcacgcttcgtcctcctctccgagacttgtatccctctcttcaacttcaccacaatctacacttacctcacgcgctccactcgctctttcctcggctcattcgacgacccaaggcccatgggccgaggccgttacacccctaaaatgctcccacacgtgtcgctctctgactggcggaaaggaaaccaatggttcgaaatctcacgtagagtcgccgccgagatcgtctctgatcgccggtactacgccgtctttaaggatcactgccgaccgccgtgttatatcgacgagcattatcttccgacgttagttaacaagatttgtccggagatgaattcgaaccggacagtgacgtgggttgattggtcaagaggtgggtcccatccagcgaggtttgtgaggaaagatattcgggtcgggttcttggatcggatccggttcggttcgaattgtagctacgaaggtgaggtgacgaatgtgtgttttcttttcgggaggaagtttcatgtgagcaccctcgagcctctcatgaagattgctccatatttgtttggaatttaa

SEQ ID NO: 71097 - protein, 386 aa, Arabidopsis thaliana
  peptide (1)..(386): Ceres Seq. ID no. 3049250
  misc_feature (154)..(265): Pfam Name: Arabidopsis protein of unknown function, DUF266 Pfam Description: Arabidopsis protein of unknown function, DUF266
  misc_feature (1)..(367): Homolog of NCBI NO: 15220232 NR Description: hypothetical protein; protein id: At1g10880.1
  misc_feature (93)..(385): Homolog of NCBI NO: 15239155 NR Description: putative protein; protein id: At5g11730.1, by cDNA: gi_20260569 [Arabidopsis thaliana]
  misc_feature (118)..(385): Homolog of NCBI NO: 15237293 NR Description: putative protein; protein id: At5g16170.1
  misc_feature (18)..(385): Homolog of NCBI NO: 18402952 NR Description: expressed protein; protein id: At3g21310.1,
  misc_feature (18)..(385): Homolog of NCBI NO: 21554566 NR Description: unknown [Arabidopsis thaliana]
  misc_feature (38)..(380): Homolog of NCBI NO: 15221386 NR Description: hypothetical protein; protein id: At1g68390.1
  misc_feature (93)..(383): Homolog of NCBI NO: 15239557 NR Description: putative protein; protein id: At5g25970.1 thaliana] >gi|5107829|gb|AAD40142.1|AF149413_23 contains to several Arabidopsis thaliana hypothetical proteins including
  misc_feature (87)..(385): Homolog of NCBI NO: 15218485 NR Description: unknown protein; protein id: At1g10280.1 thaliana] >gi|4914330|gb|AAD32878.1|AC005489_16 F14N23.16
  misc_feature (18)..(381): Homolog of NCBI NO: 15218028 NR Description: hypothetical protein; protein id: At1g51770.1
  misc_feature (91)..(383): Homolog of NCBI NO: 38344090 NR Description: OSJNBb0056F09.13 [Oryza sativa (japonica
MKKQKITTFVKELNLRMNSKKEPISLRYIHILGTVVFFSSVSSLVILLAFYLNQRLQTSLFLVEDYHTLSSNPLTSPSLSPPPSPSPRSSGSNIADEELMWRAAMAPRSPMKNETHPKVAFMFLTRWNLPLSPLWEMFFKGHEGFYSIYVHTSPEFTQEPPESSVFYKKRIPSKAVEWGKCSMMDAEKRLISHALLEPSNARFVLLSETCIPLFNFTTIYTYLTRSTRSFLGSFDDPRPMGRGRYTPKMLPHVSLSDWRKGNQWFEISRRVAAEIVSDRRYYAVFKDHCRPPCYIDEHYLPTLVNKICPEMNSNRTVTWVDWSRGGSHPARFVRKDIRVGFLDRIRFGSNCSYEGEVTNVCFLFGRKFHVSTLEPLMKIAPYLFGI

SEQ ID NO: 71098 - protein, 370 aa, Arabidopsis thaliana
  peptide (1)..(370): Ceres Seq. ID no. 3049251
  misc_feature (138)..(249): Pfam Name: Arabidopsis protein of unknown function, DUF266 Pfam Description: Arabidopsis protein of unknown function, DUF266
  misc_feature (1)..(351): Homolog of NCBI NO: 15220232 NR Description: hypothetical protein; protein id: At1g10880.1
  misc_feature (77)..(369): Homolog of NCBI NO: 15239155 NR Description: putative protein; protein id: At5g11730.1, by cDNA: gi_20260569 [Arabidopsis thaliana]
  misc_feature (102)..(369): Homolog of NCBI NO: 15237293 NR Description: putative protein; protein id: At5g16170.1
  misc_feature (2)..(369): Homolog of NCBI NO: 18402952 NR Description: expressed protein; protein id: At3g21310.1,
  misc_feature (2)..(369): Homolog of NCBI NO: 21554566 NR Description: unknown [Arabidopsis thaliana]
  misc_feature (22)..(364): Homolog of NCBI NO: 15221386 NR Description: hypothetical protein; protein id: At1g68390.1
  misc_feature (77)..(367): Homolog of NCBI NO: 15239557 NR Description: putative protein; protein id: At5g25970.1 thaliana] >gi|5107829|gb|AAD40142.1|AF149413_23 contains to several Arabidopsis thaliana hypothetical proteins including
  misc_feature (71)..(369): Homolog of NCBI NO: 15218485 NR Description: unknown protein; protein id: At1g10280.1 thaliana] >gi|4914330|gb|AAD32878.1|AC005489_16 F14N23.16
  misc_feature (2)..(365): Homolog of NCBI NO: 15218028 NR Description: hypothetical protein; protein id: At1g51770.1
  misc_feature (75)..(367): Homolog of NCBI NO: 38344090 NR Description: OSJNBb0056F09.13 [Oryza sativa (japonica
MNSKKEPISLRYIHILGTVVFFSSVSSLVILLAFYLNQRLQTSLFLVEDYHTLSSNPLTSPSLSPPPSPSPRSSGSNIADEELMWRAAMAPRSPMKNETHPKVAFMFLTRWNLPLSPLWEMFFKGHEGFYSIYVHTSPEFTQEPPESSVFYKKRIPSKAVEWGKCSMMDAEKRLISHALLEPSNARFVLLSETCIPLFNFTTIYTYLTRSTRSFLGSFDDPRPMGRGRYTPKMLPHVSLSDWRKGNQWFEISRRVAAEIVSDRRYYAVFKDHCRPPCYIDEHYLPTLVNKICPEMNSNRTVTWVDWSRGGSHPARFVRKDIRVGFLDRIRFGSNCSYEGEVTNVCFLFGRKFHVSTLEPLMKIAPYLFGI

SEQ ID NO: 71099 - protein, 287 aa, Arabidopsis thaliana
  peptide (1)..(287): Ceres Seq. ID no. 3049252
  misc_feature (55)..(166): Pfam Name: Arabidopsis protein of unknown function, DUF266 Pfam Description: Arabidopsis protein of unknown function, DUF266
  misc_feature (1)..(268): Homolog of NCBI NO: 15220232 NR Description: hypothetical protein; protein id: At1g10880.1
  misc_feature (1)..(286): Homolog of NCBI NO: 15239155 NR Description: putative protein; protein id: At5g11730.1, by cDNA: gi_20260569 [Arabidopsis thaliana]
  misc_feature (19)..(286): Homolog of NCBI NO: 15237293 NR Description: putative protein; protein id: At5g16170.1
  misc_feature (1)..(286): Homolog of NCBI NO: 18402952 NR Description: expressed protein; protein id: At3g21310.1,
  misc_feature (1)..(286): Homolog of NCBI NO: 21554566 NR Description: unknown [Arabidopsis thaliana]
  misc_feature (1)..(281): Homolog of NCBI NO: 15221386 NR Description: hypothetical protein; protein id: At1g68390.1
  misc_feature (1)..(284): Homolog of NCBI NO: 15239557 NR Description: putative protein; protein id: At5g25970.1 thaliana] >gi|5107829|gb|AAD40142.1|AF149413_23 contains to several Arabidopsis thaliana hypothetical proteins including
  misc_feature (1)..(286): Homolog of NCBI NO: 15218485 NR Description: unknown protein; protein id: At1g10280.1 thaliana] >gi|4914330|gb|AAD32878.1|AC005489_16 F14N23.16
  misc_feature (1)..(282): Homolog of NCBI NO: 15218028 NR Description: hypothetical protein; protein id: At1g51770.1
  misc_feature (1)..(284): Homolog of NCBI NO: 38344090 NR Description: OSJNBb0056F09.13 [Oryza sativa (japonica
MWRAAMAPRSPMKNETHPKVAFMFLTRWNLPLSPLWEMFFKGHEGFYSIYVHTSPEFTQEPPESSVFYKKRIPSKAVEWGKCSMMDAEKRLISHALLEPSNARFVLLSETCIPLFNFTTIYTYLTRSTRSFLGSFDDPRPMGRGRYTPKMLPHVSLSDWRKGNQWFEISRRVAAEIVSDRRYYAVFKDHCRPPCYIDEHYLPTLVNKICPEMNSNRTVTWVDWSRGGSHPARFVRKDIRVGFLDRIRFGSNCSYEGEVTNVCFLFGRKFHVSTLEPLMKIAPYLFGI
